United States Patent Application Publication US 2006/0150283 A1 - sequence listing, part 11

SEQ ID NO: 42326 - protein, 88 aa, Arabidopsis thaliana
  peptide (1)..(88): Ceres Seq. ID no. 12326579
MCLAGSRPVSERVPKPSQGTRELLHQLKLVFEHQGRENSEFVVHKITTLKCLIMTIFLCGLCVFKVLDMDGFQFASLLILFILIIMVP

SEQ ID NO: 42327 - DNA, 2116 bp, Arabidopsis thaliana
  misc_feature (1)..(2116): Ceres Seq. ID no. 12562750
  misc_feature (1)..(2116): Ortholog of  Ceres SEQ ID NO 14315473 as cited in SEQ ID NO 57173
ctcttttccgattcctctcaatctctctttcttcttctttttctctcgctccaaattccatgtctgtgtctctttcctcctccgccgtataattcgccggaaaaattatctccctttgattttcgaacacctccgcgaactatgcgcttcttttgcccttatcctccaactacttgtcggatctgcaattcttcttgtcaattcccaaccctaatcggagctaatcacacctctgctcgtttctcttctcgttagtctctgctccatctcctcctcagatttagggatatttgcttccaatttaacaaacaaaccaagagctattctttcgttctttattctctccgtcttgtaaagtagttttagcagtgagatacatacaaatggagacttccatggggaaacccagcttcttacggaatataatggttcgcgtgcttctctttggtgttcttatcatcgttgtgagatttgcttatgttgtcaccatcaccggtgaatcatgcaatcgcggcgacttctgcttcttctctctccctgagaatctcaactttgtcatctccggtgctgcctccggctcttctgctatcgacgccatcagatctacttcccctggggatgatctctacaccaccagggattggatcaaatccgttcagttttactcctccatcttccaggatctgatcgccgacggttatctatcgcctgaatcgaagacgctttgtgtagagacggcgattggacaagaggttcactcgctcagagagattggggtgaagaactccgtcgggatctctaagaaagcttctaggccgttggtggttagaggcgagggacatgctattccctttgaggataacgctttcgattttgtattctccggtggtgaccgccttgggaagtcgttgaagcagttggaattcgccgatgagattactcgaacactgaaacccgaagggtttgcggtggttcatgttggggctacagatacgtacagtttcaattcattccttgatttgtttaattcttgcagattggtgaagatgcgtgatatcgatggttttgatccttcgatgcctcatatcagagaatttgttattcagaaatactcagagattgatggtggtggtcatcaccaccgtggtggtggtgattctggtggaaagtgctggattccgggttacaaaagagatttgattcgggatgcagagccactgattcaagaggagcctcttaagccatggattacacttaagaggaacatcaagaatattaaatatgtgccttctatggttgatatacgtttcaagagtagatacgtttacgttgatgttggtgctagaagttatggatccagtattgggagttggttcaagaaagagtaccctaagcagaacaaaacttttgatgttttcgccattgaggctgacaaagcctttcacgaagagtataagataaagaagaaggtgaacctgttgccatacgcagcgtgggtgaggaacgagacgttatcgtttgagatcaatcacgatccgggaaaggaagtggaagccaaagcaaagggcagggggatgggcagaatccagccggttaaaaagtctgactcgagtgacttagctggagaggtgaatttgattcaagggtttgatttcgctgactggttgaagaagagtgtgagagagagggactttgttgtgatgaagatggatgttgaaggaaccgaattcgatctgatcccgaggctaatcaagacaggagcgatttgtctaatagatgagttgttccttgaatgccattacaacaggtggcagagatgttgtcctggtcaaaggagccaaaagtacaacaagacttataaccaatgcttagagctcttcaattcgctcagacaaagaggggtgcttgtccatcaatggtggtaatggttaggatgctgcataaaagtctccttcttctatgcatttggtgaaaaatgtactttcttcttctagaatatataaagcgggatattgtaggtttctattaaaaatacgttgtctgtgctgaaattcccttttactgtaagaaaaaagaagtttagctttaaatggaaatttgagtttcttttacgctt

SEQ ID NO: 42328 - protein, 513 aa, Arabidopsis thaliana
  peptide (1)..(513): Ceres Seq. ID no. 12562751
METSMGKPSFLRNIMVRVLLFGVLIIVVRFAYVVTITGESCNRGDFCFFSLPENLNFVISGAASGSSAIDAIRSTSPGDDLYTTRDWIKSVQFYSSIFQDLIADGYLSPESKTLCVETAIGQEVHSLREIGVKNSVGISKKASRPLVVRGEGHAIPFEDNAFDFVFSGGDRLGKSLKQLEFADEITRTLKPEGFAVVHVGATDTYSFNSFLDLFNSCRLVKMRDIDGFDPSMPHIREFVIQKYSEIDGGGHHHRGGGDSGGKCWIPGYKRDLIRDAEPLIQEEPLKPWITLKRNIKNIKYVPSMVDIRFKSRYVYVDVGARSYGSSIGSWFKKEYPKQNKTFDVFAIEADKAFHEEYKIKKKVNLLPYAAWVRNETLSFEINHDPGKEVEAKAKGRGMGRIQPVKKSDSSDLAGEVNLIQGFDFADWLKKSVRERDFVVMKMDVEGTEFDLIPRLIKTGAICLIDELFLECHYNRWQRCCPGQRSQKYNKTYNQCLELFNSLRQRGVLVHQWW

SEQ ID NO: 42329 - protein, 509 aa, Arabidopsis thaliana
  peptide (1)..(509): Ceres Seq. ID no. 12562752
MGKPSFLRNIMVRVLLFGVLIIVVRFAYVVTITGESCNRGDFCFFSLPENLNFVISGAASGSSAIDAIRSTSPGDDLYTTRDWIKSVQFYSSIFQDLIADGYLSPESKTLCVETAIGQEVHSLREIGVKNSVGISKKASRPLVVRGEGHAIPFEDNAFDFVFSGGDRLGKSLKQLEFADEITRTLKPEGFAVVHVGATDTYSFNSFLDLFNSCRLVKMRDIDGFDPSMPHIREFVIQKYSEIDGGGHHHRGGGDSGGKCWIPGYKRDLIRDAEPLIQEEPLKPWITLKRNIKNIKYVPSMVDIRFKSRYVYVDVGARSYGSSIGSWFKKEYPKQNKTFDVFAIEADKAFHEEYKIKKKVNLLPYAAWVRNETLSFEINHDPGKEVEAKAKGRGMGRIQPVKKSDSSDLAGEVNLIQGFDFADWLKKSVRERDFVVMKMDVEGTEFDLIPRLIKTGAICLIDELFLECHYNRWQRCCPGQRSQKYNKTYNQCLELFNSLRQRGVLVHQWW

SEQ ID NO: 42330 - protein, 499 aa, Arabidopsis thaliana
  peptide (1)..(499): Ceres Seq. ID no. 12562753
MVRVLLFGVLIIVVRFAYVVTITGESCNRGDFCFFSLPENLNFVISGAASGSSAIDAIRSTSPGDDLYTTRDWIKSVQFYSSIFQDLIADGYLSPESKTLCVETAIGQEVHSLREIGVKNSVGISKKASRPLVVRGEGHAIPFEDNAFDFVFSGGDRLGKSLKQLEFADEITRTLKPEGFAVVHVGATDTYSFNSFLDLFNSCRLVKMRDIDGFDPSMPHIREFVIQKYSEIDGGGHHHRGGGDSGGKCWIPGYKRDLIRDAEPLIQEEPLKPWITLKRNIKNIKYVPSMVDIRFKSRYVYVDVGARSYGSSIGSWFKKEYPKQNKTFDVFAIEADKAFHEEYKIKKKVNLLPYAAWVRNETLSFEINHDPGKEVEAKAKGRGMGRIQPVKKSDSSDLAGEVNLIQGFDFADWLKKSVRERDFVVMKMDVEGTEFDLIPRLIKTGAICLIDELFLECHYNRWQRCCPGQRSQKYNKTYNQCLELFNSLRQRGVLVHQWW

SEQ ID NO: 42331 - DNA, 633 bp, Arabidopsis thaliana
  misc_feature (1)..(633): Ceres Seq. ID no. 13575120
  misc_feature (1)..(633): Ortholog of  Ceres SEQ ID NO 15173015 as cited in SEQ ID NO 51216
aaaaaaatcaaaccgaagaaaaagccaagaatcaagaaagttaacacaacagctaagaatggatttggagtttggaaggtttccaatattttcaatcctcgaagacatgcttgaagcccctgaagaacaaaccgagaagactcgtaacaacccttcaagagcttacatgcgagacgcaaaggcaatggctgctacaccagctgacgttatcgagcacccggatgcgtacgttttcgccgtggacatgcctggaatcaaaggagatgagattcaggtccagatagagaacgagaacgtgcttgtggtgagtggcaaaagacagagggacaacaaggagaatgaaggtgtgaagtttgtgaggatggagaggaggatggggaagtttatgaggaagtttcagttacctgataatgcagatttggagaagatctctgcggcttgtaatgacggtgtgttgaaagtgactattccgaaacttcctcctcctgagccaaagaaaccaaagactatacaagttcaagtcgcttgagtttgtttgtgatcgtgtttttgtgttttaatgaatgtaatcgataagcaactacctcttggtgttcgttgtaaaatgaaataaaaatagttttctctgttcat

SEQ ID NO: 42332 - protein, 175 aa, Arabidopsis thaliana
  peptide (1)..(175): Ceres Seq. ID no. 13575121
KKSNRRKSQESRKLTQQLRMDLEFGRFPIFSILEDMLEAPEEQTEKTRNNPSRAYMRDAKAMAATPADVIEHPDAYVFAVDMPGIKGDEIQVQIENENVLVVSGKRQRDNKENEGVKFVRMERRMGKFMRKFQLPDNADLEKISAACNDGVLKVTIPKLPPPEPKKPKTIQVQVA

SEQ ID NO: 42333 - protein, 156 aa, Arabidopsis thaliana
  peptide (1)..(156): Ceres Seq. ID no. 13575122
MDLEFGRFPIFSILEDMLEAPEEQTEKTRNNPSRAYMRDAKAMAATPADVIEHPDAYVFAVDMPGIKGDEIQVQIENENVLVVSGKRQRDNKENEGVKFVRMERRMGKFMRKFQLPDNADLEKISAACNDGVLKVTIPKLPPPEPKKPKTIQVQVA

SEQ ID NO: 42334 - protein, 140 aa, Arabidopsis thaliana
  peptide (1)..(140): Ceres Seq. ID no. 13575123
MLEAPEEQTEKTRNNPSRAYMRDAKAMAATPADVIEHPDAYVFAVDMPGIKGDEIQVQIENENVLVVSGKRQRDNKENEGVKFVRMERRMGKFMRKFQLPDNADLEKISAACNDGVLKVTIPKLPPPEPKKPKTIQVQVA

SEQ ID NO: 42335 - DNA, 1466 bp, Arabidopsis thaliana
  misc_feature (1)..(1466): Ceres Seq. ID no. 12336518
  misc_feature (1)..(1466): Ortholog of  Ceres SEQ ID NO 13587235 as cited in SEQ ID NO 0
tgtagttaggtcaatggaacagacaaaggatgattctgattttgaggatgattttgaaacgaagaagatggagactgatacatcagctcaagaggcaaggaatggtaaagacatacaagggattcagtgggaagggtttaagtatactacagacgagtttcgtgacactaggttgaaacattatgataactttgttaatatcttaaggcctagctctcgagaaaagcttgataaggaacatgggcaagtagttgagaaaggaaagaacttttatgacttccaattcaatacaaggcttgtcacttccactattgtgcattttcagttgggagtactgtctgagcagccagcagcataacgatatggcttcggaatttggtatgggcgacatctaagcatgatgtatatctaatgcaaaattattcactcatgcactggtcatctctactccagagagggaaagaagtagttaatgtcgccagatcagttacccccactcagaaactacctggattgttttctgagccactctctagggtgcaagttagcagcatggcagtcaaagaaaatctgatccttttaggagggttcgacggggagcttctctgcaagtgtgtaaatcagcctggggttgctttttgcacaagattatcaacggaagataatgccatcacacacagttgatatataccgagacccaagtggctcccttaggcttataaccgcaaataacgactgtaaaatccgggtattcgatgctcagagctttacacgtgtcagtgaatttacttttgattggtctgtcaataatacctcagttagcccggatgggaagctactcgctgtactcggggacagtacagaatgcttgatctctgattcccattctgaaaaagttatttcaagcctcagaggccacaaagactactcatttgcatctgcttggcacccgaatggtctaatcttagcaacgggaaaccaagacacgacatgccgtctctgggacattcgtaacccgtcagaatcattcgctgtcctgaaaggaaacatgggagccatcagaggactgaagttcacaccagaagggcggtttcttgcaatggctgagcctgcagactttgttcacatcttcgacacgcagtccgggtttctacagtcccaagagattgatctgtttggagaaatagccgggatctccttcagccccgactcagaggcactatatgttggggtcgcagaccgcacttatggaagcttgatggagtataagaggagtaaggataatcactatatggactccttttactgagaaaaggtaaatggaaagtaaaaagcatctaatatgttgtcacaagttgggttttaccctattagtgtgtatatgtagacagaattggtagtttctttggttatgtatgttgtatgtaacccataatatatcttgccaaactttaagtatgttttgt

SEQ ID NO: 42336 - protein, 214 aa, Arabidopsis thaliana
  peptide (1)..(214): Ceres Seq. ID no. 12336519
MPSHTVDIYRDPSGSLRLITANNDCKIRVFDAQSFTRVSEFTFDWSVNNTSVSPDGKLLAVLGDSTECLISDSHSEKVISSLRGHKDYSFASAWHPNGLILATGNQDTTCRLWDIRNPSESFAVLKGNMGAIRGLKFTPEGRFLAMAEPADFVHIFDTQSGFLQSQEIDLFGEIAGISFSPDSEALYVGVADRTYGSLMEYKRSKDNHYMDSFY

SEQ ID NO: 42337 - protein, 118 aa, Arabidopsis thaliana
  peptide (1)..(118): Ceres Seq. ID no. 12336520
VVRSMEQTKDDSDFEDDFETKKMETDTSAQEARNGKDIQGIQWEGFKYTTDEFRDTRLKHYDNFVNILRPSSREKLDKEHGQVVEKGKNFYDFQFNTRLVTSTIVHFQLGVLSEQPAA

SEQ ID NO: 42338 - protein, 114 aa, Arabidopsis thaliana
  peptide (1)..(114): Ceres Seq. ID no. 12336521
MEQTKDDSDFEDDFETKKMETDTSAQEARNGKDIQGIQWEGFKYTTDEFRDTRLKHYDNFVNILRPSSREKLDKEHGQVVEKGKNFYDFQFNTRLVTSTIVHFQLGVLSEQPAA

SEQ ID NO: 42339 - DNA, 1766 bp, Arabidopsis thaliana
  misc_feature (1)..(1766): Ceres Seq. ID no. 13592405
  misc_feature (1)..(1766): Ortholog of  Ceres SEQ ID NO 15171618 as cited in SEQ ID NO 59968
atttctttctaatttcttctcttcatgaattaagccaaaccaacaaaaaaaatcatttaattttcgcggagagatggagaaattctcgtacaactcttatccagattcaaccgactcgtcaccgakatctcgtgagatcgaattcgataacccgccgcctccatgggatgatcagaaccmgaaccagcagcaacatagctacaaggtgaagtttatgtgcagctatggcggcaagattcagccacggcctcacgataatcagctcacttacgtaaacggagaaacgaagattctttccgttgatcgcgggattagattccctgttttagcttccaaactctccaccgtatgcggcggcggtgatgkcggcggaggagaagttacgtttaagtatcagcttccgggagaagacttagacgctttgatctcggttacgaacgatgatgatctggagcatatgatgcacgagtacgatcgcttgcttcgtttgtcgtctaagccagcgaggatgcgtttgtttctcttcccggcttcttctggatttggttctcaaagttcgactcaatcgggatcgagatcgcttcgtcgaggcgttgaacactgttcctaggctatctggaatcggagaaatccgtaactgctcctccgaataatgcggattttttgtttggatcggagaaagttgcagctccgccgccgccaccaccggctgaggtgaaattaccggttcctgtggcgttagaaccgcctttgtttaacgatccgcgtgtgattcaaccggatcacgtcgtaaatccgatggaaattcaaagacaaatgcaggaatttcagaggatgcatattagggatcaagaacaacaacaacaacaacaacaggaagctgtatacagaaggaagagtaacgaagacggtttaatagaaaccggaggtggatacttctctccaccgtacatacaaaatcctgcgccaccaccgccacagcagacgattcctcaracgaatccgcaagctcmtccgatgacgactttctggcaaggaaaccacaatccaggagtcgtatttccaacaaccacacatgggattaggattaccagagcaaccagtttacatgatcccatctccatctccatctccggtgtaccacgcgccaccaccrccgcaaccgcaaggygtcatmagaccaatacttacaggacaagtaaaycaaggcggctactatcctcaggtacagagartggcttcagatacttacagagaaccacaccaatcaccgtacaacgtggctcagccacttcaggcacctataggaacaaaagcagcacaacaacaacaacctcctcctcctcagccttttacctctggtcctccaccaccgcaatacaccgcagtaccaccgccacgacaagtagtaggattaccagatacatcagcgtatactcaggtgacttacactggaggaatggggaaacaagtttattacacggaggctccaccgccgcagtaccatggagttggcttacctgtaactggtatgagtgaattgagaactggaccggacgggaagcttgttgctatgaacatggcacctaaagtttcatctcagagttcagattcggctgtttgattgatgaggtatttcatatggttgaatcagattattgttaatctattacaacaaatttcatcatcttttatatatatatatatatatagtgtaattaagatcactttggtgtctgataaataatgtttttttcttttccccc

SEQ ID NO: 42340 - protein, 246 aa, Arabidopsis thaliana
  peptide (1)..(246): Ceres Seq. ID no. 15221095
  misc_feature (66)..(66): Xaa is any aa, unknown or other
  misc_feature (72)..(72): Xaa is any aa, unknown or other
  misc_feature (120)..(120): Xaa is any aa, unknown or other
  misc_feature (125)..(125): Xaa is any aa, unknown or other
  misc_feature (127)..(127): Xaa is any aa, unknown or other
  misc_feature (136)..(136): Xaa is any aa, unknown or other
  misc_feature (146)..(146): Xaa is any aa, unknown or other
MEIQRQMQEFQRMHIRDQEQQQQQQQEAVYRRKSNEDGLIETGGGYFSPPYIQNPAPPPPQQTIPXTNPQAXPMTTFWQGNHNPGVVFPTTTHGIRITRATSLHDPISISISGVPRATTXATARXHXTNTYRTSKXRRLLSSGTEXGFRYLQRTTPITVQRGSATSGTYRNKSSTTTTTSSSSAFYLWSSTTAIHRSTTATTSSRITRYISVYSGDLHWRNGETSLLHGGSTAAVPWSWLTCNWYE

SEQ ID NO: 42341 - protein, 240 aa, Arabidopsis thaliana
  peptide (1)..(240): Ceres Seq. ID no. 15221096
  misc_feature (60)..(60): Xaa is any aa, unknown or other
  misc_feature (66)..(66): Xaa is any aa, unknown or other
  misc_feature (114)..(114): Xaa is any aa, unknown or other
  misc_feature (119)..(119): Xaa is any aa, unknown or other
  misc_feature (121)..(121): Xaa is any aa, unknown or other
  misc_feature (130)..(130): Xaa is any aa, unknown or other
  misc_feature (140)..(140): Xaa is any aa, unknown or other
MQEFQRMHIRDQEQQQQQQQEAVYRRKSNEDGLIETGGGYFSPPYIQNPAPPPPQQTIPXTNPQAXPMTTFWQGNHNPGVVFPTTTHGIRITRATSLHDPISISISGVPRATTXATARXHXTNTYRTSKXRRLLSSGTEXGFRYLQRTTPITVQRGSATSGTYRNKSSTTTTTSSSSAFYLWSSTTAIHRSTTATTSSRITRYISVYSGDLHWRNGETSLLHGGSTAAVPWSWLTCNWYE

SEQ ID NO: 42342 - protein, 234 aa, Arabidopsis thaliana
  peptide (1)..(234): Ceres Seq. ID no. 15221097
  misc_feature (54)..(54): Xaa is any aa, unknown or other
  misc_feature (60)..(60): Xaa is any aa, unknown or other
  misc_feature (108)..(108): Xaa is any aa, unknown or other
  misc_feature (113)..(113): Xaa is any aa, unknown or other
  misc_feature (115)..(115): Xaa is any aa, unknown or other
  misc_feature (124)..(124): Xaa is any aa, unknown or other
  misc_feature (134)..(134): Xaa is any aa, unknown or other
MHIRDQEQQQQQQQEAVYRRKSNEDGLIETGGGYFSPPYIQNPAPPPPQQTIPXTNPQAXPMTTFWQGNHNPGVVFPTTTHGIRITRATSLHDPISISISGVPRATTXATARXHXTNTYRTSKXRRLLSSGTEXGFRYLQRTTPITVQRGSATSGTYRNKSSTTTTTSSSSAFYLWSSTTAIHRSTTATTSSRITRYISVYSGDLHWRNGETSLLHGGSTAAVPWSWLTCNWYE

SEQ ID NO: 42343 - DNA, 961 bp, Arabidopsis thaliana
  misc_feature (1)..(961): Ceres Seq. ID no. 13497655
  misc_feature (1)..(961): Ortholog of  Ceres SEQ ID NO 14315076 as cited in SEQ ID NO 57157
gattttcctcttctcttcttcttcctcctcctcctctcggattcttccttaaagtttccacctttcgccaccgagaaaacattccggcaaaccctcgtcggaatacttaatctctttgataatctttctctctggtgacgttttgtgaatggtggaaactaatctgattggtgataatcataggctcaccctttcaactaaaagggcgagctttctcatcatccctctctctcaagactctgttttctcattcggttcttgcaaagaaggctggtacttccgttgcattggccttgacccgtgaaccaatcaatcatcatctccgatcatattttcaataataatttctgtgttttgattttttgagaattttgaaaaaaagatgttgctttacaagaaaaagaatcagattgttaaaggaaacagaatcttgatcagcgtaacgtttcttggtagtgctggtccgatccggttcgttgctaatgaaggtgatcttgttgcatctgtgattgatactgctttgaaatgttatgctcgtgaaggtcgtcttcctattcttggatctgatttcaacgattttgttttttattgtccaatggttggacctggagctttgagtccatgggaagcaattgggtcggtgggagtgaggaactttatgttgtgtaagaagaaaccagaggagaagaaggttgaggaagataagggaagatcgaattttccgattaatggagctagaaaaggagctggtggaagttttaaggcttggattaataaatctttaagacttaaagtgactacccattagagagactacttatatgttgtcttctctgtttctttgaatgctcatgtttggtttgtgtctttgttcttttgatcttcttattttatgaacttttgatttgttttttttgtttcttatgatggtttcaggaaataaaagtttcaagttcatttg

SEQ ID NO: 42344 - protein, 141 aa, Arabidopsis thaliana
  peptide (1)..(141): Ceres Seq. ID no. 13497656
MLLYKKKNQIVKGNRILISVTFLGSAGPIRFVANEGDLVASVIDTALKCYAREGRLPILGSDFNDFVFYCPMVGPGALSPWEAIGSVGVRNFMLCKKKPEEKKVEEDKGRSNFPINGARKGAGGSFKAWINKSLRLKVTTH

SEQ ID NO: 42345 - protein, 70 aa, Arabidopsis thaliana
  peptide (1)..(70): Ceres Seq. ID no. 13497657
MVGPGALSPWEAIGSVGVRNFMLCKKKPEEKKVEEDKGRSNFPINGARKGAGGSFKAWINKSLRLKVTTH

SEQ ID NO: 42346 - DNA, 708 bp, Arabidopsis thaliana
  misc_feature (1)..(708): Ceres Seq. ID no. 12423038
  misc_feature (1)..(708): Ortholog of  Ceres SEQ ID NO 13587227 as cited in SEQ ID NO 513
  misc_feature (1)..(708): Ortholog of  Ceres SEQ ID NO 13594494 as cited in SEQ ID NO 51293
  misc_feature (1)..(708): Ortholog of  Ceres SEQ ID NO 12598249 as cited in SEQ ID NO 61073
  misc_feature (1)..(708): Ortholog of  Ceres SEQ ID NO 13582815 as cited in SEQ ID NO 68106
aatatcatcttattatctctcaagttcttgattttaattaaagatgggtaaagacgaccaccacgaacaagacaaaagattcttctcacatcataatcatcacggccatgggtatccgccaggagcttatcctcctccaccgcagggagcttatcctccaccgggaggttaccctccgcaaggttatcctccaccacctcacggctatccaccggccgcttacccacctccacccggtgcttatcctcccgccgggtatcccggaccatccggtcctcgtccagggtttggaggaggagttgggggattgatagcaggagcggcaacagcggcagcggctgcaatgggaggtcaccatgcgggtcatcacggaggctacggcaccacggccacggaaaatacaaaagagggtttttcggaggaggaaagtacaagcgaggaaagcatagtatgtttggtggagggaagtacaagcgtggcaagcacggtatgttcggaggcaaaagaagcaagcatggcatgttcggagggaaacgaggcaaaggcatgttcggacgaaagaagtggaaatgatccattagcatcctctctacatatattatcgtaacaatttaacattaagcttaatataaaaatgtggatgtataatttgttttatatgatgtatatatagctatatgtatctatgaagagtatttaatatggttg

SEQ ID NO: 42347 - protein, 187 aa, Arabidopsis thaliana
  peptide (1)..(187): Ceres Seq. ID no. 12423039
MGKDDHHEQDKRFFSHHNHHGHGYPPGAYPPPPQGAYPPPGGYPPQGYPPPPHGYPPAAYPPPPGAYPPAGYPGPSGPRPGFGGGVGGLIAGAATAAAAAMGGHHAGHHGGYGTTATENTKEGFSEEESTSEESIVCLVEGSTSVASTVCSEAKEASMACSEGNEAKACSDERSGNDPLASSLHILS

SEQ ID NO: 42348 - DNA, 888 bp, Arabidopsis thaliana; identical to SEQ ID NO: 29116
  misc_feature (1)..(888): Ceres Seq. ID no. 13646051
  misc_feature (1)..(888): Ortholog of  Ceres SEQ ID NO 12610334 as cited in SEQ ID NO 56235
  misc_feature (1)..(888): Ortholog of  Ceres SEQ ID NO 13654825 as cited in SEQ ID NO 62409

SEQ ID NO: 42349 - protein, 214 aa, Arabidopsis thaliana; identical to SEQ ID NO: 29117
  peptide (1)..(214): Ceres Seq. ID no. 13646052

SEQ ID NO: 42350 - protein, 191 aa, Arabidopsis thaliana; identical to SEQ ID NO: 21067
  peptide (1)..(191): Ceres Seq. ID no. 13646053

SEQ ID NO: 42351 - DNA, 931 bp, Arabidopsis thaliana
  misc_feature (1)..(931): Ceres Seq. ID no. 12423127
  misc_feature (1)..(931): Ortholog of  Ceres SEQ ID NO 14314461 as cited in SEQ ID NO 52355
  misc_feature (1)..(931): Ortholog of  Ceres SEQ ID NO 14306812 as cited in SEQ ID NO 56361
  misc_feature (1)..(931): Ortholog of  Ceres SEQ ID NO 15168461 as cited in SEQ ID NO 57068
agaaaaatcatctctctgtttttccgaagaactaacacatgtcgggacctcagtgctgtgaaaacccgccaactcttaacccggtttccgggtcgggtcatgtcgagaagctgggtgggcttgatgcctacgtctccggctctgccgagtccaagctctgcgtcctcctcatttctgatatttttggttttgaagctccaaacttaagggcgcttgcggacaaggttgcagcttctggattctatgttgtagttcctgattactttggtggagatccttataatccctctaaccaggacagacccatccctgtctggatcaaagaccatggctgtgataagggctttgaaaacacgaaaccagtacttgaaaccataaagaacaaaggcataactgccattggagccgcagggatgtgttggggtgcaaaagtagtggtggaactgtctaaagaagagcttattcaagcagctgtgttgcttcatccttcttttgtcaatgttgatgatatcaaaggtgggaaggctccaattgctatattaggagctgaaattgatcaaatgtccccaccagcactcttgaagcaatttgaggagattctatcttccaaacccgaggtgaatagttacgtgaagatacacccgaaagtgtcacacggatggacagttagatacaacatcgatgaaccagaggcggttaaagcagcagaagaagctcacaaggagatgcttgattggtttgtgacctacatcaaatgatttgagaaagaaagaaaggtattgtctattacttcatatatgcaaagaataaaaattaaagagagacaaagcaaaactcttgattggtgtttcaatttctactttctatagtcttttgaagcattctctgagattctgtgataccttttgttaatcattgttttatgattttt

SEQ ID NO: 42352 - protein, 239 aa, Arabidopsis thaliana; identical to SEQ ID NO: 28662
  peptide (1)..(239): Ceres Seq. ID no. 12423128

SEQ ID NO: 42353 - DNA, 871 bp, Arabidopsis thaliana; identical to SEQ ID NO: 28518
  misc_feature (1)..(871): Ceres Seq. ID no. 12348502
  misc_feature (1)..(871): Ortholog of  Ceres SEQ ID NO 15179026 as cited in SEQ ID NO 0

SEQ ID NO: 42354 - protein, 249 aa, Arabidopsis thaliana; identical to SEQ ID NO: 28519
  peptide (1)..(249): Ceres Seq. ID no. 12348503

SEQ ID NO: 42355 - protein, 219 aa, Arabidopsis thaliana; identical to SEQ ID NO: 28520
  peptide (1)..(219): Ceres Seq. ID no. 12348504

SEQ ID NO: 42356 - DNA, 1977 bp, Arabidopsis thaliana
  misc_feature (1)..(1977): Ceres Seq. ID no. 12340433
  misc_feature (1)..(1977): Ortholog of  Ceres SEQ ID NO 14311131 as cited in SEQ ID NO 53729
  misc_feature (1)..(1977): Ortholog of  Ceres SEQ ID NO 13594037 as cited in SEQ ID NO 55666
  misc_feature (1)..(1977): Ortholog of  Ceres SEQ ID NO 13657707 as cited in SEQ ID NO 66407
aaacaccatcaatacacaaacaaaacaaaaaggatgaaaatgcaaacactaaacttcacttcttctctcttgttcttgtcttttatcttcctctcatgtgctctgcttatctcatcacaacaatctccatcacagccacattctgagcctccgtcacagctaccttttgagcctccggtagagtcaccattcttccctccgtcacagccaccaatattcgtgccaccgtcacagccaccttctttgcctccgtcacagtctcagtcaccttctctcgcttgcaagtcaactccataccctaagctttgccgtacgatcctcaacgctgtcaaatcctcaccgtcagatccttaccgttacggcaaattcactataaagcaatgcctcaagcaagcaagccgtctatccaaagtcatcaccagttacgcgcggcgcgtggaaagcaaaccaggctcggccacggccgaggaaataggggcggtggcggactgcggcgagttatcggagctgagtgtgaactaccttgaaaccgtcacgacggagcttaagacggcgcaggtgatgacggcagctctcgtcgagcatgtgaacagtcttctcagtggtgtagtgacgaatcagcagacgtgtcttgacggactcgtggaggctaagagtggtttcgccgccgcgattggttcgccgatggggaatctcactcgcctttacagtatctcgttaggacttgtgagccacgcacttaaccgtaacctgaagaggtttaaagcctccaaagggaagattcttggtggtgggaactcaacctatcgcgaaccgctcgagactttgattaagggtttacgtaaaacatgcgacaacgacaaagattgccggaaaactagccggaacttaggggagctaggtgagaccagcggcggttccatcctcgtgagtaaagcagtgatcgtcggtccgttcaaatccgacaacttcacaaccatcaccgatgctattgcagccgcacctaataacactagaccagaggatggttactttgttatctacgcaagagaaggtgtctatgaagaatatattgttgttcccatcaacaaaaagaacttaatgcttatgggagatgggatcaataagacgattattacagggaaccataatgttgttgatggttggactacgtataattgctcgagcttcgctgtggttggagagcggttcatggcggttgatgttacattcagaaacacagccggacctgaaaaacatcaggcagtggctttgaggaacaatgcggaaggatcaagtttttatcggtgtagttttgaaggctatcaagatactctctacgtccattctcttagacaattctatcgcgaatgcgatatatatggtaccgtcgattttatattcggaaatgcagccgcaatttttcaaaactgcaacatatatgctcgaaaaccgatggccaagcaaaagaacgcaataacagcgcatggaagactcgatccaaaccagaataccggaatctctatcatcaattgtacaataaaagccgccccagatcttgcagctgagcctaaatctgccatgacattcttagggagaccgtggaagccatactcaaggacggttttcatgcaatcatacattagtgacattgttcaaccagtcggatggctcgaatggaacggtacaattggactagacacaatctactacggtgagtatagtaactttggaccaggtgctaacacgaaccagagagtgcagtggttagggtacaatttattgaacttggcagaagccatgaacttcacggtctacaacttcaccatgggagatacatggttgcctcaaaccgatattcctttctatggtggtttgcttagcaaagaatgaaattgatgaacaacatattatatgtaaacatatttaattatacgtacttcctcatttaaaaaataaatcaagaaattttcattt

SEQ ID NO: 42357 - protein, 630 aa, Arabidopsis thaliana
  peptide (1)..(630): Ceres Seq. ID no. 12340434
KHHQYTNKTKRMKMQTLNFTSSLLFLSFIFLSCALLISSQQSPSQPHSEPPSQLPFEPPVESPFFPPSQPPIFVPPSQPPSLPPSQSQSPSLACKSTPYPKLCRTILNAVKSSPSDPYRYGKFTIKQCLKQASRLSKVITSYARRVESKPGSATAEEIGAVADCGELSELSVNYLETVTTELKTAQVMTAALVEHVNSLLSGVVTNQQTCLDGLVEAKSGFAAAIGSPMGNLTRLYSISLGLVSHALNRNLKRFKASKGKILGGGNSTYREPLETLIKGLRKTCDNDKDCRKTSRNLGELGETSGGSILVSKAVIVGPFKSDNFTTITDAIAAAPNNTRPEDGYFVIYAREGVYEEYIVVPINKKNLMLMGDGINKTIITGNHNVVDGWTTYNCSSFAVVGERFMAVDVTFRNTAGPEKHQAVALRNNAEGSSFYRCSFEGYQDTLYVHSLRQFYRECDIYGTVDFIFGNAAAIFQNCNIYARKPMAKQKNAITAHGRLDPNQNTGISIINCTIKAAPDLAAEPKSAMTFLGRPWKPYSRTVFMQSYISDIVQPVGWLEWNGTIGLDTIYYGEYSNFGPGANTNQRVQWLGYNLLNLAEAMNFTVYNFTMGDTWLPQTDIPFYGGLLSKE

SEQ ID NO: 42358 - protein, 619 aa, Arabidopsis thaliana
  peptide (1)..(619): Ceres Seq. ID no. 12340435
MKMQTLNFTSSLLFLSFIFLSCALLISSQQSPSQPHSEPPSQLPFEPPVESPFFPPSQPPIFVPPSQPPSLPPSQSQSPSLACKSTPYPKLCRTILNAVKSSPSDPYRYGKFTIKQCLKQASRLSKVITSYARRVESKPGSATAEEIGAVADCGELSELSVNYLETVTTELKTAQVMTAALVEHVNSLLSGVVTNQQTCLDGLVEAKSGFAAAIGSPMGNLTRLYSISLGLVSHALNRNLKRFKASKGKILGGGNSTYREPLETLIKGLRKTCDNDKDCRKTSRNLGELGETSGGSILVSKAVIVGPFKSDNFTTITDAIAAAPNNTRPEDGYFVIYAREGVYEEYIVVPINKKNLMLMGDGINKTIITGNHNVVDGWTTYNCSSFAVVGERFMAVDVTFRNTAGPEKHQAVALRNNAEGSSFYRCSFEGYQDTLYVHSLRQFYRECDIYGTVDFIFGNAAAIFQNCNIYARKPMAKQKNAITAHGRLDPNQNTGISIINCTIKAAPDLAAEPKSAMTFLGRPWKPYSRTVFMQSYISDIVQPVGWLEWNGTIGLDTIYYGEYSNFGPGANTNQRVQWLGYNLLNLAEAMNFTVYNFTMGDTWLPQTDIPFYGGLLSKE

SEQ ID NO: 42359 - protein, 617 aa, Arabidopsis thaliana
  peptide (1)..(617): Ceres Seq. ID no. 12340436
MQTLNFTSSLLFLSFIFLSCALLISSQQSPSQPHSEPPSQLPFEPPVESPFFPPSQPPIFVPPSQPPSLPPSQSQSPSLACKSTPYPKLCRTILNAVKSSPSDPYRYGKFTIKQCLKQASRLSKVITSYARRVESKPGSATAEEIGAVADCGELSELSVNYLETVTTELKTAQVMTAALVEHVNSLLSGVVTNQQTCLDGLVEAKSGFAAAIGSPMGNLTRLYSISLGLVSHALNRNLKRFKASKGKILGGGNSTYREPLETLIKGLRKTCDNDKDCRKTSRNLGELGETSGGSILVSKAVIVGPFKSDNFTTITDAIAAAPNNTRPEDGYFVIYAREGVYEEYIVVPINKKNLMLMGDGINKTIITGNHNVVDGWTTYNCSSFAVVGERFMAVDVTFRNTAGPEKHQAVALRNNAEGSSFYRCSFEGYQDTLYVHSLRQFYRECDIYGTVDFIFGNAAAIFQNCNIYARKPMAKQKNAITAHGRLDPNQNTGISIINCTIKAAPDLAAEPKSAMTFLGRPWKPYSRTVFMQSYISDIVQPVGWLEWNGTIGLDTIYYGEYSNFGPGANTNQRVQWLGYNLLNLAEAMNFTVYNFTMGDTWLPQTDIPFYGGLLSKE

SEQ ID NO: 42360 - DNA, 1361 bp, Arabidopsis thaliana
  misc_feature (1)..(1361): Ceres Seq. ID no. 13575124
  misc_feature (1)..(1361): Ortholog of  Ceres SEQ ID NO 13597160 as cited in SEQ ID NO 64016
  misc_feature (1)..(1361): Ortholog of  Ceres SEQ ID NO 15169659 as cited in SEQ ID NO 64152
acggacccgtatcccaaagatctcatctttcgtcgagtggttcataaccaaaatcaaaacttgagtgaatcataatcgtcgtctcgtcgccggagaaaatgatcggcggtggtagggtttattgggggaagaagttagataaagagatggaagatgcggcggttgttgacggtggtggatctaacggtgttgttgtgatctttgtttggagctcgattaacgagaaccagcttatgaatttcgttgatctttattcttctcttggttggaattctcttgtttgccgcgctgattttctcaccgcggtttatcctgaaatggctctttctttagcattccatcttctttctgaacttgttgaggagttaaagagtagaccatgtcctgttatctttctagctttctctggtgctcctaaagcttgtatgtataaagttctacaggtgatcatggatgattgtgaagctcaaattcatccggatgatagccagttggttagaacctgtctttctggacatgtctatgactctggcccgttggattttacgagtgatttgaatgtgaaattcgcactacatcccaccatacgacgaatgtctggtccttctagactagtatcttgggtggctaaagggatttcttccgggcttgatggtttatatcttacaagatttgaatcccaacgtagtgagtactggcaggccctctactcatcggttgaaattggggctccatatctcattttgtgctccgagaatgatgaacttgctcctctacaagtaatttcaagctttacccatcaattgcaggaactgggaggagaagttaaggttgtcaagtggaaaaattctcctcatgcaggacactacgcacataaccctatacaataccgggctgttatctccaactttctggagaaagccatatcagttcacttacataaaatccggcagctcggagaaagagctcacacgcatgatgaaatctctgagttaatatgcgaccttcagaaagttgctgtgaactctaaccaaagcctaagaagagtagccactgggccatgtgaccactttttcttacctagctcagcaccgtatcaaagcaacagcaacaacagcgatccatcatcttcacaagaagaacagagagaaagatcgtccttccgcccactccaaccaacgagcataaacgctcacagcgtactcgggcaattcctattcgactcatgtgttccaaagaacatcgaaggatgggatatcagatttgcgggttgtctcaacggtcaaccatatgccacgtcctcctcccgtaagaactcaaatcttggttttaagaaacgctttttccgttcaagactatga

SEQ ID NO: 42361 - protein, 420 aa, Arabidopsis thaliana
  peptide (1)..(420): Ceres Seq. ID no. 13575125
MIGGGRVYWGKKLDKEMEDAAVVDGGGSNGVVVIFVWSSINENQLMNFVDLYSSLGWNSLVCRADFLTAVYPEMALSLAFHLLSELVEELKSRPCPVIFLAFSGAPKACMYKVLQVIMDDCEAQIHPDDSQLVRTCLSGHVYDSGPLDFTSDLNVKFALHPTIRRMSGPSRLVSWVAKGISSGLDGLYLTRFESQRSEYWQALYSSVEIGAPYLILCSENDELAPLQVISSFTHQLQELGGEVKVVKWKNSPHAGHYAHNPIQYRAVISNFLEKAISVHLHKIRQLGERAHTHDEISELICDLQKVAVNSNQSLRRVATGPCDHFFLPSSAPYQSNSNNSDPSSSQEEQRERSSFRPLQPTSINAHSVLGQFLFDSCVPKNIEGWDIRFAGCLNGQPYATSSSRKNSNLGFKKRFFRSRL

SEQ ID NO: 42362 - protein, 404 aa, Arabidopsis thaliana
  peptide (1)..(404): Ceres Seq. ID no. 13575126
MEDAAVVDGGGSNGVVVIFVWSSINENQLMNFVDLYSSLGWNSLVCRADFLTAVYPEMALSLAFHLLSELVEELKSRPCPVIFLAFSGAPKACMYKVLQVIMDDCEAQIHPDDSQLVRTCLSGHVYDSGPLDFTSDLNVKFALHPTIRRMSGPSRLVSWVAKGISSGLDGLYLTRFESQRSEYWQALYSSVEIGAPYLILCSENDELAPLQVISSFTHQLQELGGEVKVVKWKNSPHAGHYAHNPIQYRAVISNFLEKAISVHLHKIRQLGERAHTHDEISELICDLQKVAVNSNQSLRRVATGPCDHFFLPSSAPYQSNSNNSDPSSSQEEQRERSSFRPLQPTSINAHSVLGQFLFDSCVPKNIEGWDIRFAGCLNGQPYATSSSRKNSNLGFKKRFFRSRL

SEQ ID NO: 42363 - protein, 375 aa, Arabidopsis thaliana
  peptide (1)..(375): Ceres Seq. ID no. 13575127
MNFVDLYSSLGWNSLVCRADFLTAVYPEMALSLAFHLLSELVEELKSRPCPVIFLAFSGAPKACMYKVLQVIMDDCEAQIHPDDSQLVRTCLSGHVYDSGPLDFTSDLNVKFALHPTIRRMSGPSRLVSWVAKGISSGLDGLYLTRFESQRSEYWQALYSSVEIGAPYLILCSENDELAPLQVISSFTHQLQELGGEVKVVKWKNSPHAGHYAHNPIQYRAVISNFLEKAISVHLHKIRQLGERAHTHDEISELICDLQKVAVNSNQSLRRVATGPCDHFFLPSSAPYQSNSNNSDPSSSQEEQRERSSFRPLQPTSINAHSVLGQFLFDSCVPKNIEGWDIRFAGCLNGQPYATSSSRKNSNLGFKKRFFRSRL

SEQ ID NO: 42364 - DNA, 860 bp, Arabidopsis thaliana
  misc_feature (1)..(860): Ceres Seq. ID no. 12562645
  misc_feature (1)..(860): Ortholog of  Ceres SEQ ID NO 13505291 as cited in SEQ ID NO 56614
  misc_feature (1)..(860): Ortholog of  Ceres SEQ ID NO 13596535 as cited in SEQ ID NO 62321
  misc_feature (1)..(860): Ortholog of  Ceres SEQ ID NO 13597394 as cited in SEQ ID NO 63457
aaaccaaaaaaaaaaaacttcagaaaatttgaaatcctcagaattgcagagcaaagaacaaccatggcgaatcctattcaagagattctggagaagcaagttctaacggtggctaaagctatggaagataagatagacgacgagatcgcctctttagaaaagcttgacgaggacgatctagaggttttgagagagagaaggttaaagcaaatgaagaaaatggcagagaagaagaaacgttggattagtcttggacatggtgaatactctgagatccattctgagaaagacttcttctccgtcgttaaagccagcgaacgcgtcgtctgccatttctaccgcgagaattggccatgtaaagtgatggataagcacatgagtatattggcaaagcaacacattgagacacgttttgtgaagatccaagctgagaaaagtccgttcttggctgagaggctcaagattgttgttctacctactcttgcacttattaagaacactaaagtcgatgattatgtggttgggttcaatgagcttggagggaaagatgatttcagcactgaggatttggaagagagaatagctagagcgcaagtgattcattacgatggagagtcatcgtcgcttaaaccaaagtcgacaacacaagttagaaggaatgtgaggcagagtgctcgttcagattcagactccgaatagactctcgggtttttcagcaaacgtttgttggtatgttcatgatcttcactctatcttcagcccttttttggtgtgagtttgtattgtgcgaattcagttgtgatgtgtaatacaaagtaggagatgatcttatatgcatatttgatgagtttttaaccttg

SEQ ID NO: 42365 - protein, 232 aa, Arabidopsis thaliana
  peptide (1)..(232): Ceres Seq. ID no. 12562646
KPKKKNFRKFEILRIAEQRTTMANPIQEILEKQVLTVAKAMEDKIDDEIASLEKLDEDDLEVLRERRLKQMKKMAEKKKRWISLGHGEYSEIHSEKDFFSVVKASERVVCHFYRENWPCKVMDKHMSILAKQHIETRFVKIQAEKSPFLAERLKIVVLPTLALIKNTKVDDYVVGFNELGGKDDFSTEDLEERIARAQVIHYDGESSSLKPKSTTQVRRNVRQSARSDSDSE

SEQ ID NO: 42366 - protein, 211 aa, Arabidopsis thaliana
  peptide (1)..(211): Ceres Seq. ID no. 12562647
MANPIQEILEKQVLTVAKAMEDKIDDEIASLEKLDEDDLEVLRERRLKQMKKMAEKKKRWISLGHGEYSEIHSEKDFFSVVKASERVVCHFYRENWPCKVMDKHMSILAKQHIETRFVKIQAEKSPFLAERLKIVVLPTLALIKNTKVDDYVVGFNELGGKDDFSTEDLEERIARAQVIHYDGESSSLKPKSTTQVRRNVRQSARSDSDSE

SEQ ID NO: 42367 - protein, 192 aa, Arabidopsis thaliana
  peptide (1)..(192): Ceres Seq. ID no. 12562648
MEDKIDDEIASLEKLDEDDLEVLRERRLKQMKKMAEKKKRWISLGHGEYSEIHSEKDFFSVVKASERVVCHFYRENWPCKVMDKHMSILAKQHIETRFVKIQAEKSPFLAERLKIVVLPTLALIKNTKVDDYVVGFNELGGKDDFSTEDLEERIARAQVIHYDGESSSLKPKSTTQVRRNVRQSARSDSDSE

SEQ ID NO: 42368 - DNA, 1499 bp, Arabidopsis thaliana
  misc_feature (1)..(1499): Ceres Seq. ID no. 13495940
  misc_feature (1)..(1499): Ortholog of  Ceres SEQ ID NO 15171289 as cited in SEQ ID NO 51570
aggaaagctggtacaaaccaaatttcattttttttcttttaattaattttggccaaaaagaaaaaaaaatcgaaactttttttgtgtaaatggaaggagaaactcatcaatcggagccgttacctttagcatctggagattccgatgaagggatcagtgctgcgattgaggcggagcttgctgagttagctgctggagattcaagcggcggtggtggttgcggcggcggaggaggagggattaggagtaaagtcaaaggaccttggtctacggaggaagacgcggttcttacgaagcttgtgaggaaactaggaccgaggaattggagtttgatcgctcgtggaatccctggtcgttctggtaaatcttgtcgattgcgttggtgtaatcagcttgacccttgtctcaagcgtaaacctttctctgatgaggaagatcgtatgataatttctgctcacgcggttcacggaaacaaatgggcagtgattgcgaaactgttaactggaagaacagataacgctatcaagaaccattggaactcaactcttagacgtaaatacgcagatctatggaataatggtcaatggatggctaattcagttactaccgcttccgtcaaaaacgaaaatgtcgatgaaacaactaatcctccatcctcaaaacaacagttgcctcaaggagatatcaattcctccccgccaaagcctccacaagtgagtgatgttgtaatggaagaggcagctaatgaacctcaagaacctcaagaacaacaagaacaagctccaccggtagtgagtaacgttccaacagaaaataacgtgtttcgccccgtggctcgcgttggtgcattcagtatctataacccaaccagccagaaaaatggttacagagactacaatatagttccatgtgagggaccgttgattcaagcagctaaacccgattcattggctggtaaatttctacaatctctttgtgatgaacctcaaatcccgtcaaaatgtggtcacggctgctctactcttccagctgaaactaagttctcacgtaactcggtgttgggacctgagtttgtggattatgaagagccttctgcggttttcaaccaagaactaatatctatagcaaccgatttgaacaacattgcatggataaagagtggccttgacaatgctgttgtcagagaagcagaacagagtttgaagatggataattacaattataatgatcctcgaatcaagtttactggaatgatgcctagacaagatttcttctgtgcaagaagctgaaactcaaaagtagggcttgagattcatcaaccccttttttttcttttgattctttgcgctttgacgcatatagatgatgaataagtaccagactggtacttatggatgttgttgtttctgacattttgattcggatttggtggaagaaagatagaaaacagagtatgtatcgtgtctcttattatataaaatcctagatcataaatatcg

SEQ ID NO: 42369 - protein, 399 aa, Arabidopsis thaliana
  peptide (1)..(399): Ceres Seq. ID no. 13495941
MEGETHQSEPLPLASGDSDEGISAAIEAELAELAAGDSSGGGGCGGGGGGIRSKVKGPWSTEEDAVLTKLVRKLGPRNWSLIARGIPGRSGKSCRLRWCNQLDPCLKRKPFSDEEDRMIISAHAVHGNKWAVIAKLLTGRTDNAIKNHWNSTLRRKYADLWNNGQWMANSVTTASVKNENVDETTNPPSSKQQLPQGDINSSPPKPPQVSDVVMEEAANEPQEPQEQQEQAPPVVSNVPTENNVFRPVARVGAFSIYNPTSQKNGYRDYNIVPCEGPLIQAAKPDSLAGKFLQSLCDEPQIPSKCGHGCSTLPAETKFSRNSVLGPEFVDYEEPSAVFNQELISIATDLNNIAWIKSGLDNAVVREAEQSLKMDNYNYNDPRIKFTGMMPRQDFFCARS

SEQ ID NO: 42370 - protein, 282 aa, Arabidopsis thaliana
  peptide (1)..(282): Ceres Seq. ID no. 13495942
MIISAHAVHGNKWAVIAKLLTGRTDNAIKNHWNSTLRRKYADLWNNGQWMANSVTTASVKNENVDETTNPPSSKQQLPQGDINSSPPKPPQVSDVVMEEAANEPQEPQEQQEQAPPVVSNVPTENNVFRPVARVGAFSIYNPTSQKNGYRDYNIVPCEGPLIQAAKPDSLAGKFLQSLCDEPQIPSKCGHGCSTLPAETKFSRNSVLGPEFVDYEEPSAVFNQELISIATDLNNIAWIKSGLDNAVVREAEQSLKMDNYNYNDPRIKFTGMMPRQDFFCARS

SEQ ID NO: 42371 - protein, 233 aa, Arabidopsis thaliana
  peptide (1)..(233): Ceres Seq. ID no. 13495943
MANSVTTASVKNENVDETTNPPSSKQQLPQGDINSSPPKPPQVSDVVMEEAANEPQEPQEQQEQAPPVVSNVPTENNVFRPVARVGAFSIYNPTSQKNGYRDYNIVPCEGPLIQAAKPDSLAGKFLQSLCDEPQIPSKCGHGCSTLPAETKFSRNSVLGPEFVDYEEPSAVFNQELISIATDLNNIAWIKSGLDNAVVREAEQSLKMDNYNYNDPRIKFTGMMPRQDFFCARS

SEQ ID NO: 42372 - DNA, 1070 bp, Arabidopsis thaliana
  misc_feature (1)..(1070): Ceres Seq. ID no. 12560013
  misc_feature (1)..(1070): Ortholog of  Ceres SEQ ID NO 14305743 as cited in SEQ ID NO 52462
  misc_feature (1)..(1070): Ortholog of  Ceres SEQ ID NO 13623029 as cited in SEQ ID NO 0
acttttcagttttcatataataatgaaataacttggttactctctttcctcgccgtagtctgagtctgaaccctaaaacatcccgcttcgctgctcaggaccaagaatctcagattcaactgatctttgcaacatgacgagggtttatgtcgggaatttggacccacgcgtcaccgaaagagaactcgaagacgaattcaaggccttcggtgttcttcgcaatgtctgggtagctcgtagacctcctggctacgcattcctcgagttcgatgacgaaagagatgctttggatgcaatcagcgcattggatcgaaagaatgggtggcgtgtggagctttctcataaagataaaggaggtcgtggaggtggtggtggtcgtcgtggaggtattgaggattccaagtgctatgagtgtggtgagcttggacattttgctcgcgagtgtcgccgtggtcgaggctctgtgaggcgtagaagccctagtccccgtcgtcgtaggagtccagattatgggtatgctcgcaggagtataagcccgcgtgggaagaagatctcctccaaggcgtcgcagtgttactccacctcgccgtgggaggagctacagcagatcccctccttatcgtggttcacgccgtgattctcctcgccgcagagactcgccctatggtcgacgttcgccatatgccaatggggtgtgaaactggaccctgaagagaaagaagctattactaagctatgatgctatatctactctgtggcgccttttaggatagatctttatatctgctattatggtattagctcttctaggtttggttgttgagcatggacatgtcatggtatgttcgagttttattagacaattggatttggtgagttctccttcatgctgttttccaacagccgtcttgacttattntctataacacgcactggcctgctgtcttcacacagcgtccttgaacccctacacttgaggtcgttctttcgtatccataaatgttttgtctcttgttgaatgcactttccttattatatagacatatctaaaaagctcaactgtttccact

SEQ ID NO: 42373 - protein, 167 aa, Arabidopsis thaliana
  peptide (1)..(167): Ceres Seq. ID no. 12560014
MTRVYVGNLDPRVTERELEDEFKAFGVLRNVWVARRPPGYAFLEFDDERDALDAISALDRKNGWRVELSHKDKGGRGGGGGRRGGIEDSKCYECGELGHFARECRRGRGSVRRRSPSPRRRRSPDYGYARRSISPRGKKISSKASQCYSTSPWEELQQIPSLSWFTP

SEQ ID NO: 42374 - DNA, 981 bp, Arabidopsis thaliana
  misc_feature (1)..(981): Ceres Seq. ID no. 13497651
  misc_feature (1)..(981): Ortholog of  Ceres SEQ ID NO 14309591 as cited in SEQ ID NO 52617
  misc_feature (1)..(981): Ortholog of  Ceres SEQ ID NO 13597418 as cited in SEQ ID NO 63764
tcttgcgacgggccctgctacccggtgcgtgacaggttgaatcattctcctccgattcacggtgattccggcgactacagactcaacatttaataagccgatctcttacatggtacgagctcggacaaattgaagaatacaaaggtccgagaaataatttggaataatggcgtcttcatcggattcatggatgagagcatacaacgaggctttaaaactctctgaggagattaatggaatgatatcagaaagaagttcatcggctgtcacagggcctgatgctcagcgtcgtgcttcagctatacgaaggaagatcaccattttcggtaacaaattagatagtctgcagtctcttcttgctgaaattcatggaaaacctatttcagagaaagagatgaatcggcgaaaggatatggtagggaatctgaggtcaaaagcaaaccagatggcgaatgctttgaacatgtcaaactttgccaatagagacagcttgctcgggccagatatcaagccggatgattccatgagcagagttactggcatggataaccaaggaattgttggatatcaacgacaagttatgagagaacaagacgaaggacttgagcaattggagggaacagtcatgagcacaaaacacattgctctggctgttagtgaagagcttgacttgcagactaggcttattgatgacttagattaccatgtggatgttactgactctcgcttaaggagagtgcagaagagccttgctgtcatgaacaagaatatgagaagtggttgctcttgcatgtcaatgctcttgtcagtgctggggatcgtcggtcttgctgttgtaatatggatgttggttaagtatatgtaataccaacatcagacaacttataagttcctctgtaggtccactggcctctactctctatgtgaatggttgcaatgtatttcctcattccacatttgtggctgagcttttcatttctc

SEQ ID NO: 42375 - protein, 232 aa, Arabidopsis thaliana
  peptide (1)..(232): Ceres Seq. ID no. 13497652
MASSSDSWMRAYNEALKLSEEINGMISERSSSAVTGPDAQRRASAIRRKITIFGNKLDSLQSLLAEIHGKPISEKEMNRRKDMVGNLRSKANQMANALNMSNFANRDSLLGPDIKPDDSMSRVTGMDNQGIVGYQRQVMREQDEGLEQLEGTVMSTKHIALAVSEELDLQTRLIDDLDYHVDVTDSRLRRVQKSLAVMNKNMRSGCSCMSMLLSVLGIVGLAVVIWMLVKYM

SEQ ID NO: 42376 - protein, 224 aa, Arabidopsis thaliana
  peptide (1)..(224): Ceres Seq. ID no. 13497653
MRAYNEALKLSEEINGMISERSSSAVTGPDAQRRASAIRRKITIFGNKLDSLQSLLAEIHGKPISEKEMNRRKDMVGNLRSKANQMANALNMSNFANRDSLLGPDIKPDDSMSRVTGMDNQGIVGYQRQVMREQDEGLEQLEGTVMSTKHIALAVSEELDLQTRLIDDLDYHVDVTDSRLRRVQKSLAVMNKNMRSGCSCMSMLLSVLGIVGLAVVIWMLVKYM

SEQ ID NO: 42377 - protein, 208 aa, Arabidopsis thaliana
  peptide (1)..(208): Ceres Seq. ID no. 13497654
MISERSSSAVTGPDAQRRASAIRRKITIFGNKLDSLQSLLAEIHGKPISEKEMNRRKDMVGNLRSKANQMANALNMSNFANRDSLLGPDIKPDDSMSRVTGMDNQGIVGYQRQVMREQDEGLEQLEGTVMSTKHIALAVSEELDLQTRLIDDLDYHVDVTDSRLRRVQKSLAVMNKNMRSGCSCMSMLLSVLGIVGLAVVIWMLVKYM

SEQ ID NO: 42378 - DNA, 1704 bp, Arabidopsis thaliana
  misc_feature (1)..(1704): Ceres Seq. ID no. 12338676
  misc_feature (1)..(1704): Ortholog of  Ceres SEQ ID NO 13638402 as cited in SEQ ID NO 60300
  misc_feature (1)..(1704): Ortholog of  Ceres SEQ ID NO 12618349 as cited in SEQ ID NO 64838
  misc_feature (1)..(1704): Ortholog of  Ceres SEQ ID NO 15176161 as cited in SEQ ID NO 0
agaaaaaataaattagttaaaaaaggaaagagaagtgttgttgcagctttagcccaaagatctctcctttttgcagagcttcttcttcttcttctccaaaaatcccaactttcttctctttcccggtttcttcgtctccagcattttcgcgtgttgtaacctaatccaaatcttacccattgatggaataacatcatcacgacgcgtcaaaattctgtatcggaggaccgagagatctccatctcctgtccagattcgattcccaccaatcccaatttcgtgaaattcgttagggttttagtttgaatctcatctcatcagatcgagtcgacccaggattaggaagaagaaaagcgatgaagatggcgacgaatggccagtttttcacaatcgggctagtcgcgtcttggtactcatcgaacattggtgtattgttgctgaacaagtacttgcttagcaattacggattcaagtacccgatctttctcaccatgtgtcacatgacggcttgttcgttactcagctacgtcgccattgcttggttgaagatggttccgatgcagacgattcgatccagagttcagttctttaagatcgcagctctaagtctcgttttttgtgtgtcggtggtctttggtaacatctctctccgctttcttcctgtttcgtttaaccaagccattggtgctacgacgccgtttttcaccgccgtgtttgcttacctgatgacgcgtaagaaagaggcttggttgacttacttcactctcgtccctgtcgtcaccggagttgttattgctagtgggggtgagccaagctttcacctgtttggattccttatgtgcattgcagcaacagctgcgagagcacttaaatcagtgcttcaaggaattttgctttcttctgaaggggaaaagctgaactccatgaatctcctcctttacatggctccaatagctgtcgtgctccttctgcctgctactcttatcatggagaaaaatgttgtcggcattacaattgcacttgcaagagatgatttcagaatcgtttggtatcttctattcaattcagcgctcgcctatttagtcaacttgacaaatttcttagtcacaaaccacactagcgccctgactttacaggtgctaggaaacgccaaaggagcagtagcagtggtggtctctattctaatcttcaagaatccggtgtcagtgaccggaatgctgggttactccctcaccgtctgtggagttatcctgtacagcgaagccaagaaacgaaacaaaaattagaacactaaacacacacaaagcttttacttcttcttcatcattcccccctatatatatgttttatattttctcccctatggatatacaggcaagtagtctcttttgctgggccaaactgactcttgtcttaatgaaaagctgggccaaaaacatctcttttttttggcagaaacagagaagcaaagccacacaaagattgattaccaaaggcaagaatttagagaacttcctcctatgaataagtaacctttttgtttttcatttttgttctttcttctcggattctcttgcctttcctctgtaggttgtttgttgaattaggtttgtttcttcgattctttacattttagttttgtgatgtcaacattttacaacaacacggattgattcatttaatcgaaagagagaaagtncctcc

SEQ ID NO: 42379 - protein, 309 aa, Arabidopsis thaliana
  peptide (1)..(309): Ceres Seq. ID no. 12338677
MKMATNGQFFTIGLVASWYSSNIGVLLLNKYLLSNYGFKYPIFLTMCHMTACSLLSYVAIAWLKMVPMQTIRSRVQFFKIAALSLVFCVSVVFGNISLRFLPVSFNQAIGATTPFFTAVFAYLMTRKKEAWLTYFTLVPVVTGVVIASGGEPSFHLFGFLMCIAATAARALKSVLQGILLSSEGEKLNSMNLLLYMAPIAVVLLLPATLIMEKNVVGITIALARDDFRIVWYLLFNSALAYLVNLTNFLVTNHTSALTLQVLGNAKGAVAVVVSILIFKNPVSVTGMLGYSLTVCGVILYSEAKKRNKN

SEQ ID NO: 42380 - protein, 307 aa, Arabidopsis thaliana
  peptide (1)..(307): Ceres Seq. ID no. 12338679
MATNGQFFTIGLVASWYSSNIGVLLLNKYLLSNYGFKYPIFLTMCHMTACSLLSYVAIAWLKMVPMQTIRSRVQFFKIAALSLVFCVSVVFGNISLRFLPVSFNQAIGATTPFFTAVFAYLMTRKKEAWLTYFTLVPVVTGVVIASGGEPSFHLFGFLMCIAATAARALKSVLQGILLSSEGEKLNSMNLLLYMAPIAVVLLLPATLIMEKNVVGITIALARDDFRIVWYLLFNSALAYLVNLTNFLVTNHTSALTLQVLGNAKGAVAVVVSILIFKNPVSVTGMLGYSLTVCGVILYSEAKKRNKN

SEQ ID NO: 42381 - protein, 264 aa, Arabidopsis thaliana
  peptide (1)..(264): Ceres Seq. ID no. 12338680
MCHMTACSLLSYVAIAWLKMVPMQTIRSRVQFFKIAALSLVFCVSVVFGNISLRFLPVSFNQAIGATTPFFTAVFAYLMTRKKEAWLTYFTLVPVVTGVVIASGGEPSFHLFGFLMCIAATAARALKSVLQGILLSSEGEKLNSMNLLLYMAPIAVVLLLPATLIMEKNVVGITIALARDDFRIVWYLLFNSALAYLVNLTNFLVTNHTSALTLQVLGNAKGAVAVVVSILIFKNPVSVTGMLGYSLTVCGVILYSEAKKRNKN

SEQ ID NO: 42382 - DNA, 1620 bp, Arabidopsis thaliana
  misc_feature (1)..(1620): Ceres Seq. ID no. 13592581
  misc_feature (1)..(1620): Ortholog of  Ceres SEQ ID NO 15169244 as cited in SEQ ID NO 58988
aattacctatcttgcttcttcaatatttaatttatatttattatagcatcacttccaaaaaaaaatcagaagaagaagatagagagaaagaaagagagagatatcgacaacaacaatggaagattcaagcaaaaaaagccaaaagaagaagaagaacaaaagcaagaacaacatcccaactgtttggttctcactcaagaaatccctccactgtaaatccgaaccatctgatgtccacgacccaatatccaccactaaacagcaacaacacctctccacaatctccaccaagaaaatctccggcatatcatccggcggagccgccgtatgcggtggtggtttatcaggatgttcaagatcaatagcaaatctcaaagacgtaatccatggaagcaaaagacatttcgagaaaccaccaataagtagtcctcgttctattggaagcaatgagtttctaaatcctataactcatgaagttattcttagtaactcaacttgtgagcttaagatcactggtgtcggagacatggcttcacctgtcggagcagcggattccggcggaggtggcggtggaggaaatggtcggtctacgacttatgtagggatgcttagaccaggaacaccgatgcattatcttaaccattcagcttcttacaggagccaaacaagaaagggttcgtttgctttgtcggagagagatcgaggaggaggaggaggaggagaagggttagggtttcatacaaacagaagggtttcattggagatgaacagagaatccaccattaatggaggcaacaattcctctgtttcttgtcataaatgtggtgaacagttcaataagcttgaagctgctgaagctcatcatctctctaaacatgccgtaacggagcttgtagaaggagattcatcaagaaaaatagtggagataatctgcagaacaagctggttaaagtcagagaaccaatgtggaagaatcgatagagttttaaaagtacacaacatgcagaagacattagctagattcgaggaatacagagaaacagttaaaatcagagcaagcaaacttcagaagaagcatccaagatgtctcgcagacggtaacgagctacttaggttccacggaaccaccgtggcttgtggtttaggtataaacgggtcaacaagtgtttgcacggcggagaaatgttgtgtctgtcggattatacgaaacgggttctcgtcgaaacgggagaagaataatggggttggtgttttcacggcgtctactagtggaagagcgttcgagtcgattttggttaacggtggagatgagagtggagatgttgatcggacggtgaggaaagtgttgattgtgtgtagggttatcgccggaagagttcatcggccggtggagaatgtggaggagatgaatgggttgatgagtgggtttgattctttggctggcaaagttggtttgtatacaaatgtggaggagctttatttgcttaatcctaaagctttgcttccttgctttgtggtcatttgcaagccctaaaacatttagcatgttggggaaaaagattgaattttcttttgttgataaatttatgtatcgtataatgagaattgaaatcaataggt

SEQ ID NO: 42383 - protein, 472 aa, Arabidopsis thaliana
  peptide (1)..(472): Ceres Seq. ID no. 15221122
MEDSSKKSQKKKKNKSKNNIPTVWFSLKKSLHCKSEPSDVHDPISTTKQQQHLSTISTKKISGISSGGAAVCGGGLSGCSRSIANLKDVIHGSKRHFEKPPISSPRSIGSNEFLNPITHEVILSNSTCELKITGVGDMASPVGAADSGGGGGGGNGRSTTYVGMLRPGTPMHYLNHSASYRSQTRKGSFALSERDRGGGGGGEGLGFHTNRRVSLEMNRESTINGGNNSSVSCHKCGEQFNKLEAAEAHHLSKHAVTELVEGDSSRKIVEIICRTSWLKSENQCGRIDRVLKVHNMQKTLARFEEYRETVKIRASKLQKKHPRCLADGNELLRFHGTTVACGLGINGSTSVCTAEKCCVCRIIRNGFSSKREKNNGVGVFTASTSGRAFESILVNGGDESGDVDRTVRKVLIVCRVIAGRVHRPVENVEEMNGLMSGFDSLAGKVGLYTNVEELYLLNPKALLPCFVVICKP

SEQ ID NO: 42384 - protein, 335 aa, Arabidopsis thaliana
  peptide (1)..(335): Ceres Seq. ID no. 15221123
MASPVGAADSGGGGGGGNGRSTTYVGMLRPGTPMHYLNHSASYRSQTRKGSFALSERDRGGGGGGEGLGFHTNRRVSLEMNRESTINGGNNSSVSCHKCGEQFNKLEAAEAHHLSKHAVTELVEGDSSRKIVEIICRTSWLKSENQCGRIDRVLKVHNMQKTLARFEEYRETVKIRASKLQKKHPRCLADGNELLRFHGTTVACGLGINGSTSVCTAEKCCVCRIIRNGFSSKREKNNGVGVFTASTSGRAFESILVNGGDESGDVDRTVRKVLIVCRVIAGRVHRPVENVEEMNGLMSGFDSLAGKVGLYTNVEELYLLNPKALLPCFVVICKP

SEQ ID NO: 42385 - protein, 309 aa, Arabidopsis thaliana
  peptide (1)..(309): Ceres Seq. ID no. 15221124
MLRPGTPMHYLNHSASYRSQTRKGSFALSERDRGGGGGGEGLGFHTNRRVSLEMNRESTINGGNNSSVSCHKCGEQFNKLEAAEAHHLSKHAVTELVEGDSSRKIVEIICRTSWLKSENQCGRIDRVLKVHNMQKTLARFEEYRETVKIRASKLQKKHPRCLADGNELLRFHGTTVACGLGINGSTSVCTAEKCCVCRIIRNGFSSKREKNNGVGVFTASTSGRAFESILVNGGDESGDVDRTVRKVLIVCRVIAGRVHRPVENVEEMNGLMSGFDSLAGKVGLYTNVEELYLLNPKALLPCFVVICKP

SEQ ID NO: 42386 - DNA, 1213 bp, Arabidopsis thaliana; identical to SEQ ID NO: 35540
  misc_feature (1)..(1213): Ceres Seq. ID no. 13647078
  misc_feature (1)..(1213): Ortholog of  Ceres SEQ ID NO 12484482 as cited in SEQ ID NO 53324
  misc_feature (1)..(1213): Ortholog of  Ceres SEQ ID NO 15176234 as cited in SEQ ID NO 54949
  misc_feature (1)..(1213): Ortholog of  Ceres SEQ ID NO 14314507 as cited in SEQ ID NO 59337

SEQ ID NO: 42387 - protein, 327 aa, Arabidopsis thaliana; identical to SEQ ID NO: 35541
  peptide (1)..(327): Ceres Seq. ID no. 15219131

SEQ ID NO: 42388 - protein, 317 aa, Arabidopsis thaliana; identical to SEQ ID NO: 35542
  peptide (1)..(317): Ceres Seq. ID no. 15219132

SEQ ID NO: 42389 - protein, 211 aa, Arabidopsis thaliana; identical to SEQ ID NO: 24550
  peptide (1)..(211): Ceres Seq. ID no. 15219133

SEQ ID NO: 42390 - DNA, 1864 bp, Arabidopsis thaliana; identical to SEQ ID NO: 22233
  misc_feature (1)..(1864): Ceres Seq. ID no. 12562449
  misc_feature (1)..(1864): Ortholog of  Ceres SEQ ID NO 15174547 as cited in SEQ ID NO 59586
  misc_feature (1)..(1864): Ortholog of  Ceres SEQ ID NO 15169470 as cited in SEQ ID NO 66036

SEQ ID NO: 42391 - protein, 527 aa, Arabidopsis thaliana; identical to SEQ ID NO: 22234
  peptide (1)..(527): Ceres Seq. ID no. 12562450

SEQ ID NO: 42392 - protein, 524 aa, Arabidopsis thaliana; identical to SEQ ID NO: 22235
  peptide (1)..(524): Ceres Seq. ID no. 12562451

SEQ ID NO: 42393 - protein, 520 aa, Arabidopsis thaliana; identical to SEQ ID NO: 22236
  peptide (1)..(520): Ceres Seq. ID no. 12562452

SEQ ID NO: 42394 - DNA, 1309 bp, Arabidopsis thaliana; identical to SEQ ID NO: 39384
  misc_feature (1)..(1309): Ceres Seq. ID no. 13501404
  misc_feature (1)..(1309): Ortholog of  Ceres SEQ ID NO 13597325 as cited in SEQ ID NO 63935

SEQ ID NO: 42395 - protein, 402 aa, Arabidopsis thaliana; identical to SEQ ID NO: 39385
  peptide (1)..(402): Ceres Seq. ID no. 13501405

SEQ ID NO: 42396 - protein, 355 aa, Arabidopsis thaliana; identical to SEQ ID NO: 39386
  peptide (1)..(355): Ceres Seq. ID no. 13501406

SEQ ID NO: 42397 - protein, 345 aa, Arabidopsis thaliana; identical to SEQ ID NO: 39387
  peptide (1)..(345): Ceres Seq. ID no. 13501407

SEQ ID NO: 42398 - DNA, 1774 bp, Arabidopsis thaliana
  misc_feature (1)..(1774): Ceres Seq. ID no. 12562421
  misc_feature (1)..(1774): Ortholog of  Ceres SEQ ID NO 14301920 as cited in SEQ ID NO 69277
aacttagccttgttcttcttcttcatcgcgatatctccggtgtcttcttcgtctccatcagaagaagaagctctctgtatccatccatatcgaaaaaccagagatcggaggaaggagagagagataccaatctctgttgctttggttttaagggtttagaggagatgtcaaaccacccgaagatcacatcggcgcatcagaatgtggaggagaagctaagggaacttcaggagaggttctgtcatcttcaagctgctaggaaagaagggcggcatggtgaccttgcgcttttagaagcccaaatctctcagaatattcgggagtggcaagctgaactcactgctccttctcctgaatcttctctgttgggtgaaggtattagccaattccttgaggagtttgctcctctgttgaaattagacgaggaggatgatgcaactagtacgctaaaagaacatgctggagcaaagcctgatcctgagggtttttctcaaagcttgtgccctcctgaatggacatctgagaattttagtcaaagtcctttcaacggaaatttctcctgcggctttgaggatgctcttaatagcacagaaacacatggccagcaactccattatggatatgaagggtttgatccaagcataaactccgctcctgatttccatgaccaaaaactcagcagcaacttggatataacttctcagtatgattatattttctccgaagtgcgtcaggaactagataacagcccttccactaagcttgattcttctgaagagattgacaactttgctgaattttctactccatcaagtgtccgtgtgcctccatctgcttttctgggacctaagtgtgcactatgggattgcacaaggcctgctcagggctccgagtggtacctggattactgcagtaactaccatgggactctagctctgaatgaagattcgcctggcacagcacctgtattgaggccagggggcatcagtttgaaagataatctattgattgatgctcttcgtgcaaagactcagggtaagaatgttgggatcccagtgtgtgaaggagctgttaacacaaaatgcccatggaacgcagcagagctatttcatcttgaactggttgaaggcgaaacaattagagagtggctcttctttgacaaacctagaagagcatatgatagcggaaaccgaaagcaaagatcacttccagattacagtggaagaggttggcatgaatcaagaaaacaactgatgaaggaacaagaaggccagaagagatcttactatatggatccacaacctccaggtccctttgagtggcatctctttgaataccaaatcaatgaatctgacgcatgtgcgttatatcgcctagaacttaaagtaggaaatggaaagaagagtcctaagggaaagatttcaaaagaccctctggctgatctgcagaagaagatgggacagtttaaagtggcttcagacaaaccctctcctccaaccaaaggtcgtaaggagtgaagttagctattggtaatctaactcaagactcctgcaacaatagctccaagttgtctccagcattctacaaaagagccatcgccacctctgttttctttttttttttctttctgactgtattatgaagagataggatctttgatgtgttgtgttaatatggacaagtctggtctttgccctttttcttgatagaatcgtagatgggtttgtaaatttttgcattttatttttctcctttaaaaccacaaggattttgt

SEQ ID NO: 42399 - protein, 504 aa, Arabidopsis thaliana
  peptide (1)..(504): Ceres Seq. ID no. 12562422
LSLVLLLHRDISGVFFVSIRRRSSLYPSISKNQRSEEGERDTNLCCFGFKGLEEMSNHPKITSAHQNVEEKLRELQERFCHLQAARKEGRHGDLALLEAQISQNIREWQAELTAPSPESSLLGEGISQFLEEFAPLLKLDEEDDATSTLKEHAGAKPDPEGFSQSLCPPEWTSENFSQSPFNGNFSCGFEDALNSTETHGQQLHYGYEGFDPSINSAPDFHDQKLSSNLDITSQYDYIFSEVRQELDNSPSTKLDSSEEIDNFAEFSTPSSVRVPPSAFLGPKCALWDCTRPAQGSEWYLDYCSNYHGTLALNEDSPGTAPVLRPGGISLKDNLLIDALRAKTQGKNVGIPVCEGAVNTKCPWNAAELFHLELVEGETIREWLFFDKPRRAYDSGNRKQRSLPDYSGRGWHESRKQLMKEQEGQKRSYYMDPQPPGPFEWHLFEYQINESDACALYRLELKVGNGKKSPKGKISKDPLADLQKKMGQFKVASDKPSPPTKGRKE

SEQ ID NO: 42400 - protein, 450 aa, Arabidopsis thaliana
  peptide (1)..(450): Ceres Seq. ID no. 12562423
MSNHPKITSAHQNVEEKLRELQERFCHLQAARKEGRHGDLALLEAQISQNIREWQAELTAPSPESSLLGEGISQFLEEFAPLLKLDEEDDATSTLKEHAGAKPDPEGFSQSLCPPEWTSENFSQSPFNGNFSCGFEDALNSTETHGQQLHYGYEGFDPSINSAPDFHDQKLSSNLDITSQYDYIFSEVRQELDNSPSTKLDSSEEIDNFAEFSTPSSVRVPPSAFLGPKCALWDCTRPAQGSEWYLDYCSNYHGTLALNEDSPGTAPVLRPGGISLKDNLLIDALRAKTQGKNVGIPVCEGAVNTKCPWNAAELFHLELVEGETIREWLFFDKPRRAYDSGNRKQRSLPDYSGRGWHESRKQLMKEQEGQKRSYYMDPQPPGPFEWHLFEYQINESDACALYRLELKVGNGKKSPKGKISKDPLADLQKKMGQFKVASDKPSPPTKGRKE

SEQ ID NO: 42401 - DNA, 1365 bp, Arabidopsis thaliana
  misc_feature (1)..(1365): Ceres Seq. ID no. 13494652
  misc_feature (1)..(1365): Ortholog of  Ceres SEQ ID NO 15171245 as cited in SEQ ID NO 52264
  misc_feature (1)..(1365): Ortholog of  Ceres SEQ ID NO 14303576 as cited in SEQ ID NO 68428
atgggtgcaatgctaaatcttttgctcgtcgttactgtcattctctgttcaatcttatcacccacacggtttatgattatgattgataaaatggttgcagatggatacgatcctcttgatccgttcggaaaaatcattatcaaatgggatcttcttttatcatcacctggccaacaccacgtacaagtaacgttagagaacatgcaagagtatcgacacgtggaaaagccagggtggaagcttagctggcattggctcaaccaagaagtgatatgggacatgaaaggagctgagacgacggagcaaggtaattgctctgcctttgcctccagcggtaaccttcctcactgctgtctcgagcgaccaaccatagtcgaccttcttcccggtgcttctctcaacgttcaagttgccaattgttgccgtggaggcgtcttgacttccatgtctcaggaccacgccaatcacgtctctgcttttcacatgacagttggaagctctcctgatggccctgaggagttcaatatgccttctaatttcgatataggggtcccgggttatagctgcgacaatgctacatccgtgtccccgactaagtttagtactgataagggccgtcgcaaaacacaagctctagcaacatgggaggcagtgtgtgtatactcgcagtttcggtcatcaccatcgccaaaatgctgcgtttcactctctgccttctactaccaaaacattgttccttgtcctacctgtagctgcggctgctcgagttcccattgtgtcaaggatggagagttgccgccatatcttgaacagaaacatgatccagatgaggaagtatcgcctgtcgtgaagtgttcggatcatatgtgtcccatccgcatccactggcatgtgaaagtgaactatagagagtattggagggttaagatcacagcaacaaatttcaacacaatgaagaattacactaattggaacttagtggtgcttcatccaaacttgaaaagcgtccaacaagtctttagctttaactacaaatctttgacaccatatcaaaacagcatcaatgacacagggatgttttggggagtccagttttataatgatgttttgcttcaagaaggaaagattgggaatgttcaaacagagttattgctgaagaaggatatgggaaatttcactttcagagaaggttgggctttcccaaggagaatcttgttcaatggtgatgaatgtgttatgccttctccagatgactttccaaggctgccaaaatctgctcattcctcttcgtcttcctctgctgttattagctctgtttcagtcgttttctgttttctccttcatcatcttcttctactagtttga

SEQ ID NO: 42402 - protein, 454 aa, Arabidopsis thaliana
  peptide (1)..(454): Ceres Seq. ID no. 13494653
MGAMLNLLLVVTVILCSILSPTRFMIMIDKMVADGYDPLDPFGKIIIKWDLLLSSPGQHHVQVTLENMQEYRHVEKPGWKLSWHWLNQEVIWDMKGAETTEQGNCSAFASSGNLPHCCLERPTIVDLLPGASLNVQVANCCRGGVLTSMSQDHANHVSAFHMTVGSSPDGPEEFNMPSNFDIGVPGYSCDNATSVSPTKFSTDKGRRKTQALATWEAVCVYSQFRSSPSPKCCVSLSAFYYQNIVPCPTCSCGCSSSHCVKDGELPPYLEQKHDPDEEVSPVVKCSDHMCPIRIHWHVKVNYREYWRVKITATNFNTMKNYTNWNLVVLHPNLKSVQQVFSFNYKSLTPYQNSINDTGMFWGVQFYNDVLLQEGKIGNVQTELLLKKDMGNFTFREGWAFPRRILFNGDECVMPSPDDFPRLPKSAHSSSSSSAVISSVSVVFCFLLHHLLLLV

SEQ ID NO: 42403 - protein, 451 aa, Arabidopsis thaliana
  peptide (1)..(451): Ceres Seq. ID no. 13494654
MLNLLLVVTVILCSILSPTRFMIMIDKMVADGYDPLDPFGKIIIKWDLLLSSPGQHHVQVTLENMQEYRHVEKPGWKLSWHWLNQEVIWDMKGAETTEQGNCSAFASSGNLPHCCLERPTIVDLLPGASLNVQVANCCRGGVLTSMSQDHANHVSAFHMTVGSSPDGPEEFNMPSNFDIGVPGYSCDNATSVSPTKFSTDKGRRKTQALATWEAVCVYSQFRSSPSPKCCVSLSAFYYQNIVPCPTCSCGCSSSHCVKDGELPPYLEQKHDPDEEVSPVVKCSDHMCPIRIHWHVKVNYREYWRVKITATNFNTMKNYTNWNLVVLHPNLKSVQQVFSFNYKSLTPYQNSINDTGMFWGVQFYNDVLLQEGKIGNVQTELLLKKDMGNFTFREGWAFPRRILFNGDECVMPSPDDFPRLPKSAHSSSSSSAVISSVSVVFCFLLHHLLLLV

SEQ ID NO: 42404 - protein, 430 aa, Arabidopsis thaliana
  peptide (1)..(430): Ceres Seq. ID no. 13494655
MIMIDKMVADGYDPLDPFGKIIIKWDLLLSSPGQHHVQVTLENMQEYRHVEKPGWKLSWHWLNQEVIWDMKGAETTEQGNCSAFASSGNLPHCCLERPTIVDLLPGASLNVQVANCCRGGVLTSMSQDHANHVSAFHMTVGSSPDGPEEFNMPSNFDIGVPGYSCDNATSVSPTKFSTDKGRRKTQALATWEAVCVYSQFRSSPSPKCCVSLSAFYYQNIVPCPTCSCGCSSSHCVKDGELPPYLEQKHDPDEEVSPVVKCSDHMCPIRIHWHVKVNYREYWRVKITATNFNTMKNYTNWNLVVLHPNLKSVQQVFSFNYKSLTPYQNSINDTGMFWGVQFYNDVLLQEGKIGNVQTELLLKKDMGNFTFREGWAFPRRILFNGDECVMPSPDDFPRLPKSAHSSSSSSAVISSVSVVFCFLLHHLLLLV

SEQ ID NO: 42405 - DNA, 769 bp, Arabidopsis thaliana
  misc_feature (1)..(769): Ceres Seq. ID no. 13488305
  misc_feature (1)..(769): Ortholog of  Ceres SEQ ID NO 13594962 as cited in SEQ ID NO 56140
  misc_feature (1)..(769): Ortholog of  Ceres SEQ ID NO 13598378 as cited in SEQ ID NO 62631
cttccgcctccgtcatagaacgcagaactgggtggatcaccgtggtcgtcaaattcctagctcctcgactccaaaaaaaaatcataaacgtattaccgtctcttgttttcctcgtaaggtattatatcggtcgaagtctccaatcatcggtctgagtaatctctgacaatggctgcaagagttttggcaagtgtgattgtgatgggctctggaatcatagccagggcttgtactcaggcatatcgtcaggcgcttgcaaatgcatcaaaaaccggggttgcgcatgaagcgacacagactattaagagagggttgactataggtgaagcagaagctagacagattcttggtgtaactgagaaatcatcttgggacgagattcttaagaaatacgacacgttgttcgaacgcaatgcgcagaatggaagcttctatctccaatctaaggtccatagagctaaggaatgcttagagactgcataccagaagagtacaacaacaagcgcatgaacaagcaataaaacaataggagcaaatcaggaacatatcttttgatacaagttatagttttaggacagaagtttgaaattgagtggagatagccgcaaaagttgaaattgagacaaggtcggtgatggccggaatgctgccagtaaccgactcaccggcgttgttaaaagtcttgttattttgtttaataatattgacttttctagttcttaggtaaactagttgaattctagcatgtctattgaattatctgagtttg

SEQ ID NO: 42406 - protein, 113 aa, Arabidopsis thaliana
  peptide (1)..(113): Ceres Seq. ID no. 13488306
MAARVLASVIVMGSGIIARACTQAYRQALANASKTGVAHEATQTIKRGLTIGEAEARQILGVTEKSSWDEILKKYDTLFERNAQNGSFYLQSKVHRAKECLETAYQKSTTTSA

SEQ ID NO: 42407 - protein, 102 aa, Arabidopsis thaliana
  peptide (1)..(102): Ceres Seq. ID no. 13488307
MGSGIIARACTQAYRQALANASKTGVAHEATQTIKRGLTIGEAEARQILGVTEKSSWDEILKKYDTLFERNAQNGSFYLQSKVHRAKECLETAYQKSTTTSA

SEQ ID NO: 42408 - DNA, 2346 bp, Arabidopsis thaliana
  misc_feature (1)..(2346): Ceres Seq. ID no. 13509044
  misc_feature (1)..(2346): Ortholog of  Ceres SEQ ID NO 12611963 as cited in SEQ ID NO 53414
atcctttgataactttccggcaaaatctcagaacctccccatttttctttgccgattattgatcggaattgctttgttcgctcatctgccaacttccttcctactcggtgtaggaatcttacgtgtccaatcatctgtctatttttggaaacaaatcctcagtgattttgtactttacttatatcaaattcgataactagggtttatcgaatcggattgttgtttctccaattataataattcaagttggttcacacagtagcgtcgacttttcatagccgctgttgtcgaattttgaatttctcgattttcccggcgcttttgttacgattcaaggagtttgaacaagtagggcttctcgttgcggagatcatggatattgacggagtagacgacgatcttcatattttagatcctgagctcttgcagctccccggtttgtctccttctcccctcaaaccaacctctcttattgctgatgacctcttctctcagtggctctcactccctgaaactgccacattggtcaagtctttgattgatgatgctaaatctggaacaccaactaataaatccaagaatttgccttctgtgtttctgagcagcagcactcccccactatctccacgaagctcctctggttcccctcgtttctccaggcaaaggactagccctccttctctccactctcctcttagatcactcaaggagccaaagcgccaactcattcctcagttctactaccaacacgggcgtccaccagcaaaagaactaaaggagcaatgtctatccatggttgatcaagtttttagaatatataaggcagttcattttaccattctcgttcctcttgcagaattcaaatccattacgaaacaagtctgcaagctgccttcttttctttctcctgcacttttcagaaagatcgatcccaattgcactgatatagttacaagggatgcatttatcaagtattggattgatggcaatatgttaactatggacacagcctcccagatatataatatactaaggcagcagggctgcagctatctcagacaggcagacttcaaaccagttcttgatgagcttctggcaacacatcctggattagaatttttgaggacgataagcgagtttcaagaaagatatgctgaaacggtcatctacagaatattttactacattaacagatccggaactggctgccttactcttagagagctgagacgtggaaatttaattgctgctatgcaacaacttgatgaagaggacgacattaataaaattattaggtacttctcctatgagcacttctacgtgatatactgcaaattttgggaacttgatggtgaccatgattgttttattgataaggacaatctcatcaaatatggtaataatgcccttacctacaggattgttgatagaatattttcacagattccaaggaagtttacgagtaaagttgaagggaagatgagttatgaagattttgtgtacttcattctcgctgaggaagacaagtcttccgagcctagtcttgagtattggttcaaatgcgtagacttggatggaaatggggtaatcacttcaaacgaaatgcagtttttcttcgaagagcagctgcatcgcatggaatgcataacccaggaagctgttcttttcagtgatatcctatgtcaaataattgacatgattggacccgagaaggagaactgtatcaccctccaggatctgaaaggatcgaaactttcagcaaacgttttcaatatactcttcaaccttaataagttcatggcatttgaaacacgtgacccatttctcattcgccaggaacgggaagatccaaatttgacagagtgggatcgatttgctcagagagagtatgcgagattgtcaatggaggaagatgtagatgaagtctcaaatgggagtgcagatgtctgggatgaaccactcgaacctccattttagtccatagtgaaaccaaccaaataaggagacttatgatttgaggttttccctggagagagatccatgatcagagattggaggtcactgttggttgttaccagacgctttcatcatcatttccaaaagagtctcagccaaattcatgaaattttagcaattttgttttggtttcattataaagattatatcaagttgggccctctctccctctacatcatctagtgtccatataaccagttggattgtccaactcagaatgtactcataaatctgaattgttaaactcttttagtctttactgtcacacgaatatattttcagaaagaaatctgaattgtaaatctctttagttgcactgatatctttttc

SEQ ID NO: 42409 - protein, 534 aa, Arabidopsis thaliana
  peptide (1)..(534): Ceres Seq. ID no. 13509045
MDIDGVDDDLHILDPELLQLPGLSPSPLKPTSLIADDLFSQWLSLPETATLVKSLIDDAKSGTPTNKSKNLPSVFLSSSTPPLSPRSSSGSPRFSRQRTSPPSLHSPLRSLKEPKRQLIPQFYYQHGRPPAKELKEQCLSMVDQVFRIYKAVHFTILVPLAEFKSITKQVCKLPSFLSPALFRKIDPNCTDIVTRDAFIKYWIDGNMLTMDTASQIYNILRQQGCSYLRQADFKPVLDELLATHPGLEFLRTISEFQERYAETVIYRIFYYINRSGTGCLTLRELRRGNLIAAMQQLDEEDDINKIIRYFSYEHFYVIYCKFWELDGDHDCFIDKDNLIKYGNNALTYRIVDRIFSQIPRKFTSKVEGKMSYEDFVYFILAEEDKSSEPSLEYWFKCVDLDGNGVITSNEMQFFFEEQLHRMECITQEAVLFSDILCQIIDMIGPEKENCITLQDLKGSKLSANVFNILFNLNKFMAFETRDPFLIRQEREDPNLTEWDRFAQREYARLSMEEDVDEVSNGSADVWDEPLEPPF

SEQ ID NO: 42410 - protein, 394 aa, Arabidopsis thaliana
  peptide (1)..(394): Ceres Seq. ID no. 13509046
MVDQVFRIYKAVHFTILVPLAEFKSITKQVCKLPSFLSPALFRKIDPNCTDIVTRDAFIKYWIDGNMLTMDTASQIYNILRQQGCSYLRQADFKPVLDELLATHPGLEFLRTISEFQERYAETVIYRIFYYINRSGTGCLTLRELRRGNLIAAMQQLDEEDDINKIIRYFSYEHFYVIYCKFWELDGDHDCFIDKDNLIKYGNNALTYRIVDRIFSQIPRKFTSKVEGKMSYEDFVYFILAEEDKSSEPSLEYWFKCVDLDGNGVITSNEMQFFFEEQLHRMECITQEAVLFSDILCQIIDMIGPEKENCITLQDLKGSKLSANVFNILFNLNKFMAFETRDPFLIRQEREDPNLTEWDRFAQREYARLSMEEDVDEVSNGSADVWDEPLEPPF

SEQ ID NO: 42411 - protein, 328 aa, Arabidopsis thaliana
  peptide (1)..(328): Ceres Seq. ID no. 13509047
MLTMDTASQIYNILRQQGCSYLRQADFKPVLDELLATHPGLEFLRTISEFQERYAETVIYRIFYYINRSGTGCLTLRELRRGNLIAAMQQLDEEDDINKIIRYFSYEHFYVIYCKFWELDGDHDCFIDKDNLIKYGNNALTYRIVDRIFSQIPRKFTSKVEGKMSYEDFVYFILAEEDKSSEPSLEYWFKCVDLDGNGVITSNEMQFFFEEQLHRMECITQEAVLFSDILCQIIDMIGPEKENCITLQDLKGSKLSANVFNILFNLNKFMAFETRDPFLIRQEREDPNLTEWDRFAQREYARLSMEEDVDEVSNGSADVWDEPLEPPF

SEQ ID NO: 42412 - DNA, 1152 bp, Arabidopsis thaliana
  misc_feature (1)..(1152): Ceres Seq. ID no. 13495917
  misc_feature (1)..(1152): Ortholog of  Ceres SEQ ID NO 14306066 as cited in SEQ ID NO 57378
attattttatttatctcaccaaggaaaacaaaacacaaaacaaacaaacaaacaaacccataaatcaagatctctgttttcagacagattattatcggaacaaaatgtcatcatcaggatccgacaaagagagagagacttttgtctatatggctaagctctccgaacaagccgagcgatacgacgagatggtggagacgatgaagaaagtggcgagggttaatagcgagctgactgtggaagagaggaatctgttgtcggttggttacaagaacgtgatcggagcaagaagagcttcgtggaggataatgtcgtccatcgagcagaaagaagagtctaaaggcaatgaatcaaacgtgaaacaaatcaagggttatcgccaaaaggtagaagatgagctcgctaacatttgccaagacattctcaccatcattgatcagcatctcatccctcacgctacctcaggggaagctaccgtcttctactacaagatgaaaggagattattaccgttacttggctgagtttaagaccgagcaagagaggaaggaagctgctgaacagtctctcaaaggctatgaggctgcaacacaagctgcaagcactgagcttccttcgacccatccaattcgtcttggccttgctcttaacttctctgttttctactatgagatcatgaactctcctgaaagagcttgccatttggctaagcaagccttcgatgaggcgattgcagagttagatactctaagtgaggagtcgtacaaggacagcactttgatcatgcagctcctgagagacaacctcaccctctggacttctgatcttcctgaagatggaggagaagacaacatcaagactgaagaatccaagcaagaacaggccaagcctgccgatgccactgagaactgatcaaagggcttggaagttgaatgagatttagattcgatgtccagaagggggaggcaaattcctttaaattccatagcttggtttcatcaggaagatgagatcagagacaattgaattcaatcctatattgtttcttttttgtattacttttcgtcttctttattttgttctcaattttcatgtcatcaagtattttatgttacgcaattttattatgatttgatcagcatatgcttttgcc

SEQ ID NO: 42413 - protein, 302 aa, Arabidopsis thaliana
  peptide (1)..(302): Ceres Seq. ID no. 13495918
YFIYLTKENKTQNKQTNKPINQDLCFQTDYYRNKMSSSGSDKERETFVYMAKLSEQAERYDEMVETMKKVARVNSELTVEERNLLSVGYKNVIGARRASWRIMSSIEQKEESKGNESNVKQIKGYRQKVEDELANICQDILTIIDQHLIPHATSGEATVFYYKMKGDYYRYLAEFKTEQERKEAAEQSLKGYEAATQAASTELPSTHPIRLGLALNFSVFYYEIMNSPERACHLAKQAFDEAIAELDTLSEESYKDSTLIMQLLRDNLTLWTSDLPEDGGEDNIKTEESKQEQAKPADATEN

SEQ ID NO: 42414 - protein, 268 aa, Arabidopsis thaliana
  peptide (1)..(268): Ceres Seq. ID no. 13495919
MSSSGSDKERETFVYMAKLSEQAERYDEMVETMKKVARVNSELTVEERNLLSVGYKNVIGARRASWRIMSSIEQKEESKGNESNVKQIKGYRQKVEDELANICQDILTIIDQHLIPHATSGEATVFYYKMKGDYYRYLAEFKTEQERKEAAEQSLKGYEAATQAASTELPSTHPIRLGLALNFSVFYYEIMNSPERACHLAKQAFDEAIAELDTLSEESYKDSTLIMQLLRDNLTLWTSDLPEDGGEDNIKTEESKQEQAKPADATEN

SEQ ID NO: 42415 - protein, 253 aa, Arabidopsis thaliana
  peptide (1)..(253): Ceres Seq. ID no. 13495920
MAKLSEQAERYDEMVETMKKVARVNSELTVEERNLLSVGYKNVIGARRASWRIMSSIEQKEESKGNESNVKQIKGYRQKVEDELANICQDILTIIDQHLIPHATSGEATVFYYKMKGDYYRYLAEFKTEQERKEAAEQSLKGYEAATQAASTELPSTHPIRLGLALNFSVFYYEIMNSPERACHLAKQAFDEAIAELDTLSEESYKDSTLIMQLLRDNLTLWTSDLPEDGGEDNIKTEESKQEQAKPADATEN

SEQ ID NO: 42416 - DNA, 1887 bp, Arabidopsis thaliana
  misc_feature (1)..(1887): Ceres Seq. ID no. 13592813
  misc_feature (1)..(1887): Ortholog of  Ceres SEQ ID NO 15171606 as cited in SEQ ID NO 57214
  misc_feature (1)..(1887): Ortholog of  Ceres SEQ ID NO 13596921 as cited in SEQ ID NO 62368
aacacttgagagagtctctgtctctgtaaaagatatttgagcttgagaagaacagaagaaacttccaggatcaatcaatcgatcaactttagtgaactaactcttgatttttcattcgaagttatggaatcggttcccgaatccgtaccatcgccgaactcgaatacaccgtcaataccaccgccggtgaactccgtaccgcctttcttgagtaaaacctacgacatggttgatgatccgttgaccaatgaggtcgtttcgtggagcagcgggaacaacagcttcgtcgtctggagtgtcccggagttctcgaaggtgctcttgcccaagtatttcaagcacaacaacttctccagcttcgtcagacagttaaatacttatggtttcagaaaagttgatcctgaccgatgggaatttgcaaatgaaggatttcttagaggccgaaaacaactactgaagagtattgtcaggagaaaaccttcgcatgtgcagcagaatcagcaacaaactcaagttcagagctcatctcttggtgcttgtgtcgaggtggggaagtttggaatagaagaagaagtggaaagacttaagcgggataagaatgttcttatgcaagaactcgtcaggttaaggcagcaacagcaagctactgaaaaccaactgcagaatgtgggacagaaagttcaggtgatggagcaaaggcaacaacaaatgatgtcgtttttagcaaaggctgttcaaagtccaggtttcttaaaccagttagtacaacagaataataatgatggcaacagacaaattccaggaagcaacaaaaagaggagacttcctgtagatgagcaggagaatcgtggcgacaatgtggctaatggtcttaaccgccagattgttagatatcagccgtcgataaacgaagcagcacaaaatatgcttcgacagttcttaaatactagtacctcacctcggtatgaatcagtttcaaacaatcctgacagtttcctattgggtgatgttcccagttctacctctgtagacaatgggaacccttcaagtagagtttctggagtaacattggccgagttttcacccaacacagttcagtcagcaacgaatcaagtacccgaagcaagtttggctcatcatcctcaagctggtctggttcagccaaatataggtcaaagtccggctcaaggagcagcacctgcagactcttggagccctgaatttgatttagttggatgcgagacagatagtggagagtgttttgatccaataatggctgttttagatgagtcagaaggcgatgcaatttctcctgaaggtgagggaaagatgaatgagttactggagggagtccctaagctgcccggaatccaagatccattctgggaacagttcttttctgttgaactcccagcgattgcagatacagacgagattctatcaggatcagtggagaataatgacttggtaatggaacaagaaccaaacgagtggacccgtaatgaacaacaaatgaagtatcttactgaacaaatgggactgctttcctcagaagcacagaggaaataaaggggaggttgcgaaaggagatatcaaggaaggaggaatatatcagatggtgtgtataccctttacatttttacttaaatgaagaaaaaaaacagagagaagaaacataaaagatttaccaccaagcttgtgaatagttagtagagatcggtttttgtgttgtttatattatacttttgtgtgaaaacgttcatcttgttcaattatcatctcagtagtacggtaatctgttggtcactgaccggttaatgaccaaaaaatcaagattattttcttatgtttatttcttttgatcatgaagatccttatggagggggg

SEQ ID NO: 42417 - protein, 481 aa, Arabidopsis thaliana
  peptide (1)..(481): Ceres Seq. ID no. 15221168
MESVPESVPSPNSNTPSIPPPVNSVPPFLSKTYDMVDDPLTNEVVSWSSGNNSFVVWSVPEFSKVLLPKYFKHNNFSSFVRQLNTYGFRKVDPDRWEFANEGFLRGRKQLLKSIVRRKPSHVQQNQQQTQVQSSSLGACVEVGKFGIEEEVERLKRDKNVLMQELVRLRQQQQATENQLQNVGQKVQVMEQRQQQMMSFLAKAVQSPGFLNQLVQQNNNDGNRQIPGSNKKRRLPVDEQENRGDNVANGLNRQIVRYQPSINEAAQNMLRQFLNTSTSPRYESVSNNPDSFLLGDVPSSTSVDNGNPSSRVSGVTLAEFSPNTVQSATNQVPEASLAHHPQAGLVQPNIGQSPAQGAAPADSWSPEFDLVGCETDSGECFDPIMAVLDESEGDAISPEGEGKMNELLEGVPKLPGIQDPFWEQFFSVELPAIADTDEILSGSVENNDLVMEQEPNEWTRNEQQMKYLTEQMGLLSSEAQRK

SEQ ID NO: 42418 - protein, 447 aa, Arabidopsis thaliana
  peptide (1)..(447): Ceres Seq. ID no. 15221169
MVDDPLTNEVVSWSSGNNSFVVWSVPEFSKVLLPKYFKHNNFSSFVRQLNTYGFRKVDPDRWEFANEGFLRGRKQLLKSIVRRKPSHVQQNQQQTQVQSSSLGACVEVGKFGIEEEVERLKRDKNVLMQELVRLRQQQQATENQLQNVGQKVQVMEQRQQQMMSFLAKAVQSPGFLNQLVQQNNNDGNRQIPGSNKKRRLPVDEQENRGDNVANGLNRQIVRYQPSINEAAQNMLRQFLNTSTSPRYESVSNNPDSFLLGDVPSSTSVDNGNPSSRVSGVTLAEFSPNTVQSATNQVPEASLAHHPQAGLVQPNIGQSPAQGAAPADSWSPEFDLVGCETDSGECFDPIMAVLDESEGDAISPEGEGKMNELLEGVPKLPGIQDPFWEQFFSVELPAIADTDEILSGSVENNDLVMEQEPNEWTRNEQQMKYLTEQMGLLSSEAQRK

SEQ ID NO: 42419 - protein, 320 aa, Arabidopsis thaliana
  peptide (1)..(320): Ceres Seq. ID no. 15221170
MQELVRLRQQQQATENQLQNVGQKVQVMEQRQQQMMSFLAKAVQSPGFLNQLVQQNNNDGNRQIPGSNKKRRLPVDEQENRGDNVANGLNRQIVRYQPSINEAAQNMLRQFLNTSTSPRYESVSNNPDSFLLGDVPSSTSVDNGNPSSRVSGVTLAEFSPNTVQSATNQVPEASLAHHPQAGLVQPNIGQSPAQGAAPADSWSPEFDLVGCETDSGECFDPIMAVLDESEGDAISPEGEGKMNELLEGVPKLPGIQDPFWEQFFSVELPAIADTDEILSGSVENNDLVMEQEPNEWTRNEQQMKYLTEQMGLLSSEAQRK

SEQ ID NO: 42420 - DNA, 878 bp, Arabidopsis thaliana
  misc_feature (1)..(878): Ceres Seq. ID no. 13576604
  misc_feature (1)..(878): Ortholog of  Ceres SEQ ID NO 15168856 as cited in SEQ ID NO 56354
  misc_feature (1)..(878): Ortholog of  Ceres SEQ ID NO 13583591 as cited in SEQ ID NO 63084
aaagcaagaaaaagagaatgtcaaaggagaaacaaggaagaagcttagcttataatcgaatctaagccgtttcgggaaattctgtttgtaggtgacaaaatcctcttatagggttattcttagctatgaatttcctctgcaatttctttttttccccgccaaaatttctcctgaagcaaatgtagctttttacttgctgaactagggttttgttcgattttgttcctctttcctcgctgattttgtcggaatttctgggtttgggaagagaaattggagtcgttattgattgaaatgaagaagcttttaggaggtccgggaactgtgtgtggtctgttactgagaatcggacaatgtgcttcagctgctgcttcaatcggcgttatggtctctgctaaagagttctctgttcacactgctttttgctacttgattgcgtcaatgggtcttcaattgttgtggagctttgggctagcatgtcttgatgtttatgctctcaggggaaagaaagatctccaaaaccctatcttggttagcttattcgtcgttggtgattgggtgacggcaatgttatctcttgcagctgcatgttcatcagcaggagttgtagtcttgtatgaaaaagatatcaagtattgcaatactcaaagccaatatccatgtcttaggtatgaagtagctgtagcgctttctttcgtcacttggatccagattgctgtttcttctcatgtcacattttggatcttagcctcggtttagttagtttcgcaaagaactcccaactttttcttcttcttggaatgttgagacatctttgtagcttttgatgacgttaacaatctgcttctaatcgaatctatcaatgtttcttgcaatcg

SEQ ID NO: 42421 - protein, 154 aa, Arabidopsis thaliana
  peptide (1)..(154): Ceres Seq. ID no. 13576605
MKKLLGGPGTVCGLLLRIGQCASAAASIGVMVSAKEFSVHTAFCYLIASMGLQLLWSFGLACLDVYALRGKKDLQNPILVSLFVVGDWVTAMLSLAAACSSAGVVVLYEKDIKYCNTQSQYPCLRYEVAVALSFVTWIQIAVSSHVTFWILASV

SEQ ID NO: 42422 - protein, 124 aa, Arabidopsis thaliana
  peptide (1)..(124): Ceres Seq. ID no. 13576606
MVSAKEFSVHTAFCYLIASMGLQLLWSFGLACLDVYALRGKKDLQNPILVSLFVVGDWVTAMLSLAAACSSAGVVVLYEKDIKYCNTQSQYPCLRYEVAVALSFVTWIQIAVSSHVTFWILASV

SEQ ID NO: 42423 - protein, 105 aa, Arabidopsis thaliana
  peptide (1)..(105): Ceres Seq. ID no. 13576607
MGLQLLWSFGLACLDVYALRGKKDLQNPILVSLFVVGDWVTAMLSLAAACSSAGVVVLYEKDIKYCNTQSQYPCLRYEVAVALSFVTWIQIAVSSHVTFWILASV

SEQ ID NO: 42424 - DNA, 610 bp, Arabidopsis thaliana
  misc_feature (1)..(610): Ceres Seq. ID no. 13645969
  misc_feature (1)..(610): Ortholog of  Ceres SEQ ID NO 13654738 as cited in SEQ ID NO 62613
gaagaacctctctgcatcaatggcgatctccaagctccatctactcttccttctctcagtctttctctcccttcatcctcttgttctttccgacaccgccgatgaagaagatgttcttcttacaggcatcaacagttacagagcatcactaaacctaacaaccttaatacacaaccacaacgcagaatgtctagcagacgaaatcgcagaccaattcaagaaccaaccttgcacaaacaccactggctcagcctctgtccctggaaccacacctggattcccaaacttgcctaacctcctctcaaaatgccgcctcaaccctaccgtaactagagacggtgcgattttgccagcttgtgttcccaaccttgatcctagccttgtcttgaccaatttcacaatgtcacagtactccaaggacctgaatgattctaagttcactggtattggtattggttctgatgataattggattgttgttgtcctcactactagcacaccggagggtagctattctccggcctctaactcaggagctttcgcgttcggagttaatggccttgtttcttcaagtttgatgtttcttctcttttgcttcttcatgttttga

SEQ ID NO: 42425 - protein, 202 aa, Arabidopsis thaliana
  peptide (1)..(202): Ceres Seq. ID no. 13645970
KNLSASMAISKLHLLFLLSVFLSLHPLVLSDTADEEDVLLTGINSYRASLNLTTLIHNHNAECLADEIADQFKNQPCTNTTGSASVPGTTPGFPNLPNLLSKCRLNPTVTRDGAILPACVPNLDPSLVLTNFTMSQYSKDLNDSKFTGIGIGSDDNWIVVVLTTSTPEGSYSPASNSGAFAFGVNGLVSSSLMFLLFCFFMF

SEQ ID NO: 42426 - protein, 196 aa, Arabidopsis thaliana
  peptide (1)..(196): Ceres Seq. ID no. 13645971
MAISKLHLLFLLSVFLSLHPLVLSDTADEEDVLLTGINSYRASLNLTTLIHNHNAECLADEIADQFKNQPCTNTTGSASVPGTTPGFPNLPNLLSKCRLNPTVTRDGAILPACVPNLDPSLVLTNFTMSQYSKDLNDSKFTGIGIGSDDNWIVVVLTTSTPEGSYSPASNSGAFAFGVNGLVSSSLMFLLFCFFMF

SEQ ID NO: 42427 - DNA, 1353 bp, Arabidopsis thaliana
  misc_feature (1)..(1353): Ceres Seq. ID no. 12385463
  misc_feature (1)..(1353): Ortholog of  Ceres SEQ ID NO 15177842 as cited in SEQ ID NO 51547
  misc_feature (1)..(1353): Ortholog of  Ceres SEQ ID NO 13594859 as cited in SEQ ID NO 51974
  misc_feature (1)..(1353): Ortholog of  Ceres SEQ ID NO 13597887 as cited in SEQ ID NO 64295
atttcactcatttacgtttgtctctttccccgctctctcgctctcgccgccgtctgcgtaacggtctccggccacattacgccgatcaacctattcactccaccgtcggttcgatatcgtttctctccaagtcaatttgaagtattccgattcgattacattctcattcactttccgaaagcttcttctactcagaaaggtgtgcaaaatgattggatcgtttctaacaagaggactagtaatggtatttggatatgcgtatcctgcttatgaatgttacaaagcggttgaaaagaataagcctgagatgcaacagcttcgattctggtgccaatactggattttggtggctgctttgacaattttcgaaagagttggcgatgctcttgcttcatgggttccactatactgtgaggcaaaactggcatttttcatatatctttggttccccaagaccagaggaactacatacgtgtacgattcattctttcagccatatgttgcaaagcatgaaaatgaaatcgaccgcagcttgattgagctaaggaccaaagctggggatctggcagtgatatactgcagaaaagcagtgagctatggacaaacaagaatcgtagagatcctgcattttgtagctctccagtcaacaccaaaacctaagcctaaggaaaagaagcaggcagcagcaccagaagaggaagaacagaaacaaccggatcttaaggcgacgagccaagcagcttcttctaatcctcaagtgcgtctgcaatcgaagaaaccacagcttgtaaccaaagaacctatatcaccaaagcctctttcatccccacgtaagcaacaacaactacaaacagagaccaaggaagcaaaagcaagcgtgtcacaaaccaaactcactactctaactccaccaggaccaccaccaccaccaccaccaccgccaccatcgcccacaaccgccgcgaaacgaaacgctgatccagcacagccatcaccaacagaggcagaagaagcgtcacagactgtcgcagctttaccagaaccagcgtctgagattcagcgagcgtcatcgtcgaaagagactataatggaggaaacactaaggatcactcgtgggagtctgagaaaagctcgttctgcgggagcaccgcgctaagagaatgattaaaaaagaaaaggggaacacataattttaaatctctaaccccttttgattggtttctctttaaaacagcaataatggtttttatttggttatttgttgtttttagtccgatgtaaatttcagacttcagactaatattggatgttgatctgtccttagctgagtaaaaccacaaaaaaagtttttat

SEQ ID NO: 42428 - protein, 315 aa, Arabidopsis thaliana
  peptide (1)..(315): Ceres Seq. ID no. 12385464
MIGSFLTRGLVMVFGYAYPAYECYKAVEKNKPEMQQLRFWCQYWILVAALTIFERVGDALASWVPLYCEAKLAFFIYLWFPKTRGTTYVYDSFFQPYVAKHENEIDRSLIELRTKAGDLAVIYCRKAVSYGQTRIVEILHFVALQSTPKPKPKEKKQAAAPEEEEQKQPDLKATSQAASSNPQVRLQSKKPQLVTKEPISPKPLSSPRKQQQLQTETKEAKASVSQTKLTTLTPPGPPPPPPPPPPSPTTAAKRNADPAQPSPTEAEEASQTVAALPEPASEIQRASSSKETIMEETLRITRGSLRKARSAGAPR

SEQ ID NO: 42429 - protein, 304 aa, Arabidopsis thaliana
  peptide (1)..(304): Ceres Seq. ID no. 12385465
MVFGYAYPAYECYKAVEKNKPEMQQLRFWCQYWILVAALTIFERVGDALASWVPLYCEAKLAFFIYLWFPKTRGTTYVYDSFFQPYVAKHENEIDRSLIELRTKAGDLAVIYCRKAVSYGQTRIVEILHFVALQSTPKPKPKEKKQAAAPEEEEQKQPDLKATSQAASSNPQVRLQSKKPQLVTKEPISPKPLSSPRKQQQLQTETKEAKASVSQTKLTTLTPPGPPPPPPPPPPSPTTAAKRNADPAQPSPTEAEEASQTVAALPEPASEIQRASSSKETIMEETLRITRGSLRKARSAGAPR

SEQ ID NO: 42430 - protein, 282 aa, Arabidopsis thaliana
  peptide (1)..(282): Ceres Seq. ID no. 12385466
MQQLRFWCQYWILVAALTIFERVGDALASWVPLYCEAKLAFFIYLWFPKTRGTTYVYDSFFQPYVAKHENEIDRSLIELRTKAGDLAVIYCRKAVSYGQTRIVEILHFVALQSTPKPKPKEKKQAAAPEEEEQKQPDLKATSQAASSNPQVRLQSKKPQLVTKEPISPKPLSSPRKQQQLQTETKEAKASVSQTKLTTLTPPGPPPPPPPPPPSPTTAAKRNADPAQPSPTEAEEASQTVAALPEPASEIQRASSSKETIMEETLRITRGSLRKARSAGAPR

SEQ ID NO: 42431 - DNA, 2447 bp, Arabidopsis thaliana
  misc_feature (1)..(2447): Ceres Seq. ID no. 13509107
  misc_feature (1)..(2447): Ortholog of  Ceres SEQ ID NO 15177561 as cited in SEQ ID NO 53065
  misc_feature (1)..(2447): Ortholog of  Ceres SEQ ID NO 13595521 as cited in SEQ ID NO 59840
cgatttctctacttctcagaggagattttagaggcaaaagatggctccaaggttggatttttcagattggtgggcgaaagacacgaggaaaggaacaccagttgtggtgaaaatggagaatcctaattactctgtagttgaaatcgacggtccagattcggcttttagaccagtggagaagagcagaggcaagaacgctaagcaagtcacttgggttttgcttctcaaagctcatagagctgttggatgtctcacttggctcgccactgtcttttggtctctccttggtgccatcaagaaacggcttagtttcactcacccacttggctctgagaaattaggcagagacagatggcttttcactgccattaagctcttcttagctgtttccttagtgattctcggctttgagattgttgcttattttagaggatggcattactttcaaagccctagtcttcacatccccactagcacacttgagatccagagcctgtttcatcttgtgtatgttggttggttaacccttagagctgattatattgctcctcccatcaaagctctctccaagttttgtattgtgctgttccttatacagtcagtagatcgtttggtactttgcttgggttgtttttggatcaagtataagaaaattaagccgagatttgatgaggaacctttccgtaatgatgatgctgagggatctggatctgagtatccaatggttcttgttcagattccaatgtgcaatgagagagaggtgtatgaacaatctatatctgccgtgtgtcaacttgactggccgaaagatcgaatactggttcaggttctcgatgattcgaatgatgaaagcatccaacagttaattaaagctgaggttgccaaatggagccaaaagggagtcaacataatctacaggcatcgcttggttagaactggatataaagctggtaacctcaaatcagcaatgagctgtgattacgttgaagcatacgagtatgtcgcaatctttgatgccgatttccagcctactccggatttccttaaactaacagttccacatttcaaggataacccagagttaggtctagttcaagctagatggacatttgtgaacaaagacgagaacttgttgacccgtcttcagaacatcaatctgtgttttcactttgaggtggagcagcaagtgaacggcgtgttcttgaacttctttggtttcaatggaacagctggagtatggagaatcaaagcccttgaggaatctggtggttggcttgaaaggactactgtggaggatatggacatagcagtccgcgctcatcttcatggatggaagttcatatatcttaatgacgtcaaggtcctttgcgaagttcctgagtcctacgaggcatataagaagcagcaacaccgttggcattcgggacctatgcagcttttccgcttgtgtcttggttcaatcttgacctctaagatagcgatatggaagaaggcgaatctgatacttctcttctttcttcttaggaaactcatacttcctttctactccttcactttgttctgcataatccttccactcaccatgtttgttccagaagctgagctccctgtttgggtcatctgctacataccagttttcatgtctttcctcaaccttcttccatctccaaaatcgtttcctttcatcgttccttatctcttattcgagaacacaatgtctgtcaccaagttcaatgcgatggtgtccggattattccaattgggtagctcttacgagtggattgtcacaaagaaagctggaagatcatcagagtcagatcttttatctatcaccgagaaagagacaccaaccaagaaaagtcaattgcttaggggagtttccgacagcgaacttttggagctgagccaacttgaagaacagaaacaagcggtttcaaagaaacctgtcaagaaaaccaacaagatataccacaaagagctcgcattggcctttcttttgctcactgcagcgcttaggagtctcttggcagcacaaggagtgcatttctacttcctgttattccaaggtgttacctttcttcttgtgggtctcgatctcataggcgagcagatgagctgagaagaacaaaagaagattcataactcgggtcaataaatcagtgagtttgaatttccacttcctctatgttcagtggtatcctctgtaatgagattgttggaaccatagtggtaggcattaattgattttccgtttcgtttgtttgtttgttatgttggtttgattcctccattgttagggatagagtgtgagccagagattcatacatgtatacaatatctgtaaagttggaacatgttgttggcagttaaaagacttgaactaatttcaaggatcatgtcaaatcactgcagagaatttatgtaatttaaagttcaacctttgtggc

SEQ ID NO: 42432 - protein, 692 aa, Arabidopsis thaliana
  peptide (1)..(692): Ceres Seq. ID no. 13509108
MAPRLDFSDWWAKDTRKGTPVVVKMENPNYSVVEIDGPDSAFRPVEKSRGKNAKQVTWVLLLKAHRAVGCLTWLATVFWSLLGAIKKRLSFTHPLGSEKLGRDRWLFTAIKLFLAVSLVILGFEIVAYFRGWHYFQSPSLHIPTSTLEIQSLFHLVYVGWLTLRADYIAPPIKALSKFCIVLFLIQSVDRLVLCLGCFWIKYKKIKPRFDEEPFRNDDAEGSGSEYPMVLVQIPMCNEREVYEQSISAVCQLDWPKDRILVQVLDDSNDESIQQLIKAEVAKWSQKGVNIIYRHRLVRTGYKAGNLKSAMSCDYVEAYEYVAIFDADFQPTPDFLKLTVPHFKDNPELGLVQARWTFVNKDENLLTRLQNINLCFHFEVEQQVNGVFLNFFGFNGTAGVWRIKALEESGGWLERTTVEDMDIAVRAHLHGWKFIYLNDVKVLCEVPESYEAYKKQQHRWHSGPMQLFRLCLGSILTSKIAIWKKANLILLFFLLRKLILPFYSFTLFCIILPLTMFVPEAELPVWVICYIPVFMSFLNLLPSPKSFPFIVPYLLFENTMSVTKFNAMVSGLFQLGSSYEWIVTKKAGRSSESDLLSITEKETPTKKSQLLRGVSDSELLELSQLEEQKQAVSKKPVKKTNKIYHKELALAFLLLTAALRSLLAAQGVHFYFLLFQGVTFLLVGLDLIGEQMS

SEQ ID NO: 42433 - protein, 668 aa, Arabidopsis thaliana
  peptide (1)..(668): Ceres Seq. ID no. 13509109
MENPNYSVVEIDGPDSAFRPVEKSRGKNAKQVTWVLLLKAHRAVGCLTWLATVFWSLLGAIKKRLSFTHPLGSEKLGRDRWLFTAIKLFLAVSLVILGFEIVAYFRGWHYFQSPSLHIPTSTLEIQSLFHLVYVGWLTLRADYIAPPIKALSKFCIVLFLIQSVDRLVLCLGCFWIKYKKIKPRFDEEPFRNDDAEGSGSEYPMVLVQIPMCNEREVYEQSISAVCQLDWPKDRILVQVLDDSNDESIQQLIKAEVAKWSQKGVNIIYRHRLVRTGYKAGNLKSAMSCDYVEAYEYVAIFDADFQPTPDFLKLTVPHFKDNPELGLVQARWTFVNKDENLLTRLQNINLCFHFEVEQQVNGVFLNFFGFNGTAGVWRIKALEESGGWLERTTVEDMDIAVRAHLHGWKFIYLNDVKVLCEVPESYEAYKKQQHRWHSGPMQLFRLCLGSILTSKIAIWKKANLILLFFLLRKLILPFYSFTLFCIILPLTMFVPEAELPVWVICYIPVFMSFLNLLPSPKSFPFIVPYLLFENTMSVTKFNAMVSGLFQLGSSYEWIVTKKAGRSSESDLLSITEKETPTKKSQLLRGVSDSELLELSQLEEQKQAVSKKPVKKTNKIYHKELALAFLLLTAALRSLLAAQGVHFYFLLFQGVTFLLVGLDLIGEQMS

SEQ ID NO: 42434 - protein, 465 aa, Arabidopsis thaliana
  peptide (1)..(465): Ceres Seq. ID no. 13509110
MVLVQIPMCNEREVYEQSISAVCQLDWPKDRILVQVLDDSNDESIQQLIKAEVAKWSQKGVNIIYRHRLVRTGYKAGNLKSAMSCDYVEAYEYVAIFDADFQPTPDFLKLTVPHFKDNPELGLVQARWTFVNKDENLLTRLQNINLCFHFEVEQQVNGVFLNFFGFNGTAGVWRIKALEESGGWLERTTVEDMDIAVRAHLHGWKFIYLNDVKVLCEVPESYEAYKKQQHRWHSGPMQLFRLCLGSILTSKIAIWKKANLILLFFLLRKLILPFYSFTLFCIILPLTMFVPEAELPVWVICYIPVFMSFLNLLPSPKSFPFIVPYLLFENTMSVTKFNAMVSGLFQLGSSYEWIVTKKAGRSSESDLLSITEKETPTKKSQLLRGVSDSELLELSQLEEQKQAVSKKPVKKTNKIYHKELALAFLLLTAALRSLLAAQGVHFYFLLFQGVTFLLVGLDLIGEQMS

SEQ ID NO: 42435 - DNA, 1396 bp, Arabidopsis thaliana
  misc_feature (1)..(1396): Ceres Seq. ID no. 13491615
  misc_feature (1)..(1396): Ortholog of  Ceres SEQ ID NO 13598368 as cited in SEQ ID NO 62140
aagaacaagaagaaaaaggtttgtgaaaaaaaaacaaaggcaaacatggtggagggcataccaaagagatggaaggtgctaagtggccaaaacaaatggaaaggcctgcttgatccacttgacccggatcttcgccgctacatcattcactacggcgagatgtctcaggttggttacgatgcctttaactgggaccgtaagtccagatacgccggtgattgttattactccaagaaccgactgtttgctcgaaccggcttccttaaagccaaccctttcaggtacaaagtgactaagtacatctacgcaacagcttccataaagttaccaatctctttcatcgtaaagtctttgtcaaaggatgcatctcacgtgcagactaactggatgggttacattgcggtagctacagaccagggaaaagcgatgttagggaggagagacattgttgttgcatggagaggaactctacagccatatgaatgggctaatgatttcgattttccgcttgagccagctatctcggttttcccagtaactgaccccaaagataaccctcgtattggaagtggctggctcgacatctataccgcttctgattctcgctcaccttatgacacgactagtgcacaagaacaggtacaaggagagctcaagaggttgctagaactttacaaggatgaagaaataagcatcaccttcacaggccatagcttgggcgcagttatgtcagttctatcagctgcagatcttgtctatggcaaaaagaataatatcaatataaatcttcaaaaaaagcaagttcctatcacagtttttgctttcgggagtcctcggattggagaccataacttcaaaaacgtagtcgactcactccaaccactaaacattctaagaatagtaaatgttccagatgtcgcaccacattatccactcttactgtactcagaaattggcgaggtgttagagatcaatactttgaactcaacatacctgaaacggtctctgaacttcaggaactaccataacctggagatatacctgcacggcatggcagggatgcaagatacagacggggtattcaagctggagattggccgggatatttcgttggtcaataaaggattggatgctctaaaggacgagtacttagtgccaagtacctggaggtgtctggcaaacaaagggatgcttcaaatggatgatgggacatggaagctggatgtccacaggagagatcatgatgatgatgttgatgctgatgacaatgatgactcctcaactagtaaccaactacaagagctaaatacagattagttacaaaaacttatataagattctgcacaatatgtttgtacacaaaaaaaaattcatttagaagaacaaagaatctggg

SEQ ID NO: 42436 - protein, 438 aa, Arabidopsis thaliana; identical to SEQ ID NO: 29053
  peptide (1)..(438): Ceres Seq. ID no. 13491616

SEQ ID NO: 42437 - protein, 423 aa, Arabidopsis thaliana; identical to SEQ ID NO: 29054
  peptide (1)..(423): Ceres Seq. ID no. 13491617

SEQ ID NO: 42438 - protein, 385 aa, Arabidopsis thaliana; identical to SEQ ID NO: 29055
  peptide (1)..(385): Ceres Seq. ID no. 13491618

SEQ ID NO: 42439 - DNA, 1704 bp, Arabidopsis thaliana
  misc_feature (1)..(1704): Ceres Seq. ID no. 12395036
  misc_feature (1)..(1704): Ortholog of  Ceres SEQ ID NO 15179007 as cited in SEQ ID NO 1038
  misc_feature (1)..(1704): Ortholog of  Ceres SEQ ID NO 15226449 as cited in SEQ ID NO 58879
  misc_feature (1)..(1704): Ortholog of  Ceres SEQ ID NO 13597146 as cited in SEQ ID NO 63311
accatcgaaacagtgtcgtcgtagtctctctctctctccgcaaaatatcatcggagaaaagaaacagagacacgaaacagagaaaaccatgcagagattcgcggcgaaaagatcggtgcaaaacatttccgtctctctatggcgtcgatgtatctcatcgacgtctcaggcagcgacagcttccgttaaggattccgacgagtttcaggcgaggcttcctccttttgcttacactcctccgccgtatactggtccttccgccgatgttatccttagcaaaaggaaggagtttctcagtccttccatgttctgtctctatcggaaaccgttaaacattgtggatgggaaaatgcagtatctatttgatgagagtggtcggagatatttagatgcatttgctgggattgctgttgtgaattgtggacattgtcatccagatgtggttgagccagtgattaatcaaatcaagaggcttcagcatcctactgttctttaccttaaccatgccattgctgatttctctgaggctcttgcttctaaacttcccggtgatctaaaggtggtgtttttcactaactcagggacagaggctaatgaattggcgcttatgatggctaagttgtatactggatgtcaagatattgtggcggttcgaaacgggtatcatggtaatgcagctgcaactatgggggctactggtcagagtatgtggaagtttaatgtggttcagaatagtgttcatcatgctttgaaccctgatccttatagaggtgtgtttggttctgatggagagaagtatgcaaaggatttgcaagatcttattcaatatggtacgactggtcacattgccggttttatttgtgaagctattcagggagttggagggatcgtggaactagcaccgggatatttgtcagcggcttacgatactgttaagaaagctggtggattgttcattgcggatgaagttcagtctggtttcgcacgtactggtaacttttggggatttgaggcacacaatgttgtccctgacatagtaaccatggcaaagggaattgggaatgggtttcctttgggagctgttgtgacaactccagagatagcaggagtgttgactcgccgtagctacttcaatacatttggtggaaattctgtgtctactacagctggtctcgctgttctgaatgtgattgagaaagagaagcttcaggaaaatgctgcaatggttggatcctatctgaaagaaaaactcacacagctgaaagaaaaacacgagattatcggggatgtccggggaagaggactgatgcttggagtggagctggtgagtgatcgcaagcttaagactcctgcaaccgccgagactctgcacattatggatcaaatgaaagaattgggtgtgttgattggaaaaggaggctactttggaaatgtctttagaatcacaccacctctctgcttcaccaaggacgatgcagattttctcgtggaagcgatggactactcaatgtcgaagatgtgaagaaatggaaaatgatagatgatggttttatgaaatatggtttactaagttgtggtgaagaatgcttgtaattatgctatgaacgactacaagattgatgagccaacatctcgttgcttctcaatcactatgttttcttaatgttcacaactttgcttgtgtcaaaataaagtcacatcatt

SEQ ID NO: 42440 - protein, 506 aa, Arabidopsis thaliana
  peptide (1)..(506): Ceres Seq. ID no. 12395037
PSKQCRRSLSLSPQNIIGEKKQRHETEKTMQRFAAKRSVQNISVSLWRRCISSTSQAATASVKDSDEFQARLPPFAYTPPPYTGPSADVILSKRKEFLSPSMFCLYRKPLNIVDGKMQYLFDESGRRYLDAFAGIAVVNCGHCHPDVVEPVINQIKRLQHPTVLYLNHAIADFSEALASKLPGDLKVVFFTNSGTEANELALMMAKLYTGCQDIVAVRNGYHGNAAATMGATGQSMWKFNVVQNSVHHALNPDPYRGVFGSDGEKYAKDLQDLIQYGTTGHIAGFICEAIQGVGGIVELAPGYLSAAYDTVKKAGGLFIADEVQSGFARTGNFWGFEAHNVVPDIVTMAKGIGNGFPLGAVVTTPEIAGVLTRRSYFNTFGGNSVSTTAGLAVLNVIEKEKLQENAAMVGSYLKEKLTQLKEKHEIIGDVRGRGLMLGVELVSDRKLKTPATAETLHIMDQMKELGVLIGKGGYFGNVFRITPPLCFTKDDADFLVEAMDYSMSKM

SEQ ID NO: 42441 - protein, 477 aa, Arabidopsis thaliana
  peptide (1)..(477): Ceres Seq. ID no. 12395038
MQRFAAKRSVQNISVSLWRRCISSTSQAATASVKDSDEFQARLPPFAYTPPPYTGPSADVILSKRKEFLSPSMFCLYRKPLNIVDGKMQYLFDESGRRYLDAFAGIAVVNCGHCHPDVVEPVINQIKRLQHPTVLYLNHAIADFSEALASKLPGDLKVVFFTNSGTEANELALMMAKLYTGCQDIVAVRNGYHGNAAATMGATGQSMWKFNVVQNSVHHALNPDPYRGVFGSDGEKYAKDLQDLIQYGTTGHIAGFICEAIQGVGGIVELAPGYLSAAYDTVKKAGGLFIADEVQSGFARTGNFWGFEAHNVVPDIVTMAKGIGNGFPLGAVVTTPEIAGVLTRRSYFNTFGGNSVSTTAGLAVLNVIEKEKLQENAAMVGSYLKEKLTQLKEKHEIIGDVRGRGLMLGVELVSDRKLKTPATAETLHIMDQMKELGVLIGKGGYFGNVFRITPPLCFTKDDADFLVEAMDYSMSKM

SEQ ID NO: 42442 - protein, 405 aa, Arabidopsis thaliana
  peptide (1)..(405): Ceres Seq. ID no. 12395039
MFCLYRKPLNIVDGKMQYLFDESGRRYLDAFAGIAVVNCGHCHPDVVEPVINQIKRLQHPTVLYLNHAIADFSEALASKLPGDLKVVFFTNSGTEANELALMMAKLYTGCQDIVAVRNGYHGNAAATMGATGQSMWKFNVVQNSVHHALNPDPYRGVFGSDGEKYAKDLQDLIQYGTTGHIAGFICEAIQGVGGIVELAPGYLSAAYDTVKKAGGLFIADEVQSGFARTGNFWGFEAHNVVPDIVTMAKGIGNGFPLGAVVTTPEIAGVLTRRSYFNTFGGNSVSTTAGLAVLNVIEKEKLQENAAMVGSYLKEKLTQLKEKHEIIGDVRGRGLMLGVELVSDRKLKTPATAETLHIMDQMKELGVLIGKGGYFGNVFRITPPLCFTKDDADFLVEAMDYSMSKM

SEQ ID NO: 42443 - DNA, 1411 bp, Arabidopsis thaliana
  misc_feature (1)..(1411): Ceres Seq. ID no. 12348683
  misc_feature (1)..(1411): Ortholog of  Ceres SEQ ID NO 13593955 as cited in SEQ ID NO 54278
  misc_feature (1)..(1411): Ortholog of  Ceres SEQ ID NO 14314092 as cited in SEQ ID NO 62788
  misc_feature (1)..(1411): Ortholog of  Ceres SEQ ID NO 13655302 as cited in SEQ ID NO 63307
  misc_feature (1)..(1411): Ortholog of  Ceres SEQ ID NO 13597380 as cited in SEQ ID NO 64054
  misc_feature (1)..(1411): Ortholog of  Ceres SEQ ID NO 12625474 as cited in SEQ ID NO 64169
  misc_feature (1)..(1411): Ortholog of  Ceres SEQ ID NO 13597502 as cited in SEQ ID NO 64681
atttctttctctctgcttctctctcttctctatttgtcctaacgacctgattgcattagacaggaacgaaaaggaatgcaaaagatgagagtttcggggtttagagttcttctcttggtttcttgtttcttctgcaaatccaaaggagctgttgttcctgcactcatcatgtttggcgactccattgttgacgttggcaacaacaataacttactcagcattgtcaaatccaactttcttccttacggtagagacttcatcaaccaaagacccaccggaagattctgcaacggaaaactcgctgtagatttctcagccgagtaccttggtttctcttcatacccacctgcattcctaagccgggaagcaagcaacaagaatatcctgatcggtgccaactttgcatcagcttcttcaggatactatgatgccacatctgttccatttggctcgatctccttaacacgacagctgagctattacagggcgtatcaaaatagagtaacgagaatgatcgggagggggaacgcgcgcatactgttctctagaggtatccacattttgagtgcgggatctagcgactttcttcagaattattacatcaatcctctactcaacatcctaaatacacctgatcagttcgctgacattctcctgagatccttctcagaattcatccagaatctgtatgaactaggagcaaggagaatcggagtgatatcgctaccgccgatgggttgcctgcctgcagctatcactcttttcggtgcaggaaacaaaagttgtgttgagagactgaacaacgacgctatcatgttcaataccaaacttgagaacacaacccggttattgatgaatagacactcaggtctcagactcgtcgcctttaatgtctaccaacctttcctggacatcatcaccaacccaactgacaatggattctttgaaacaaaaagggcatgctgcggaacagggacaatagaaacatcgttcctttgcaattctctatccttcggaacgtgtgtaaatgccactggatatgtgttttgggatggatttcatcccacagaggctgtaaacgagctgttggctggtcaactactgggtcaagggatttctctaatcaattgaattgagcttcatcccagttggattgaattcaaactgtatacctacaaatagctaccaaagttggtctctctcttctctcttttctctttctctctctctatatgtaactcacaaataagagacagattgtgtgtgcgtgtgtgtgactgaatgtagaaactaccaatctggtctgtgtcactgtgtgacgggtctataggtccaagctttgtttgagaagatcacaatctttggtattttatttttgttccgaatctacctctttaacatttctaaggtt

SEQ ID NO: 42444 - protein, 351 aa, Arabidopsis thaliana
  peptide (1)..(351): Ceres Seq. ID no. 12348684
MQKMRVSGFRVLLLVSCFFCKSKGAVVPALIMFGDSIVDVGNNNNLLSIVKSNFLPYGRDFINQRPTGRFCNGKLAVDFSAEYLGFSSYPPAFLSREASNKNILIGANFASASSGYYDATSVPFGSISLTRQLSYYRAYQNRVTRMIGRGNARILFSRGIHILSAGSSDFLQNYYINPLLNILNTPDQFADILLRSFSEFIQNLYELGARRIGVISLPPMGCLPAAITLFGAGNKSCVERLNNDAIMFNTKLENTTRLLMNRHSGLRLVAFNVYQPFLDIITNPTDNGFFETKRACCGTGTIETSFLCNSLSFGTCVNATGYVFWDGFHPTEAVNELLAGQLLGQGISLIN

SEQ ID NO: 42445 - protein, 348 aa, Arabidopsis thaliana
  peptide (1)..(348): Ceres Seq. ID no. 12348685
MRVSGFRVLLLVSCFFCKSKGAVVPALIMFGDSIVDVGNNNNLLSIVKSNFLPYGRDFINQRPTGRFCNGKLAVDFSAEYLGFSSYPPAFLSREASNKNILIGANFASASSGYYDATSVPFGSISLTRQLSYYRAYQNRVTRMIGRGNARILFSRGIHILSAGSSDFLQNYYINPLLNILNTPDQFADILLRSFSEFIQNLYELGARRIGVISLPPMGCLPAAITLFGAGNKSCVERLNNDAIMFNTKLENTTRLLMNRHSGLRLVAFNVYQPFLDIITNPTDNGFFETKRACCGTGTIETSFLCNSLSFGTCVNATGYVFWDGFHPTEAVNELLAGQLLGQGISLIN

SEQ ID NO: 42446 - protein, 320 aa, Arabidopsis thaliana
  peptide (1)..(320): Ceres Seq. ID no. 12348686
MFGDSIVDVGNNNNLLSIVKSNFLPYGRDFINQRPTGRFCNGKLAVDFSAEYLGFSSYPPAFLSREASNKNILIGANFASASSGYYDATSVPFGSISLTRQLSYYRAYQNRVTRMIGRGNARILFSRGIHILSAGSSDFLQNYYINPLLNILNTPDQFADILLRSFSEFIQNLYELGARRIGVISLPPMGCLPAAITLFGAGNKSCVERLNNDAIMFNTKLENTTRLLMNRHSGLRLVAFNVYQPFLDIITNPTDNGFFETKRACCGTGTIETSFLCNSLSFGTCVNATGYVFWDGFHPTEAVNELLAGQLLGQGISLIN

SEQ ID NO: 42447 - DNA, 1219 bp, Arabidopsis thaliana; identical to SEQ ID NO: 34888
  misc_feature (1)..(1219): Ceres Seq. ID no. 12603201
  misc_feature (1)..(1219): Ortholog of  Ceres SEQ ID NO 15168476 as cited in SEQ ID NO 60262

SEQ ID NO: 42448 - protein, 324 aa, Arabidopsis thaliana; identical to SEQ ID NO: 34889
  peptide (1)..(324): Ceres Seq. ID no. 12603202

SEQ ID NO: 42449 - protein, 225 aa, Arabidopsis thaliana; identical to SEQ ID NO: 34890
  peptide (1)..(225): Ceres Seq. ID no. 12603203

SEQ ID NO: 42450 - protein, 171 aa, Arabidopsis thaliana; identical to SEQ ID NO: 34891
  peptide (1)..(171): Ceres Seq. ID no. 12603204

SEQ ID NO: 42451 - DNA, 1128 bp, Arabidopsis thaliana
  misc_feature (1)..(1128): Ceres Seq. ID no. 12603152
  misc_feature (1)..(1128): Ortholog of  Ceres SEQ ID NO 14312711 as cited in SEQ ID NO 1401
  misc_feature (1)..(1128): Ortholog of  Ceres SEQ ID NO 13586635 as cited in SEQ ID NO 14217
  misc_feature (1)..(1128): Ortholog of  Ceres SEQ ID NO 14304198 as cited in SEQ ID NO 56479
  misc_feature (1)..(1128): Ortholog of  Ceres SEQ ID NO 14316543 as cited in SEQ ID NO 57118
  misc_feature (1)..(1128): Ortholog of  Ceres SEQ ID NO 12616285 as cited in SEQ ID NO 63483
ctctctctcacaactatcaccaacaagaatcatgacgagctctgttagagagaagaagatcaagaccaacgggatttggttaaacgttgctgagaaaggagacgaagaagggcctttggttctgttactccatggtttccctgagacatggtactcttggcgtcaccagatcgatttcttgtctagccatggttaccacgtggtcgctccagatctcagaggctacggtgactccgattctctaccgagccacgagtcttacactgtgagtcacctagtcgctgatgtcatcggtttactcgatcactacggcactactcaggcttttgtggctgggcatgactggggagcaatcataggttggtgtctatgcttgtttagaccagaccgagtcaaaggtttcataagtctctctgttccatatttcccaagagatccaaaactcaaaccttcagattttttcaaaatttttggagatggtttatacatcactcagtttcagaaacccggaagagctgaggctgcatttgccaagcatgattgtttatcggtaatgaagaagttcttgctaataacaagaacagactacttagtggctcctcctgacacagagatcatagatcatcttgagataccgtcgacgattccagattggataacagaagaagagattcaagtgtatgcggaaaagtttcaaagatctggattcactggccctttgaattactacagatccatggatatgaattgggagatattggcgccgtggcaagactccaaaatcgtcgttcctactaagtttatagcgggagacaaagatatcggatatgaaggacctaatggaacaatggagtatgtgaaaggagaggtgttcaagattgttgtgcctaatcttgagatagttgttattgaaggtggtcatcattttatccagcaggagaagtctgaacaagtctctcaagagattctctctttcttaaacaagttaagcaaaacagagtaaaatcataccgttctctgtggccttatagaagaaccatgatgctctagtcttaattaaactactaataatgtgtattcaagaacgaaacccgagtgtgatctcggcaataataatggttcttaaag

SEQ ID NO: 42452 - protein, 333 aa, Arabidopsis thaliana
  peptide (1)..(333): Ceres Seq. ID no. 12603153
SLSQLSPTRIMTSSVREKKIKTNGIWLNVAEKGDEEGPLVLLLHGFPETWYSWRHQIDFLSSHGYHVVAPDLRGYGDSDSLPSHESYTVSHLVADVIGLLDHYGTTQAFVAGHDWGAIIGWCLCLFRPDRVKGFISLSVPYFPRDPKLKPSDFFKIFGDGLYITQFQKPGRAEAAFAKHDCLSVMKKFLLITRTDYLVAPPDTEIIDHLEIPSTIPDWITEEEIQVYAEKFQRSGFTGPLNYYRSMDMNWEILAPWQDSKIVVPTKFIAGDKDIGYEGPNGTMEYVKGEVFKIVVPNLEIVVIEGGHHFIQQEKSEQVSQEILSFLNKLSKTE

SEQ ID NO: 42453 - protein, 323 aa, Arabidopsis thaliana
  peptide (1)..(323): Ceres Seq. ID no. 12603154
MTSSVREKKIKTNGIWLNVAEKGDEEGPLVLLLHGFPETWYSWRHQIDFLSSHGYHVVAPDLRGYGDSDSLPSHESYTVSHLVADVIGLLDHYGTTQAFVAGHDWGAIIGWCLCLFRPDRVKGFISLSVPYFPRDPKLKPSDFFKIFGDGLYITQFQKPGRAEAAFAKHDCLSVMKKFLLITRTDYLVAPPDTEIIDHLEIPSTIPDWITEEEIQVYAEKFQRSGFTGPLNYYRSMDMNWEILAPWQDSKIVVPTKFIAGDKDIGYEGPNGTMEYVKGEVFKIVVPNLEIVVIEGGHHFIQQEKSEQVSQEILSFLNKLSKTE

SEQ ID NO: 42454 - DNA, 1505 bp, Arabidopsis thaliana
  misc_feature (1)..(1505): Ceres Seq. ID no. 13580591
  misc_feature (1)..(1505): Ortholog of  Ceres SEQ ID NO 15177969 as cited in SEQ ID NO 58823
attaatccactgaaacaatcactattcattctctttccttaagtgtcaaactcttgaaaaaactactttgaaggaaaaaatgtctaagaagaagaaaggcagcaacaactttaagcttctctgtttcttcctgtttttgggtggtttggttcagacagatgcttcttttggagtaggaggcggcgttggagtaggaatcggcggcggcggcggtggcggtggcggtggtgtttgggttggcggtggatacaacaacggtggaaatcgtaatgctgttccaggatcatcagctccaaacagggtagcttacaatgctcttcaagtttggaaatcagccatgagagaggatccatcaaatgttctcaaaacatgggttggatcagatgtttgttcttacaaaggtgtgttctgttctggtcaatctataacctctatagatcttaaccatgcaaatctcaaaggcacacttgtcaaagacctagctttactctcagacctcaatattctccatctcaacagtaacagattctcagggcaaatcccagattctttcaaatctttagcttctcttcaagaacttgatctaagcaacaataaactctcaggtcctttccctttagtcacactctacataccaaatctggtttacctcgatctccggtttaatagtttaaccggtttcatccctgaagagcttttcaacaaacggttagacgcgattctcctcaataacaatcaattcgtcggagaaatcccaagaaacctcggaaattctccggcttcggttattaatctcgcgaataacagattttccggcgaaattccgacgagttttggtctgacgggatcgagggttaaggaagttttgcttttgaataaccagttaaccggttgtataccggaatctgttggtatgttctctgaaattgaagtctttgacgttagctacaatgcattgatgggtcatgttccagatacgatctcttgcttgtcggcgattgaaattttgaatcttgctcacaataaattctctggggaggttcctgatttggtttgttcgttgaggaatcttattaatctcactgttgcgttcaatttcttctctgggtttagctctgaatgttcttccagggttagtttcgggtttgatttcgttgggaattgtattcccgggaggaattcgcagcggccgcagccggattgttccggttattccggcggagctatgagctgttttaggattccgacgcagcctttggcttgtgctgcgataagtgttggattgagagagagtaataatcaatactacacttcatctcctccatgaaagtttctaaagttagaagcttttttttattaatggttgatgctgaatgatctatcttttttgtaacttattaattagttgattagtgaccaaattaaacgttaattcctcttctgtgtaatccaatcgttgctaatgttgttttgtaagcagaagaattttgtaaaaatctaacgtt

SEQ ID NO: 42455 - protein, 415 aa, Arabidopsis thaliana
  peptide (1)..(415): Ceres Seq. ID no. 13580592
MSKKKKGSNNFKLLCFFLFLGGLVQTDASFGVGGGVGVGIGGGGGGGGGGVWVGGGYNNGGNRNAVPGSSAPNRVAYNALQVWKSAMREDPSNVLKTWVGSDVCSYKGVFCSGQSITSIDLNHANLKGTLVKDLALLSDLNILHLNSNRFSGQIPDSFKSLASLQELDLSNNKLSGPFPLVTLYIPNLVYLDLRFNSLTGFIPEELFNKRLDAILLNNNQFVGEIPRNLGNSPASVINLANNRFSGEIPTSFGLTGSRVKEVLLLNNQLTGCIPESVGMFSEIEVFDVSYNALMGHVPDTISCLSAIEILNLAHNKFSGEVPDLVCSLRNLINLTVAFNFFSGFSSECSSRVSFGFDFVGNCIPGRNSQRPQPDCSGYSGGAMSCFRIPTQPLACAAISVGLRESNNQYYTSSPP

SEQ ID NO: 42456 - protein, 329 aa, Arabidopsis thaliana
  peptide (1)..(329): Ceres Seq. ID no. 13580593
MREDPSNVLKTWVGSDVCSYKGVFCSGQSITSIDLNHANLKGTLVKDLALLSDLNILHLNSNRFSGQIPDSFKSLASLQELDLSNNKLSGPFPLVTLYIPNLVYLDLRFNSLTGFIPEELFNKRLDAILLNNNQFVGEIPRNLGNSPASVINLANNRFSGEIPTSFGLTGSRVKEVLLLNNQLTGCIPESVGMFSEIEVFDVSYNALMGHVPDTISCLSAIEILNLAHNKFSGEVPDLVCSLRNLINLTVAFNFFSGFSSECSSRVSFGFDFVGNCIPGRNSQRPQPDCSGYSGGAMSCFRIPTQPLACAAISVGLRESNNQYYTSSPP

SEQ ID NO: 42457 - DNA, 1234 bp, Arabidopsis thaliana
  misc_feature (1)..(1234): Ceres Seq. ID no. 12336238
  misc_feature (1)..(1234): Ortholog of  Ceres SEQ ID NO 14306781 as cited in SEQ ID NO 53019
  misc_feature (1)..(1234): Ortholog of  Ceres SEQ ID NO 15177237 as cited in SEQ ID NO 53825
  misc_feature (1)..(1234): Ortholog of  Ceres SEQ ID NO 15176012 as cited in SEQ ID NO 60374
  misc_feature (1)..(1234): Ortholog of  Ceres SEQ ID NO 13598643 as cited in SEQ ID NO 64307
aaatttcgtaacaaaagaaaaaacagaacacagaatcttgttctcccaccgatcaccaccggagatatggaatcgccgattactcaaccccaaatgtttagattgcagtttcttcgtcttcttcatagtcgacgatcaccccaagttccattaatagccgattcttcaaatcctatcgagaatcctctctttcaagctgatgttccttctaccacagcaatagagtcttgtccaaaagaaaacattggtaagttaaaagatatgcttaaagaagaaaacattcatttgcacactgagagcaagggaaattacctttgcttattttaagcttgaaagagagaagtgaagaaaaaaggccagcgattgtgtttatgcatggcacaaacacaaacaaagaatggttaaggccatggcttgaagcatatgcttcgcggggatatgtagccatcggtttagactctcgttaccacggtgaacgtgctgattgcaaaactgcatatcgagatgctcttatatcatcttggagaaatggaaacactatgccttttatctttgatactgtatgggatttgatcaaactagctgaatatcttactcagagggatgatatagacccgaaaaagataggaatcaccggtatttcgctaggagggatgcatgcttggtttgctgctgcagctgacactcgctattccgtggttgtcccattaatcggtgttcagggttttagatgggcaatagagaatgatgagtgggaagcaagagtcaacagtatcaaacctttatttgaagaagcaaggattgatctcggaaagaacataatcgacaaagaactagtcgagaaggtgtggaacagaatagctcctggcctagcttcgaagtttgattcaccgtactcattaccagtgattgctccacggcctctttacatccttaacggcgcaaatgatcctcgatgtcctcttggcggactagaacttgcgttaaagagagctgaaaaggcgtataaggaaacagcttctcctggaaacttcaagttcaaagcagaagatggagttggacacgaagcgacgagtttcatgatcaaagaatcatcagactggtttgacaaattccttaaacaagaagatatgacaacttgacagattgtaatattgtgaactaataaagaagaatcatcttcttctcgttaataatgtattcactctcgcaaatcaatatcattacaaatttc

SEQ ID NO: 42458 - protein, 256 aa, Arabidopsis thaliana; identical to SEQ ID NO: 24153
  peptide (1)..(256): Ceres Seq. ID no. 12336239

SEQ ID NO: 42459 - protein, 200 aa, Arabidopsis thaliana; identical to SEQ ID NO: 36760
  peptide (1)..(200): Ceres Seq. ID no. 12336240

SEQ ID NO: 42460 - protein, 162 aa, Arabidopsis thaliana; identical to SEQ ID NO: 36761
  peptide (1)..(162): Ceres Seq. ID no. 12336241

SEQ ID NO: 42461 - DNA, 833 bp, Arabidopsis thaliana
  misc_feature (1)..(833): Ceres Seq. ID no. 12395705
  misc_feature (1)..(833): Ortholog of  Ceres SEQ ID NO 12581874 as cited in SEQ ID NO 55321
gcttcttcttcttcttcttcttctttcccactcctactctttctccctcctctgctctctcatctacttcctctgtatattcttcgcacaaaattaagttactaaatccagtttctgacaatggaaacaaaccatttatacactttgtctacacttgttgttatgctgctagtgtcagtgacaccgacagtgacatcaaaagacgaggttgtttcttgtacaatgtgttcttcatgcgacaatccatgtagtcctgtccaatcatctcctccgccaccttctcctccaccaccgtcaacccccacaaccgcatgtcctccccctccttctcctccaagctccggtggcggtagctcttactattaccctcctccttctcagtccggtggaggcagtaaataccctccaccatacggtggcggtggtcaaggttattactatcctccgccgtattcaggaaactatcctacgccgcctccgccgaatccgatcgtcccttatttcccgttttactatcatactccaccaccaggttctggctcagatcggtttatgagttcttactctattatntnngctctttttgctgtctttctctgtttagtgtgacggaaaatagtcggaaattcgccgggaaaaagacgaagaaaaagtcgaaataatgtggcagatccgtagatctataaatctttagatttctttgatcatggaaactaaatgatgttagatcttttactttcttcgatctgttttaactttttcttttgttgttgacaatttgtatttaattgttcttgattattaatatattaattactcgttattcagattcc

SEQ ID NO: 42462 - protein, 162 aa, Arabidopsis thaliana
  peptide (1)..(162): Ceres Seq. ID no. 12395706
  misc_feature (151)..(151): Xaa is any aa, unknown or other
  misc_feature (152)..(152): Xaa is any aa, unknown or other
METNHLYTLSTLVVMLLVSVTPTVTSKDEVVSCTMCSSCDNPCSPVQSSPPPPSPPPPSTPTTACPPPPSPPSSGGGSSYYYPPPSQSGGGSKYPPPYGGGGQGYYYPPPYSGNYPTPPPPNPIVPYFPFYYHTPPPGSGSDRFMSSYSIXXALFAVFLCLV

SEQ ID NO: 42463 - protein, 148 aa, Arabidopsis thaliana
  peptide (1)..(148): Ceres Seq. ID no. 12395707
  misc_feature (137)..(137): Xaa is any aa, unknown or other
  misc_feature (138)..(138): Xaa is any aa, unknown or other
MLLVSVTPTVTSKDEVVSCTMCSSCDNPCSPVQSSPPPPSPPPPSTPTTACPPPPSPPSSGGGSSYYYPPPSQSGGGSKYPPPYGGGGQGYYYPPPYSGNYPTPPPPNPIVPYFPFYYHTPPPGSGSDRFMSSYSIXXALFAVFLCLV

SEQ ID NO: 42464 - protein, 128 aa, Arabidopsis thaliana
  peptide (1)..(128): Ceres Seq. ID no. 12395708
  misc_feature (117)..(117): Xaa is any aa, unknown or other
  misc_feature (118)..(118): Xaa is any aa, unknown or other
MCSSCDNPCSPVQSSPPPPSPPPPSTPTTACPPPPSPPSSGGGSSYYYPPPSQSGGGSKYPPPYGGGGQGYYYPPPYSGNYPTPPPPNPIVPYFPFYYHTPPPGSGSDRFMSSYSIXXALFAVFLCLV

SEQ ID NO: 42465 - DNA, 1369 bp, Arabidopsis thaliana; identical to SEQ ID NO: 21457
  misc_feature (1)..(1369): Ceres Seq. ID no. 13491211
  misc_feature (1)..(1369): Ortholog of  Ceres SEQ ID NO 13648488 as cited in SEQ ID NO 20419

SEQ ID NO: 42466 - protein, 289 aa, Arabidopsis thaliana; identical to SEQ ID NO: 21458
  peptide (1)..(289): Ceres Seq. ID no. 13491212

SEQ ID NO: 42467 - protein, 179 aa, Arabidopsis thaliana; identical to SEQ ID NO: 21459
  peptide (1)..(179): Ceres Seq. ID no. 13491213

SEQ ID NO: 42468 - DNA, 1738 bp, Arabidopsis thaliana
  misc_feature (1)..(1738): Ceres Seq. ID no. 12348511
  misc_feature (1)..(1738): Ortholog of  Ceres SEQ ID NO 13502874 as cited in SEQ ID NO 66298
  misc_feature (1)..(1738): Ortholog of  Ceres SEQ ID NO 12614124 as cited in SEQ ID NO 68392
aatctcatgtctcatcttcctctttcactttgagcaattatggcagcaatgaacatcgttgactttcaaaactgcttcttttttgtcctcttaagcctcttctcacttctctgttactctctcttcttcaggaaaccaaaggaacctcgacttcactatgatttacctccgagccctccgactcttcccatcattggtcatcttcaccttcttctctctgttctagtccacagatctttacagacactctccaccaagtatgggtctattctctatcttcgcgtcttcagtttccctgtagccctcgtctcctcagcatctattgcttatgagatcttcagggaacacgacgtgaacatctcgtctcgtggtttccctcctaccgatgattccctttttgctggatctttcagcttcacctctgctccctatggagattactggaagttcatgaagaagctcctggtcacgaacttgcttggaccccaggcactcgagcggtcacgaggattccgtgcagatgagctagatctgttttacgagaacctgttggataaagcgatgaagaaggagagcgtggatatctgtgtggaggcgttgaagctcagtaacaacagcatctgcaagatgatcatggggaggagttgttcagaggagaatggtgaggcagagagagttagggctttggctacccagttagatggcttgacgaagaagatcttattggcgaacatgttgcgtgcggggtttaaaaagcttgttgtctcactgtttagaaaggaaatgatggatgtttccagcagatttgatgagctgctcgaaaggatccttgtggaacatgaagataaactggacatgcatcatcaaggtacagacttagtggacgcgttgttggcagcttgtcgggacaaaaatgcagagtataagatctctaggaaccatatcaagtcgtttttcgcggatctcttatttgcaagcactgacacctttgtgcaaacaacacagtggacagtggcggagatcattaataaccctaatgttcttgagagattgagaggagaaatcgattccgtggtcgggaaagcaaggttgattcaagaaactgatttgccaaacctcccttatttgcaagcggtggtcaaggaagggctaagactgcatccgccggggcctctctttgcaaggttctcccaagaagggtgtaggatcggagggttctatgtaccggagaaaacaacattaatgattaatgcttatgctgtgatgagagattctgattcttgggaagatcctgatgagtttaaaccagagaggtttctagcttcgtcaagatcagagcaggaaaaggagagaagagagcaagcaattaagtacattgctttcggaagcggacgaagaagctgtcctggagaaaatctagcatatatctttttaggaactgcaattggagtgatggtacagggatttgagtggagaatcaaagaagagaaagttaacatggaagaggctaatgtaggactgagcttgaccatggcttatcctcttaaggtcactcctgttcctcgaaccctagtccccttaactcagaatccactgaaccggagttcatgaatctttggtaagtaattaggtagccttgtttttacgttaccgtgtctgagtttactggtttagtttggctaatgtgtgaaaccgtaaacaattgtgttgttattcggatttatttgtggattggttc

SEQ ID NO: 42469 - protein, 523 aa, Arabidopsis thaliana
  peptide (1)..(523): Ceres Seq. ID no. 12348512
MAAMNIVDFQNCFFFVLLSLFSLLCYSLFFRKPKEPRLHYDLPPSPPTLPIIGHLHLLLSVLVHRSLQTLSTKYGSILYLRVFSFPVALVSSASIAYEIFREHDVNISSRGFPPTDDSLFAGSFSFTSAPYGDYWKFMKKLLVTNLLGPQALERSRGFRADELDLFYENLLDKAMKKESVDICVEALKLSNNSICKMIMGRSCSEENGEAERVRALATQLDGLTKKILLANMLRAGFKKLVVSLFRKEMMDVSSRFDELLERILVEHEDKLDMHHQGTDLVDALLAACRDKNAEYKISRNHIKSFFADLLFASTDTFVQTTQWTVAEIINNPNVLERLRGEIDSVVGKARLIQETDLPNLPYLQAVVKEGLRLHPPGPLFARFSQEGCRIGGFYVPEKTTLMINAYAVMRDSDSWEDPDEFKPERFLASSRSEQEKERREQAIKYIAFGSGRRSCPGENLAYIFLGTAIGVMVQGFEWRIKEEKVNMEEANVGLSLTMAYPLKVTPVPRTLVPLTQNPLNRSS

SEQ ID NO: 42470 - protein, 520 aa, Arabidopsis thaliana
  peptide (1)..(520): Ceres Seq. ID no. 12348513
MNIVDFQNCFFFVLLSLFSLLCYSLFFRKPKEPRLHYDLPPSPPTLPIIGHLHLLLSVLVHRSLQTLSTKYGSILYLRVFSFPVALVSSASIAYEIFREHDVNISSRGFPPTDDSLFAGSFSFTSAPYGDYWKFMKKLLVTNLLGPQALERSRGFRADELDLFYENLLDKAMKKESVDICVEALKLSNNSICKMIMGRSCSEENGEAERVRALATQLDGLTKKILLANMLRAGFKKLVVSLFRKEMMDVSSRFDELLERILVEHEDKLDMHHQGTDLVDALLAACRDKNAEYKISRNHIKSFFADLLFASTDTFVQTTQWTVAEIINNPNVLERLRGEIDSVVGKARLIQETDLPNLPYLQAVVKEGLRLHPPGPLFARFSQEGCRIGGFYVPEKTTLMINAYAVMRDSDSWEDPDEFKPERFLASSRSEQEKERREQAIKYIAFGSGRRSCPGENLAYIFLGTAIGVMVQGFEWRIKEEKVNMEEANVGLSLTMAYPLKVTPVPRTLVPLTQNPLNRSS

SEQ ID NO: 42471 - protein, 386 aa, Arabidopsis thaliana
  peptide (1)..(386): Ceres Seq. ID no. 12348514
MKKLLVTNLLGPQALERSRGFRADELDLFYENLLDKAMKKESVDICVEALKLSNNSICKMIMGRSCSEENGEAERVRALATQLDGLTKKILLANMLRAGFKKLVVSLFRKEMMDVSSRFDELLERILVEHEDKLDMHHQGTDLVDALLAACRDKNAEYKISRNHIKSFFADLLFASTDTFVQTTQWTVAEIINNPNVLERLRGEIDSVVGKARLIQETDLPNLPYLQAVVKEGLRLHPPGPLFARFSQEGCRIGGFYVPEKTTLMINAYAVMRDSDSWEDPDEFKPERFLASSRSEQEKERREQAIKYIAFGSGRRSCPGENLAYIFLGTAIGVMVQGFEWRIKEEKVNMEEANVGLSLTMAYPLKVTPVPRTLVPLTQNPLNRSS

SEQ ID NO: 42472 - DNA, 1460 bp, Arabidopsis thaliana
  misc_feature (1)..(1460): Ceres Seq. ID no. 12337046
  misc_feature (1)..(1460): Ortholog of  Ceres SEQ ID NO 14304823 as cited in SEQ ID NO 54902
gtgttagcttcctttacgtgtttctttcctttctctctcctctgtcacgcaagaacaataaatactatgatcacttgattttctccgacgaaattttccccagaaacaacaacagttcgagcaacaaaaccctgaactctctgtttctgttaaactcattcacaattttatgagaaattggacaaaaccctgatgtcggattccgtcaaaacgacggtggatccgcttttgaaagatttggatgggaaaaaagagagtttcaggcggaacgttgtgtctatggcagctgagttaaagcaagtgagaggtcgtttggtttctcaagaacaattctttgttaaagaaagcttttgtagaaaagaagcagagaagaaagctaagaacatggaaatggagatctgtaaattgcagaagaagttggaagatagaaattgtgaacttgtagcttcaacttctgctgctgaaaagtttctagaagaagtggacgatctgagatcacagctagctttaacaaaggacattgcagaaacaagtgctgcttctgctcaatccgcacagcttcaatgctcagtgctaacagaacaacttgacgacaaaacacgttctctaagaaacacgaagaccgtgtaactcatctcggtcaccagcttgataatcttcagagagatttgaagacaagagaatgttctcaaaaacagctgagagaggaagttatgagaatcgagcgtgagataactgaagctgttgcaaagtctgggaaaggcacagaatgtgagctcaggaaacttcttgaagaggtttctccaaagaactttgagagaatgaacatgttattggcggtaaaagacgaagagattgcaaagttaaaagatgatgtgaagttaatgtcagctcattggaaactcaaaactaaggaacttgaatctcagttggagagacaaagaagagcagatcaagagttgaagaagaaggtactgaaactagagttttgcctgcaagaagctcgtagtcagacaagaaagctacagagggcgggggagagacgagacaaggcaatcaaagagctaagtgatcagattactggaaaacagttgaatgaatcggtttcaggggagaaacaaaacttctgggatacttcagggttcaagatcgttgtgtcaatgtcgatgttgatattagttattatctccaaaagatgagttcttttgtcttgaactctctttctttttgttggtgtgtaaatgcagtagttgcagatagtagtcagataatggtgcatattattactccttgaggtttagcgaagagaaatcttgcttccctttgttaagttataagtttgttcatgtgtatttgaatcatttctcaaaaagaaaatgggaaaaatgtcattcaaataatcagtttaccattttcgttggttttaaacataaattttggacctggtgatttaaatcctc

SEQ ID NO: 42473 - protein, 161 aa, Arabidopsis thaliana
  peptide (1)..(161): Ceres Seq. ID no. 12337047
MRIEREITEAVAKSGKGTECELRKLLEEVSPKNFERMNMLLAVKDEEIAKLKDDVKLMSAHWKLKTKELESQLERQRRADQELKKKVLKLEFCLQEARSQTRKLQRAGERRDKAIKELSDQITGKQLNESVSGEKQNFWDTSGFKIVVSMSMLILVIISKR

SEQ ID NO: 42474 - protein, 145 aa, Arabidopsis thaliana
  peptide (1)..(145): Ceres Seq. ID no. 12337048
MSDSVKTTVDPLLKDLDGKKESFRRNVVSMAAELKQVRGRLVSQEQFFVKESFCRKEAEKKAKNMEMEICKLQKKLEDRNCELVASTSAAEKFLEEVDDLRSQLALTKDIAETSAASAQSAQLQCSVLTEQLDDKTRSLRNTKTV

SEQ ID NO: 42475 - protein, 125 aa, Arabidopsis thaliana
  peptide (1)..(125): Ceres Seq. ID no. 12337049
MNMLLAVKDEEIAKLKDDVKLMSAHWKLKTKELESQLERQRRADQELKKKVLKLEFCLQEARSQTRKLQRAGERRDKAIKELSDQITGKQLNESVSGEKQNFWDTSGFKIVVSMSMLILVIISKR

SEQ ID NO: 42476 - DNA, 1263 bp, Arabidopsis thaliana; identical to SEQ ID NO: 29293
  misc_feature (1)..(1263): Ceres Seq. ID no. 12324797
  misc_feature (1)..(1263): Ortholog of  Ceres SEQ ID NO 14306617 as cited in SEQ ID NO 53026

SEQ ID NO: 42477 - protein, 246 aa, Arabidopsis thaliana; identical to SEQ ID NO: 29294
  peptide (1)..(246): Ceres Seq. ID no. 12324798

SEQ ID NO: 42478 - protein, 240 aa, Arabidopsis thaliana; identical to SEQ ID NO: 29295
  peptide (1)..(240): Ceres Seq. ID no. 12324799

SEQ ID NO: 42479 - protein, 160 aa, Arabidopsis thaliana; identical to SEQ ID NO: 29296
  peptide (1)..(160): Ceres Seq. ID no. 12324800

SEQ ID NO: 42480 - DNA, 1329 bp, Arabidopsis thaliana
  misc_feature (1)..(1329): Ceres Seq. ID no. 12377456
  misc_feature (1)..(1329): Ortholog of  Ceres SEQ ID NO 13582281 as cited in SEQ ID NO 51014
  misc_feature (1)..(1329): Ortholog of  Ceres SEQ ID NO 14315606 as cited in SEQ ID NO 53515
  misc_feature (1)..(1329): Ortholog of  Ceres SEQ ID NO 15176795 as cited in SEQ ID NO 54453
  misc_feature (1)..(1329): Ortholog of  Ceres SEQ ID NO 14310508 as cited in SEQ ID NO 58965
  misc_feature (1)..(1329): Ortholog of  Ceres SEQ ID NO 12617417 as cited in SEQ ID NO 65089
atggagccaaagtttcatgcttttatgtttccatggtttgcttttggtcatatgattccatttctacatcttgcaaacaaactagctgaaaaaggtcaccgagttactttcttgctacctaagaaagcacaaaaacagttggaacatcacaacttgttcccagacagtattgtctttcaccctctcacagttcctcctgtcaatggcctccctgctggtgccgagacaacctcggatatccccatctcgttggacaacctcttgtccaaagccttggatctcactcgcgatcaggttgaagctgcggttcgtgctttgagacctgacttgatctttttcgattttgctcaatggattccagatatggctaaagaacatatgatcaagagtgtgagttacatcattgtatctgcgacaacaatagctcatacacatgtccctggaggtaaattaggtgttcgcccaccgggttatccgtcatcaaaggtgatgttccgtgaaaacgatgttcatgccttagcaaccttatcgatattttacaagagactgtatcatcagatcactacaggtcttaagagctgtgatgtcattgcattgaggacttgcaaagaagtcgaaggtatgttctgcgactttatatcgcgtcaataccataagaaggttctcttgactggtccaatgttccctgagccagacacaagtaaaccactagaagaacgctggaatcattttctaagcgggttcgcgccgaagtcagtagtgttttgttcacctggcagccaagtaattcttgagaaagatcaattccaagaactctgtttagggatggagctaacaggtttaccatttcttttagcggtaaagccaccaagaggatcatcaacggtccaagaagggttaccagaagggttcgaggagcgggtgaaagatcgtggtgttgtttggggaggatgggtgcaacaacctttgatattggctcatccatcaataggttgctttgtgaaccattgtggtcccggaacaatatgggagtctttggtgagtgattgccaaatggttttgattccatttttaagtgatcaagttctcttcacaagattgatgaccgaggaattcgaggtctctgtagaagtgccgagggaaaaaacaggatggttttcaaaggagagcttgagcaatgctatcaaatctgtgatggataaagacagtgacattgggaagttagtgaggagtaaccacaccaaattgaaggagattttagttagtcctggattattgactggttacgttgatcactttgtagagggattgcaagagaatttgatttga

SEQ ID NO: 42481 - protein, 442 aa, Arabidopsis thaliana
  peptide (1)..(442): Ceres Seq. ID no. 12377457
MEPKFHAFMFPWFAFGHMIPFLHLANKLAEKGHRVTFLLPKKAQKQLEHHNLFPDSIVFHPLTVPPVNGLPAGAETTSDIPISLDNLLSKALDLTRDQVEAAVRALRPDLIFFDFAQWIPDMAKEHMIKSVSYIIVSATTIAHTHVPGGKLGVRPPGYPSSKVMFRENDVHALATLSIFYKRLYHQITTGLKSCDVIALRTCKEVEGMFCDFISRQYHKKVLLTGPMFPEPDTSKPLEERWNHFLSGFAPKSVVFCSPGSQVILEKDQFQELCLGMELTGLPFLLAVKPPRGSSTVQEGLPEGFEERVKDRGVVWGGWVQQPLILAHPSIGCFVNHCGPGTIWESLVSDCQMVLIPFLSDQVLFTRLMTEEFEVSVEVPREKTGWFSKESLSNAIKSVMDKDSDIGKLVRSNHTKLKEILVSPGLLTGYVDHFVEGLQENLI

SEQ ID NO: 42482 - protein, 434 aa, Arabidopsis thaliana
  peptide (1)..(434): Ceres Seq. ID no. 12377458
MFPWFAFGHMIPFLHLANKLAEKGHRVTFLLPKKAQKQLEHHNLFPDSIVFHPLTVPPVNGLPAGAETTSDIPISLDNLLSKALDLTRDQVEAAVRALRPDLIFFDFAQWIPDMAKEHMIKSVSYIIVSATTIAHTHVPGGKLGVRPPGYPSSKVMFRENDVHALATLSIFYKRLYHQITTGLKSCDVIALRTCKEVEGMFCDFISRQYHKKVLLTGPMFPEPDTSKPLEERWNHFLSGFAPKSVVFCSPGSQVILEKDQFQELCLGMELTGLPFLLAVKPPRGSSTVQEGLPEGFEERVKDRGVVWGGWVQQPLILAHPSIGCFVNHCGPGTIWESLVSDCQMVLIPFLSDQVLFTRLMTEEFEVSVEVPREKTGWFSKESLSNAIKSVMDKDSDIGKLVRSNHTKLKEILVSPGLLTGYVDHFVEGLQENLI

SEQ ID NO: 42483 - protein, 425 aa, Arabidopsis thaliana
  peptide (1)..(425): Ceres Seq. ID no. 12377459
MIPFLHLANKLAEKGHRVTFLLPKKAQKQLEHHNLFPDSIVFHPLTVPPVNGLPAGAETTSDIPISLDNLLSKALDLTRDQVEAAVRALRPDLIFFDFAQWIPDMAKEHMIKSVSYIIVSATTIAHTHVPGGKLGVRPPGYPSSKVMFRENDVHALATLSIFYKRLYHQITTGLKSCDVIALRTCKEVEGMFCDFISRQYHKKVLLTGPMFPEPDTSKPLEERWNHFLSGFAPKSVVFCSPGSQVILEKDQFQELCLGMELTGLPFLLAVKPPRGSSTVQEGLPEGFEERVKDRGVVWGGWVQQPLILAHPSIGCFVNHCGPGTIWESLVSDCQMVLIPFLSDQVLFTRLMTEEFEVSVEVPREKTGWFSKESLSNAIKSVMDKDSDIGKLVRSNHTKLKEILVSPGLLTGYVDHFVEGLQENLI

SEQ ID NO: 42484 - DNA, 1611 bp, Arabidopsis thaliana
  misc_feature (1)..(1611): Ceres Seq. ID no. 12385024
  misc_feature (1)..(1611): Ortholog of  Ceres SEQ ID NO 14315110 as cited in SEQ ID NO 55462
  misc_feature (1)..(1611): Ortholog of  Ceres SEQ ID NO 13596853 as cited in SEQ ID NO 62978
acaagagccatttgcaattaggcataatatatgtcctaactcaccaaccccctcaaaattgccaccaacttcaaatttctctcctttaaacctttctcaatcatctttcttctgccttggaatcctgatcatggcgtcgtcttctctcacttcgaaatccattctcggatccaccaaactcggttcttcttctcttccctcggagctccgtcgtctctcttctcccgccgttcagatctctctccgtacccaaaccaggaagaacttccagatacaagctactggaagttcatatgggactcattttcgagtttcaacttttggagaatcacatggaggaggagttggttgtatcattgatggttgtcctcctcgtattccacttactgaatctgatttgcaattcgatctcgatagaaggaggcctggtcagagcaggatcacaactcctagaaaagagactgatacttgccggatatcgtctggagtctctgaaggaatgacgacaggaacacctatccatgtgtttgtaccaaacacagatcagagaggacttgattacagtgaaatgtcggttgcctatagaccatcgcatgctgatgcaacttatgacatgaagtatggtgtcagatcagtgcagggtggaggaagatcttcagctagagagaccattggaagagttgctcctggagctttggccaagaaaattttgaagcaatttgcaggaactgagattcttgcctatgtctcgcaagttcaccatgttgtacttccagaagaattggtagaccacgagaatttaacactcgaacagatagaaaataacattgtcagatgccctaatcccgagtatgcggaaaagatgatagctgcgattgatgctgtcaggacaaaagggaactctgttggtggtgttgtgacctgcattgttcggaatgctccacgtgggcttggtacaccggttttcgataaacttgaagcagaactggcaaaagcttgtatgtcgctacctgcaactaagggatttgagtttggaagcggctttgcaggtacctttttgactggtcttgaacacaatgatgagttctataccgatgaaaatggaagaatacgtaccagaaccaaccgatctggtggaattcagggagggatctcaaatggtgaaataataaacatgagagtagccttcaagccaacatcaacaattggaaggaagcaaaatacggtaaccagagacaaggtagaaaccgaaatgattgcgcgtggtcgtcatgatccttgtgttgttccacgagctgtgccaatggtggaagcaatggtggctctagttcttgtggatcaattgatggcgcaatacgcacaatgccatttgtttccaataaatccagagttgcaggaacctctccagatagagcagccgcaaaatgctactgctttgtaagcaaatctcgagaagataaagagtcatagagagtgagagttcgcttttgttgtgtgattattatgctgaataaaaaaatgttaattttgtgcccaccagaaaaacaaagaacatgattttttataagaggatttgcttctatatcattcagctaaatgtgattttaccac

SEQ ID NO: 42485 - protein, 479 aa, Arabidopsis thaliana
  peptide (1)..(479): Ceres Seq. ID no. 12385025
QEPFAIRHNICPNSPTPSKLPPTSNFSPLNLSQSSFFCLGILIMASSSLTSKSILGSTKLGSSSLPSELRRLSSPAVQISLRTQTRKNFQIQATGSSYGTHFRVSTFGESHGGGVGCIIDGCPPRIPLTESDLQFDLDRRRPGQSRITTPRKETDTCRISSGVSEGMTTGTPIHVFVPNTDQRGLDYSEMSVAYRPSHADATYDMKYGVRSVQGGGRSSARETIGRVAPGALAKKILKQFAGTEILAYVSQVHHVVLPEELVDHENLTLEQIENNIVRCPNPEYAEKMIAAIDAVRTKGNSVGGVVTCIVRNAPRGLGTPVFDKLEAELAKACMSLPATKGFEFGSGFAGTFLTGLEHNDEFYTDENGRIRTRTNRSGGIQGGISNGEIINMRVAFKPTSTIGRKQNTVTRDKVETEMIARGRHDPCVVPRAVPMVEAMVALVLVDQLMAQYAQCHLFPINPELQEPLQIEQPQNATAL

SEQ ID NO: 42486 - protein, 436 aa, Arabidopsis thaliana
  peptide (1)..(436): Ceres Seq. ID no. 12385026
MASSSLTSKSILGSTKLGSSSLPSELRRLSSPAVQISLRTQTRKNFQIQATGSSYGTHFRVSTFGESHGGGVGCIIDGCPPRIPLTESDLQFDLDRRRPGQSRITTPRKETDTCRISSGVSEGMTTGTPIHVFVPNTDQRGLDYSEMSVAYRPSHADATYDMKYGVRSVQGGGRSSARETIGRVAPGALAKKILKQFAGTEILAYVSQVHHVVLPEELVDHENLTLEQIENNIVRCPNPEYAEKMIAAIDAVRTKGNSVGGVVTCIVRNAPRGLGTPVFDKLEAELAKACMSLPATKGFEFGSGFAGTFLTGLEHNDEFYTDENGRIRTRTNRSGGIQGGISNGEIINMRVAFKPTSTIGRKQNTVTRDKVETEMIARGRHDPCVVPRAVPMVEAMVALVLVDQLMAQYAQCHLFPINPELQEPLQIEQPQNATAL

SEQ ID NO: 42487 - protein, 313 aa, Arabidopsis thaliana
  peptide (1)..(313): Ceres Seq. ID no. 12385027
MTTGTPIHVFVPNTDQRGLDYSEMSVAYRPSHADATYDMKYGVRSVQGGGRSSARETIGRVAPGALAKKILKQFAGTEILAYVSQVHHVVLPEELVDHENLTLEQIENNIVRCPNPEYAEKMIAAIDAVRTKGNSVGGVVTCIVRNAPRGLGTPVFDKLEAELAKACMSLPATKGFEFGSGFAGTFLTGLEHNDEFYTDENGRIRTRTNRSGGIQGGISNGEIINMRVAFKPTSTIGRKQNTVTRDKVETEMIARGRHDPCVVPRAVPMVEAMVALVLVDQLMAQYAQCHLFPINPELQEPLQIEQPQNATAL

SEQ ID NO: 42488 - DNA, 1596 bp, Arabidopsis thaliana
  misc_feature (1)..(1596): Ceres Seq. ID no. 12331061
  misc_feature (1)..(1596): Ortholog of  Ceres SEQ ID NO 14311032 as cited in SEQ ID NO 54590
  misc_feature (1)..(1596): Ortholog of  Ceres SEQ ID NO 15170493 as cited in SEQ ID NO 58432
ctcttgttttctttttccctcttctccaaggaatctggaaaaaattaaaccttttttctaaatccctggaaatcagaaaacttcctattgagaaaccatagattcgatccaagcctttgattgtatcaaaatctctgcttcaccaagaatttgggttgatacagaagaaaaaagttaaatggttgaggcagagcgcgcggagaatagttggattgcttcggaaacgtctccgtcgtcgtctccggtggtaatagaaagcagtgatttttcgataactgatggaatgagagatgtgagcggatttggtatagcttctcgacctcagttggacaagggtttgtcggaaaacaatatagggttcacggaaagagttttctctgccgccggagctgcggttttgtccgccgttactctaaatcctcttgacgttgtcaagactcgattgcaagctcaagccgccggaatgtcgtactctcacccactcagtaactccattggacgcatggcattttttggcccaaacatgatgtttgcagacttgagatgttctccttcatgtgcacgcgctggtgttgaaggtactgtttctatttgcccaccggattgtttccagtacaaaggaacatttgatgtcttcaccaagatcatacgacaggagggtctgggacgcctttggagagggactaatgctggtcttgccctagctgtgcccatggttgggatatatctcccattctatgatatgttccgcaaccggttggaagaattatctcgggagaaagctcctgctatgacattttgtgtgcctactgtggcagggtctttagcgcggtccttagcttgtacagtctgctatcctattgatcttgcaagaacgcgtatgcaggcattcaaagaagcaaaagccggtgtgaagcctccgggagtttttaaaactctagttggtgttttctctgaagtcaggacagcaaataaccttgaaagtagcttgcacaactatcgtggtctctggagaggcttgggtgcacagcttgcccgtgatgttccattctcagcaatctgctggtcgaccctcgagccaataaaaaagaggctccttggagttgcgggcaatgatacaaatcttgttggtgttttcggtgcaaccttttctgctggatttatagctggaagtatcgctgctgctgctacttgtcctcttgacgttgcaagaacaagaagacagatagagaaggaccctggtagggcattgatgatgacgacacgacagacactaatagaggtttggagggatggagggatgagaggactgttcatgggaatgggtccacgagtggcacgtgcaggaccatcggtagggatagtggtttccttctacgaagtggtcaagtatgttctgcatcgccatgcttcatcatgaccctgcaaagtcactaatctcctaaacatggatctgtggatacggctttaggttgtagcttcttttttcaagttaacagaataagttaaacaggctcaatgctccagaaacccgagtttcctctgtttatgagccttaattttgtccagttattaaataccggctgtttttaatgt

SEQ ID NO: 42489 - protein, 413 aa, Arabidopsis thaliana
  peptide (1)..(413): Ceres Seq. ID no. 12331062
MVEAERAENSWIASETSPSSSPVVIESSDFSITDGMRDVSGFGIASRPQLDKGLSENNIGFTERVFSAAGAAVLSAVTLNPLDVVKTRLQAQAAGMSYSHPLSNSIGRMAFFGPNMMFADLRCSPSCARAGVEGTVSICPPDCFQYKGTFDVFTKIIRQEGLGRLWRGTNAGLALAVPMVGIYLPFYDMFRNRLEELSREKAPAMTFCVPTVAGSLARSLACTVCYPIDLARTRMQAFKEAKAGVKPPGVFKTLVGVFSEVRTANNLESSLHNYRGLWRGLGAQLARDVPFSAICWSTLEPIKKRLLGVAGNDTNLVGVFGATFSAGFIAGSIAAAATCPLDVARTRRQIEKDPGRALMMTTRQTLIEVWRDGGMRGLFMGMGPRVARAGPSVGIVVSFYEVVKYVLHRHASS

SEQ ID NO: 42490 - protein, 378 aa, Arabidopsis thaliana
  peptide (1)..(378): Ceres Seq. ID no. 12331063
MRDVSGFGIASRPQLDKGLSENNIGFTERVFSAAGAAVLSAVTLNPLDVVKTRLQAQAAGMSYSHPLSNSIGRMAFFGPNMMFADLRCSPSCARAGVEGTVSICPPDCFQYKGTFDVFTKIIRQEGLGRLWRGTNAGLALAVPMVGIYLPFYDMFRNRLEELSREKAPAMTFCVPTVAGSLARSLACTVCYPIDLARTRMQAFKEAKAGVKPPGVFKTLVGVFSEVRTANNLESSLHNYRGLWRGLGAQLARDVPFSAICWSTLEPIKKRLLGVAGNDTNLVGVFGATFSAGFIAGSIAAAATCPLDVARTRRQIEKDPGRALMMTTRQTLIEVWRDGGMRGLFMGMGPRVARAGPSVGIVVSFYEVVKYVLHRHASS

SEQ ID NO: 42491 - protein, 318 aa, Arabidopsis thaliana
  peptide (1)..(318): Ceres Seq. ID no. 12331064
MSYSHPLSNSIGRMAFFGPNMMFADLRCSPSCARAGVEGTVSICPPDCFQYKGTFDVFTKIIRQEGLGRLWRGTNAGLALAVPMVGIYLPFYDMFRNRLEELSREKAPAMTFCVPTVAGSLARSLACTVCYPIDLARTRMQAFKEAKAGVKPPGVFKTLVGVFSEVRTANNLESSLHNYRGLWRGLGAQLARDVPFSAICWSTLEPIKKRLLGVAGNDTNLVGVFGATFSAGFIAGSIAAAATCPLDVARTRRQIEKDPGRALMMTTRQTLIEVWRDGGMRGLFMGMGPRVARAGPSVGIVVSFYEVVKYVLHRHASS

SEQ ID NO: 42492 - DNA, 1145 bp, Arabidopsis thaliana
  misc_feature (1)..(1145): Ceres Seq. ID no. 13592814
  misc_feature (1)..(1145): Ortholog of  Ceres SEQ ID NO 15179873 as cited in SEQ ID NO 66846
agaacatcctaatcgaaaaaattttgggtggaatgtttacaaaaacttcttcgatcgaacacatactagagagattcaaagctctccttcgtagattcgtgtattgtacagatttgtagagaacgagagagagaggagaacaaaatggtaggcgaagaggagacgaagaagagagtagtcactgaatcgctaggatggttaacggaatcttcgattatgccaaagaagcatcgcgccatcgaaggtgttggtccttcctcaatcatggagcttaaagctcagctctataagtctcaggaagaagctaaacagacgaaggattttacgggatccgatgctcaataccatcgcgccaaggaaaggattgccgccaaagattctttcgccgcgaaaaactccggcgtcgagagtcgcaatttaaaggacaagcttgagcacaaagctgtaaaagatggagcagttagttatgccgcattggagaaaaaggctcagttgtatgataaacttgctagaggagagctttctgatgaagaaggtgaagagaagtactgtgttgacttctttaggaaaggaattcaacatgaagatccaaaaccatcaagcacttacaacagttccatttcagcaccacctgaagatttcaagcaagatggtgaagatgatggttctctttttagcaccaaatttgctggacttggacatgcaattgggacagctgatgtaggtcaacacgtgcgcatggtcagggaggttcatgaggaagtcaatcaagcgagagaaaaggcaaccgagttaaagcaaaggagacaagagcaagcaacaaatcgtcgggagaaactcaaacaagcttatcttcggaagcagctcgagaaactaaaggctcaacaacaacaacaagaagatgaacaaaaaacttgattttcgctccccaagctattgcattttgagttgcggcctgaacgcagagaagacaatgacagagttgtccaccgaacccgaatgagtaatatggctgcaacaagaacacgtaagccatcattaagggatgaagctgtatccatatgctcttaaaagcgatttatgtactgtggattgttgtcaatcaacagattctatacaaagttaccaatatatagataatcctt

SEQ ID NO: 42493 - protein, 257 aa, Arabidopsis thaliana
  peptide (1)..(257): Ceres Seq. ID no. 13592815
MVGEEETKKRVVTESLGWLTESSIMPKKHRAIEGVGPSSIMELKAQLYKSQEEAKQTKDFTGSDAQYHRAKERIAAKDSFAAKNSGVESRNLKDKLEHKAVKDGAVSYAALEKKAQLYDKLARGELSDEEGEEKYCVDFFRKGIQHEDPKPSSTYNSSISAPPEDFKQDGEDDGSLFSTKFAGLGHAIGTADVGQHVRMVREVHEEVNQAREKATELKQRRQEQATNRREKLKQAYLRKQLEKLKAQQQQQEDEQKT

SEQ ID NO: 42494 - protein, 233 aa, Arabidopsis thaliana
  peptide (1)..(233): Ceres Seq. ID no. 13592816
MPKKHRAIEGVGPSSIMELKAQLYKSQEEAKQTKDFTGSDAQYHRAKERIAAKDSFAAKNSGVESRNLKDKLEHKAVKDGAVSYAALEKKAQLYDKLARGELSDEEGEEKYCVDFFRKGIQHEDPKPSSTYNSSISAPPEDFKQDGEDDGSLFSTKFAGLGHAIGTADVGQHVRMVREVHEEVNQAREKATELKQRRQEQATNRREKLKQAYLRKQLEKLKAQQQQQEDEQKT

SEQ ID NO: 42495 - protein, 217 aa, Arabidopsis thaliana
  peptide (1)..(217): Ceres Seq. ID no. 13592817
MELKAQLYKSQEEAKQTKDFTGSDAQYHRAKERIAAKDSFAAKNSGVESRNLKDKLEHKAVKDGAVSYAALEKKAQLYDKLARGELSDEEGEEKYCVDFFRKGIQHEDPKPSSTYNSSISAPPEDFKQDGEDDGSLFSTKFAGLGHAIGTADVGQHVRMVREVHEEVNQAREKATELKQRRQEQATNRREKLKQAYLRKQLEKLKAQQQQQEDEQKT

SEQ ID NO: 42496 - DNA, 888 bp, Arabidopsis thaliana
  misc_feature (1)..(888): Ceres Seq. ID no. 13645955
  misc_feature (1)..(888): Ortholog of  Ceres SEQ ID NO 15179055 as cited in SEQ ID NO 0
aaaccggttctgttctcgctggctcggccaccgcttttcaacagaacaatctgtctctttctctgcctcactctctcactcactcaccggagcaaagtgatgtcggtgtgttcttcgtcttcttcttctcagaaaacatggattgttaacgggatcttggccggaacagcgattgcagccgcaatcggcgcacgtgcttatctgggtcgatccaagaaattccggagccgggtcgtcggaatcattcccgcacgttacgcttcctctcgattcgagggtaagcctctcgtgcaaatcctcggcaaacccatgatccagagaacttgggagaggtcgaagttagctactacgcttgatcatattgttgtagccactgatgatgaaagaatcgcggagtgttgtcgtggatttggtgccgatgttatcatgacttcagagtcttgcagaaatggcactgagaggtgcaacgaagcgctagaaaagctggagaagaagtatgatgtcgttgttaacattcaaggagatgaaccacttattgagcctgagattatagacggtgtagtcaaagcacttcaggtaacaccggatgcagtgtttagcacagcggtgacatcattgaaaccagaagacgggcttgatcctaaccgagttaaatgtgtggtggacaatcgtggctatgctatctatttctcaaggggtttgattccttataacaagagtggtaaagtcaatccagattttccgtacatgcttcatcttggaattcagagctttgattcgaagtttctgaaggtatattcagagcttcaaccaacgccattgcagcaagaagaggatctagaacagctcaaagttcttgagaatggctacaaaatgaaggtaatgtaa

SEQ ID NO: 42497 - protein, 295 aa, Arabidopsis thaliana
  peptide (1)..(295): Ceres Seq. ID no. 13645956
KPVLFSLARPPLFNRTICLFLCLTLSLTHRSKVMSVCSSSSSSQKTWIVNGILAGTAIAAAIGARAYLGRSKKFRSRVVGIIPARYASSRFEGKPLVQILGKPMIQRTWERSKLATTLDHIVVATDDERIAECCRGFGADVIMTSESCRNGTERCNEALEKLEKKYDVVVNIQGDEPLIEPEIIDGVVKALQVTPDAVFSTAVTSLKPEDGLDPNRVKCVVDNRGYAIYFSRGLIPYNKSGKVNPDFPYMLHLGIQSFDSKFLKVYSELQPTPLQQEEDLEQLKVLENGYKMKVM

SEQ ID NO: 42498 - protein, 262 aa, Arabidopsis thaliana
  peptide (1)..(262): Ceres Seq. ID no. 13645957
MSVCSSSSSSQKTWIVNGILAGTAIAAAIGARAYLGRSKKFRSRVVGIIPARYASSRFEGKPLVQILGKPMIQRTWERSKLATTLDHIVVATDDERIAECCRGFGADVIMTSESCRNGTERCNEALEKLEKKYDVVVNIQGDEPLIEPEIIDGVVKALQVTPDAVFSTAVTSLKPEDGLDPNRVKCVVDNRGYAIYFSRGLIPYNKSGKVNPDFPYMLHLGIQSFDSKFLKVYSELQPTPLQQEEDLEQLKVLENGYKMKVM

SEQ ID NO: 42499 - protein, 192 aa, Arabidopsis thaliana
  peptide (1)..(192): Ceres Seq. ID no. 13645958
MIQRTWERSKLATTLDHIVVATDDERIAECCRGFGADVIMTSESCRNGTERCNEALEKLEKKYDVVVNIQGDEPLIEPEIIDGVVKALQVTPDAVFSTAVTSLKPEDGLDPNRVKCVVDNRGYAIYFSRGLIPYNKSGKVNPDFPYMLHLGIQSFDSKFLKVYSELQPTPLQQEEDLEQLKVLENGYKMKVM

SEQ ID NO: 42500 - DNA, 1333 bp, Arabidopsis thaliana
  misc_feature (1)..(1333): Ceres Seq. ID no. 13489617
  misc_feature (1)..(1333): Ortholog of  Ceres SEQ ID NO 14314869 as cited in SEQ ID NO 58320
ggttagtttagtttccactgagcttgctttcttccatggcgatgataaataattcttcttcttcctcacacacaatttcactttccgattttataaaattgattcttctcttcttcttaaacccatgaagagttcatgatttcttaagctcgcagcataatcgatggcgaatttgagtttgagcttgtatctaatcctccggatttacgctcttttgttgctgttcaatgtctccttcgctaaaacacttaaacgagacatgaaagctttgaatgagataaagaaattggtgggatggagattggtatactcttgggttggagatgatccttgtggcgatggagttttgcctccgtggtctggagttacttgctctaaagttggcgattatcgtgtcgtcgtcaagctagaagtgtattcaatgtcgatagttgggaatttcccaaaggctataacgaagctcttagatctcactgttttggatatgcataataacaaattaacaggtcctattcctccagaaattgggcggcttaagcggcttatcacactgaatttgaggtggaacaaacttcaacaggcactgcctcctgaaattggtggattgaagagtctaacttatctgtacctgagttttaacaatttcaaaggagaaatccccaaagaacttgcaaatctccatgagctccagtacttacatattcaggagaatcattttactgggcgaattccagcagagctgggaacattacaaaaacttcgccacttggatgctggcaacaataacttagtggggagtataagcgatctttttcgcattgaaggatgctttccagctcttagaaacctgtttttaaacaataattacttgactggaggactcccaaacaagcttgcaaatctaacaaacctggagatcttgtacttatctttcaacaaaatgactggagcaatacccgctgcacttgccagtataccaagactaactaacttgcacttggaccacaatctattcaatggaagtatacctgaagccttctacaagcatccaaacctaaaagatatgtacatagaagggaatgctttcaaatcagacgtgaaggcgattggtgcacataaggtcctcgaactttctgacacagacttccttgtttagttatgtatagcacaactttgtttcatttacagataggaatttggcagtgttaactggttatttaagattcattttctctgttaaagcgagattgtagttgatgtgttttctgaatgtaaaaggttccttatccatgtatgaaaattgaatataaagggaatctggtttgttctttcc

SEQ ID NO: 42501 - protein, 330 aa, Arabidopsis thaliana
  peptide (1)..(330): Ceres Seq. ID no. 13489618
MANLSLSLYLILRIYALLLLFNVSFAKTLKRDMKALNEIKKLVGWRLVYSWVGDDPCGDGVLPPWSGVTCSKVGDYRVVVKLEVYSMSIVGNFPKAITKLLDLTVLDMHNNKLTGPIPPEIGRLKRLITLNLRWNKLQQALPPEIGGLKSLTYLYLSFNNFKGEIPKELANLHELQYLHIQENHFTGRIPAELGTLQKLRHLDAGNNNLVGSISDLFRIEGCFPALRNLFLNNNYLTGGLPNKLANLTNLEILYLSFNKMTGAIPAALASIPRLTNLHLDHNLFNGSIPEAFYKHPNLKDMYIEGNAFKSDVKAIGAHKVLELSDTDFLV

SEQ ID NO: 42502 - protein, 298 aa, Arabidopsis thaliana
  peptide (1)..(298): Ceres Seq. ID no. 13489619
MKALNEIKKLVGWRLVYSWVGDDPCGDGVLPPWSGVTCSKVGDYRVVVKLEVYSMSIVGNFPKAITKLLDLTVLDMHNNKLTGPIPPEIGRLKRLITLNLRWNKLQQALPPEIGGLKSLTYLYLSFNNFKGEIPKELANLHELQYLHIQENHFTGRIPAELGTLQKLRHLDAGNNNLVGSISDLFRIEGCFPALRNLFLNNNYLTGGLPNKLANLTNLEILYLSFNKMTGAIPAALASIPRLTNLHLDHNLFNGSIPEAFYKHPNLKDMYIEGNAFKSDVKAIGAHKVLELSDTDFLV

SEQ ID NO: 42503 - protein, 244 aa, Arabidopsis thaliana
  peptide (1)..(244): Ceres Seq. ID no. 13489620
MSIVGNFPKAITKLLDLTVLDMHNNKLTGPIPPEIGRLKRLITLNLRWNKLQQALPPEIGGLKSLTYLYLSFNNFKGEIPKELANLHELQYLHIQENHFTGRIPAELGTLQKLRHLDAGNNNLVGSISDLFRIEGCFPALRNLFLNNNYLTGGLPNKLANLTNLEILYLSFNKMTGAIPAALASIPRLTNLHLDHNLFNGSIPEAFYKHPNLKDMYIEGNAFKSDVKAIGAHKVLELSDTDFLV

SEQ ID NO: 42504 - DNA, 911 bp, Arabidopsis thaliana
  misc_feature (1)..(911): Ceres Seq. ID no. 12650587
  misc_feature (1)..(911): Ortholog of  Ceres SEQ ID NO 13596338 as cited in SEQ ID NO 68005
  misc_feature (1)..(911): Ortholog of  Ceres SEQ ID NO 14302128 as cited in SEQ ID NO 0
  misc_feature (1)..(911): Ortholog of  Ceres SEQ ID NO 15179357 as cited in SEQ ID NO 0
aggcaaaaagggtttttgtgttcttcgatattatctcttattactattaggctattatcatcgccttattggggaaaaagcttcaaacttttatataaagtctcttcctttttctttctttctcggtggaatttgcagcaatggaagataaaccattagggattctcagggttcatgtcaaaagagggattaatcttgctattcgtgatgccaccaccagtgatccttatgttgttatcacattggctaatcagaaactgaagacgcgtgtgattaataataactgtaatccagtgtggaacgaacaactgaccctttccatcaaagatgtgaatgatcctatccgtctgacggtgtttgataaagatagattctcgggagatgacaaaatgggtgatgcagaaatagactttaggccgttcctagaagcgcatcaaatggagttagatttccagaagctccccaatggttgtgcaatcaagaggatccgtccaggcaggaccaactgtttagctgaagagagcagcatcacttggagcaatgggaagatcatgcaagagatgattcttagactaaagaatgtggagtgtggggaagtagagctcatgcttgagtggactgatggtccaggctgcaagggtctgggacgcgaaggatccaagaagacaccatggatgccgacaaaacgattggactaagatgcagaaatgttaaaacagagaccgtgaagatgtgatggtattttttcgttatgttcatggaaagacgagtttgtctttgtctcatcagagtttaaattgacaaaaaaggctctgctttggtctttagttgtacatgtcgaataactcaacccttatatatattgtatctgtttctactaattgaagaaataaagcaaaccctgaatttct

SEQ ID NO: 42505 - protein, 185 aa, Arabidopsis thaliana
  peptide (1)..(185): Ceres Seq. ID no. 12650588
MEDKPLGILRVHVKRGINLAIRDATTSDPYVVITLANQKLKTRVINNNCNPVWNEQLTLSIKDVNDPIRLTVFDKDRFSGDDKMGDAEIDFRPFLEAHQMELDFQKLPNGCAIKRIRPGRTNCLAEESSITWSNGKIMQEMILRLKNVECGEVELMLEWTDGPGCKGLGREGSKKTPWMPTKRLD

SEQ ID NO: 42506 - protein, 102 aa, Arabidopsis thaliana; identical to SEQ ID NO: 25753
  peptide (1)..(102): Ceres Seq. ID no. 12650589

SEQ ID NO: 42507 - DNA, 1605 bp, Arabidopsis thaliana
  misc_feature (1)..(1605): Ceres Seq. ID no. 12331179
  misc_feature (1)..(1605): Ortholog of  Ceres SEQ ID NO 13587235 as cited in SEQ ID NO 0
gacaacgatcatccaggtcccactctgcttcttaaccattctttaccaaaaatcaattgctctctccctctcagcttccaaagtcttcatctttctcgacaatatctaaaccttgtctgagaatcatttgaataagatctttcatcatcaccgatccactttctgatttaggtcaatggaacagacaaaggatgattctgattttgaggatgattttgaaacgaagaagatggagactgatacatcagctcaagaggcaaggaatggtaaagacatacaagggattcagtgggaagggtttaagtatactagagacgagtttcgtgacactaggttgaaacattatgataactttgttaatatcttaaggcctagctctcgagaaaagcttgataaggaacatgggcaagtagttgagaaaggaaagaacttttatgacttccaattcaatacaaggcttgtcacttccactattgtgcattttcagcttcggaatttggtatgggcgacatctaagcatgatgtatatctaatgcaaaattattcactcatgcactggtcatctctactccagagagggaaagaagtagttaatgtcgccagatcagttacccccactcagaaactacctggattgttttctgagccactctctagggtgcaagttagcagcatggcagtcaaagaaaatctgatccttttaggagggttcgacggggagcttctctgcaagtgtgtaaatcagcctggggttgctttttgcacaagattatcaacggaagataatgccatcacaaacacagttgatatataccgagacccaagtggctcccttaggcttataaccgcaaataacgactgtaaaatccgggtattcgatgctcagagctttacacgtgtcagtgaatttacttttgattggtctgtcaataatacctcagttagcccggatgggaagctactcgctgtactcggggacagtacagaatgcttgatctctgattcccgttctgaaaaagttatttcaagcctcagaggccacaaagactactcatttgcatctgcttggcacccgaatggtctaatcttagcaacgggaaaccaagacacgacatgccgtctctgggacattcgtaacccgtcagaatcattcgctgtcctgaaaggaaacatgggagccatcagaggactgaagttcacaccagaagggcggtttcttgcaatggctgagcctgcagactttgttcacatcttcgacacgcagtccgggtttctacagtcccaagagattgatctgtttggagaaatagccgggatctccttcagccccgactcagaggcactatatgttggggtcgcagaccgcacttatggaagcttgatggagtataagaggagtaaggataatcactatatggactccttttactgagaaaaggtaaatggaaagtaaaaagcatctaatatgttgtcacaagttgggttttaccctattagtgtgtatatgtagacagaattggtagtttctttggttatgtatgttgtatgtaacccataatatatcttgccaaactttaagtatgttttgttaattgtgattgtttt

SEQ ID NO: 42508 - protein, 418 aa, Arabidopsis thaliana
  peptide (1)..(418): Ceres Seq. ID no. 12331180
MEQTKDDSDFEDDFETKKMETDTSAQEARNGKDIQGIQWEGFKYTRDEFRDTRLKHYDNFVNILRPSSREKLDKEHGQVVEKGKNFYDFQFNTRLVTSTIVHFQLRNLVWATSKHDVYLMQNYSLMHWSSLLQRGKEVVNVARSVTPTQKLPGLFSEPLSRVQVSSMAVKENLILLGGFDGELLCKCVNQPGVAFCTRLSTEDNAITNTVDIYRDPSGSLRLITANNDCKIRVFDAQSFTRVSEFTFDWSVNNTSVSPDGKLLAVLGDSTECLISDSRSEKVISSLRGHKDYSFASAWHPNGLILATGNQDTTCRLWDIRNPSESFAVLKGNMGAIRGLKFTPEGRFLAMAEPADFVHIFDTQSGFLQSQEIDLFGEIAGISFSPDSEALYVGVADRTYGSLMEYKRSKDNHYMDSFY

SEQ ID NO: 42509 - protein, 400 aa, Arabidopsis thaliana
  peptide (1)..(400): Ceres Seq. ID no. 12331181
METDTSAQEARNGKDIQGIQWEGFKYTRDEFRDTRLKHYDNFVNILRPSSREKLDKEHGQVVEKGKNFYDFQFNTRLVTSTIVHFQLRNLVWATSKHDVYLMQNYSLMHWSSLLQRGKEVVNVARSVTPTQKLPGLFSEPLSRVQVSSMAVKENLILLGGFDGELLCKCVNQPGVAFCTRLSTEDNAITNTVDIYRDPSGSLRLITANNDCKIRVFDAQSFTRVSEFTFDWSVNNTSVSPDGKLLAVLGDSTECLISDSRSEKVISSLRGHKDYSFASAWHPNGLILATGNQDTTCRLWDIRNPSESFAVLKGNMGAIRGLKFTPEGRFLAMAEPADFVHIFDTQSGFLQSQEIDLFGEIAGISFSPDSEALYVGVADRTYGSLMEYKRSKDNHYMDSFY

SEQ ID NO: 42510 - protein, 299 aa, Arabidopsis thaliana
  peptide (1)..(299): Ceres Seq. ID no. 12331182
MQNYSLMHWSSLLQRGKEVVNVARSVTPTQKLPGLFSEPLSRVQVSSMAVKENLILLGGFDGELLCKCVNQPGVAFCTRLSTEDNAITNTVDIYRDPSGSLRLITANNDCKIRVFDAQSFTRVSEFTFDWSVNNTSVSPDGKLLAVLGDSTECLISDSRSEKVISSLRGHKDYSFASAWHPNGLILATGNQDTTCRLWDIRNPSESFAVLKGNMGAIRGLKFTPEGRFLAMAEPADFVHIFDTQSGFLQSQEIDLFGEIAGISFSPDSEALYVGVADRTYGSLMEYKRSKDNHYMDSFY

SEQ ID NO: 42511 - DNA, 1392 bp, Arabidopsis thaliana
  misc_feature (1)..(1392): Ceres Seq. ID no. 12336242
  misc_feature (1)..(1392): Ortholog of  Ceres SEQ ID NO 13655244 as cited in SEQ ID NO 62716
attacactcttcctccattttttgattacttccatttcctcaaaagtcaaagctctctttcttctctctcgagatttgctaacttgtcaatggcggatgttgagaatctgaactctgttccggcgtcggaagacacagagtatggatttaaacggccggagatgtacagcacaaacatagccaattccataacttcctacgctcgtcatgtttttgttctttacaaaactcctgaagcttggctctctcacgtcgaagaagaaggtttacctcaacgtttcgctacgttgcttaaagatcgcaaatctgatcttcttgttcagacgaagctcaatgtatgtgaaggtggtggatctgacggtgatgttttgatttttcccgatatgatcagatacaagggggttaaggatacggatgtggaaggtttctttgaagatgttcttgtgaatgggaagccatggagttctgggatacaagaagagatatctggaacatttgtatttgtgtgtactcatgctagtcgtgacaagagatgtggtgtttgtggaccagtgatcttggagaggtttaagcaagagattggttctcgaggactgtcggaccagattacactgaaacgttgttctcatgttggacagcacaagtatgctggtaatttgatcatcttctgtcctgattcagctggaaagattactggcaattggtatggctatgtaacacctgatgatgtacctgaattgcttgatcaacatattgcaaaaggagaaatcatacaaaggatttggagggggcaaatgggtctacctggaggtgaagctgagaaagtgcatgaacagaaagttataccaaatggtcacggtgtagtgaaagaggagagcaaaggattcacaggaggatgttgtcagggatcaaacggtgtttcgtgttgccaagacgaaactccaaagccagagccaatcaagaaagaagtaaaaaagtgtaccatatggttccagcctcttgacaaagaagagctttacattggagctgctgtggttggagccattgcaactatagccatggctttcacctttttcaagaggtcaggttaagaacctaaccttacttacttaccaatagaagtttttccttggagattgccatgagacaatagaaaaagaaaacctccattgattcgaccacaaaacagaagcgaagaattatgtttttgtctttgattttaccattaaagaaacatataaactttttggtttctgtgagcgtttttttgccttgctatcttctcacattatgtgtttttgttgtaatggccataacttctgtgattggtctaaactctctcactttggtgcattaacaaaactttgatttggtttggtttggcttatgttc

SEQ ID NO: 42512 - protein, 362 aa, Arabidopsis thaliana
  peptide (1)..(362): Ceres Seq. ID no. 12336243
YTLPPFFDYFHFLKSQSSLSSLSRFANLSMADVENLNSVPASEDTEYGFKRPEMYSTNIANSITSYARHVFVLYKTPEAWLSHVEEEGLPQRFATLLKDRKSDLLVQTKLNVCEGGGSDGDVLIFPDMIRYKGVKDTDVEGFFEDVLVNGKPWSSGIQEEISGTFVFVCTHASRDKRCGVCGPVILERFKQEIGSRGLSDQITLKRCSHVGQHKYAGNLIIFCPDSAGKITGNWYGYVTPDDVPELLDQHIAKGEIIQRIWRGQMGLPGGEAEKVHEQKVIPNGHGVVKEESKGFTGGCCQGSNGVSCCQDETPKPEPIKKEVKKCTIWFQPLDKEELYIGAAVVGAIATIAMAFTFFKRSG

SEQ ID NO: 42513 - protein, 333 aa, Arabidopsis thaliana
  peptide (1)..(333): Ceres Seq. ID no. 12336244
MADVENLNSVPASEDTEYGFKRPEMYSTNIANSITSYARHVFVLYKTPEAWLSHVEEEGLPQRFATLLKDRKSDLLVQTKLNVCEGGGSDGDVLIFPDMIRYKGVKDTDVEGFFEDVLVNGKPWSSGIQEEISGTFVFVCTHASRDKRCGVCGPVILERFKQEIGSRGLSDQITLKRCSHVGQHKYAGNLIIFCPDSAGKITGNWYGYVTPDDVPELLDQHIAKGEIIQRIWRGQMGLPGGEAEKVHEQKVIPNGHGVVKEESKGFTGGCCQGSNGVSCCQDETPKPEPIKKEVKKCTIWFQPLDKEELYIGAAVVGAIATIAMAFTFFKRSG

SEQ ID NO: 42514 - protein, 309 aa, Arabidopsis thaliana
  peptide (1)..(309): Ceres Seq. ID no. 12336245
MYSTNIANSITSYARHVFVLYKTPEAWLSHVEEEGLPQRFATLLKDRKSDLLVQTKLNVCEGGGSDGDVLIFPDMIRYKGVKDTDVEGFFEDVLVNGKPWSSGIQEEISGTFVFVCTHASRDKRCGVCGPVILERFKQEIGSRGLSDQITLKRCSHVGQHKYAGNLIIFCPDSAGKITGNWYGYVTPDDVPELLDQHIAKGEIIQRIWRGQMGLPGGEAEKVHEQKVIPNGHGVVKEESKGFTGGCCQGSNGVSCCQDETPKPEPIKKEVKKCTIWFQPLDKEELYIGAAVVGAIATIAMAFTFFKRSG

SEQ ID NO: 42515 - DNA, 870 bp, Arabidopsis thaliana
  misc_feature (1)..(870): Ceres Seq. ID no. 12326712
  misc_feature (1)..(870): Ortholog of  Ceres SEQ ID NO 13661994 as cited in SEQ ID NO 60568
  misc_feature (1)..(870): Ortholog of  Ceres SEQ ID NO 12584790 as cited in SEQ ID NO 62648
attttattttcttaaaatagtatatgattttttcattttaaactttctttgtgttttcttcttctcttcctttatttggtgaagaaaaaggaaagaaaaatctcaactttgattctctctccctctatatatactttatttattctccactcataatagtttcatcatctctttcggtctatgaaaaacattggaaaaaccctaattcctagtgttgcgaatcacttttcattgcagctttgaacttcagtctgtgaatttccaacagcaatgacaactccagcaaaaaagagactgatgtgggatttcaagagactgcagaaagatcctcctgtgggaataagtggagctccacaagataacaatatcatgcattggaatgctctcatctttggacctgaggacactccatgggatggaggtactttcaagttgactcttcacttcaccgaggattatccgaacaaacccccgattgttcggtttgtttcacggatgtttcatccaaacatttatgctgatggaagcatttgcttggatatcttgcaaaaccagtggagccccatctacgacgttgctgcagttctcacatcaattcagtctttgctctgtgacccaaaccctgactcaccagcgaacgcagaggctgcaaggttgttcagtgagaataaaagagaatataacaggaaagtaatcgagatcgtggagcagagctatgtataaatatgattcattttgttgtattgactaatgagtaattggatgttgaatagtatttattatctgccttgagtttattttacatggatgtttaaatttcggaaatgagatttcttgctaatataatatcataatatattttgtataact

SEQ ID NO: 42516 - protein, 150 aa, Arabidopsis thaliana
  peptide (1)..(150): Ceres Seq. ID no. 12326713
MTTPAKKRLMWDFKRLQKDPPVGISGAPQDNNIMHWNALIFGPEDTPWDGGTFKLTLHFTEDYPNKPPIVRFVSRMFHPNIYADGSICLDILQNQWSPIYDVAAVLTSIQSLLCDPNPDSPANAEAARLFSENKREYNRKVIEIVEQSYV

SEQ ID NO: 42517 - protein, 141 aa, Arabidopsis thaliana
  peptide (1)..(141): Ceres Seq. ID no. 12326714
MWDFKRLQKDPPVGISGAPQDNNIMHWNALIFGPEDTPWDGGTFKLTLHFTEDYPNKPPIVRFVSRMFHPNIYADGSICLDILQNQWSPIYDVAAVLTSIQSLLCDPNPDSPANAEAARLFSENKREYNRKVIEIVEQSYV

SEQ ID NO: 42518 - protein, 117 aa, Arabidopsis thaliana
  peptide (1)..(117): Ceres Seq. ID no. 12326715
MHWNALIFGPEDTPWDGGTFKLTLHFTEDYPNKPPIVRFVSRMFHPNIYADGSICLDILQNQWSPIYDVAAVLTSIQSLLCDPNPDSPANAEAARLFSENKREYNRKVIEIVEQSYV

SEQ ID NO: 42519 - DNA, 1192 bp, Arabidopsis thaliana
  misc_feature (1)..(1192): Ceres Seq. ID no. 12331041
  misc_feature (1)..(1192): Ortholog of  Ceres SEQ ID NO 15225252 as cited in SEQ ID NO 60972
aaaccttgttttgtctcaaacaaatttctctgaacacactcaacaacatatcccataacaaaaaaaagctattaaaaaaaaaagagaagcagccatggaagaagataagcaagaagcttcaatgccactagttccaattgacagcttctcttacagttggttagttaactttccttctttagaagctaccattgatgatcatcatcaaacattcgaagattcatcttcttcttcttccttcattgagatggatccaagattgcctccttctagaagattcttcatcaaaacatctcatgaaagtagcttcaagttcgataacttcgtctctttctccgacgaagatcactctttagttcacgccgacgagctcttccgtgacggctacgttatgccttatcgattaaagcccacgtccgcggctaccgaggaagaatctgagccgttggatacaacaacatcggagaagattgatacacgtggccttaacagcaagccttctcctacttcttcaagaaagctgaggagagtgtccaaatgggttttgctgaagtatcttgatttcttgacgccattgtgtaagagattaaggagatgtagatccgctgtaacaacgggaagtatcggtatggattcgaggatccgtgtaacgacttcgtgtaggagcagagtttattctgatgaaatgacgtcgtcgccaagaataagtgttgctgatgattattattggagaaggtcttgtgactccgagagctctatatacgaagccgttcttcattgcaagaaatcattcgagaaatgagaagaataatccatggaagaggagcagttagaagtagagatggagaatattaagcttgagagaataagcaaattgcattaacacgttacacatggagtgggagagaaagagagggagcaacttgtgatgtgtctttttgttgattctctctcttgaattaaagagattgatgtgaatgatccatgtgaatgtgtcatctgatgtggatcaagaatgtttttgtttttttacatgagtgggcacatttatagaaatatatatggggctgcaagcagaatcaagaaaatattttcagattttcttggctatttttttttctccatatgtgtatattccaatcatgtaagttaaatagtttctttttatatatggggtaaaaactataagtgc

SEQ ID NO: 42520 - protein, 235 aa, Arabidopsis thaliana
  peptide (1)..(235): Ceres Seq. ID no. 12331042
MEEDKQEASMPLVPIDSFSYSWLVNFPSLEATIDDHHQTFEDSSSSSSFIEMDPRLPPSRRFFIKTSHESSFKFDNFVSFSDEDHSLVHADELFRDGYVMPYRLKPTSAATEEESEPLDTTTSEKIDTRGLNSKPSPTSSRKLRRVSKWVLLKYLDFLTPLCKRLRRCRSAVTTGSIGMDSRIRVTTSCRSRVYSDEMTSSPRISVADDYYWRRSCDSESSIYEAVLHCKKSFEK

SEQ ID NO: 42521 - protein, 226 aa, Arabidopsis thaliana
  peptide (1)..(226): Ceres Seq. ID no. 12331043
MPLVPIDSFSYSWLVNFPSLEATIDDHHQTFEDSSSSSSFIEMDPRLPPSRRFFIKTSHESSFKFDNFVSFSDEDHSLVHADELFRDGYVMPYRLKPTSAATEEESEPLDTTTSEKIDTRGLNSKPSPTSSRKLRRVSKWVLLKYLDFLTPLCKRLRRCRSAVTTGSIGMDSRIRVTTSCRSRVYSDEMTSSPRISVADDYYWRRSCDSESSIYEAVLHCKKSFEK

SEQ ID NO: 42522 - protein, 184 aa, Arabidopsis thaliana
  peptide (1)..(184): Ceres Seq. ID no. 12331044
MDPRLPPSRRFFIKTSHESSFKFDNFVSFSDEDHSLVHADELFRDGYVMPYRLKPTSAATEEESEPLDTTTSEKIDTRGLNSKPSPTSSRKLRRVSKWVLLKYLDFLTPLCKRLRRCRSAVTTGSIGMDSRIRVTTSCRSRVYSDEMTSSPRISVADDYYWRRSCDSESSIYEAVLHCKKSFEK

SEQ ID NO: 42523 - DNA, 1546 bp, Arabidopsis thaliana
  misc_feature (1)..(1546): Ceres Seq. ID no. 12370788
  misc_feature (1)..(1546): Ortholog of  Ceres SEQ ID NO 15170752 as cited in SEQ ID NO 52719
acaaaagaaaattgtcaatttcgaaaaatgttgagcacaagctctgatcttcatggccgtcttctccggtgagtgacatctctctctggcctctgtttttttgccctttaagtgcttttttcttgaagaaccctaattttgatttgttttgaggattcagattatcagaaccaatagcagagattcttagacgtacacagtacacaccgcaagagagcagcaaagtatccaccaaagatatactcttgtccttgttaccaaacacttcgtcttctcgtctcgccaatgaagaatcgatcaaaagtctcgcgcttgcttgtgcccttctcgcttcttcacgttcatccactcacgaacttctctcatggattccagaaaacctctctgtcatgggggaatctacattttgggagatttcaagggattgtttcagtgatttttctagcaacagtaatgctgagaagcttgtggaattggtagaggatagtgagaagatcgaaatgttgccgatagttttgccggagttaaaagatggaatcgaaaagagttcacttggtaaaggcagtgatgcagaggatgtttcagctgcaatggctagaacacctgttggttatatacttgctgctcaccagctcaggtggtttgttactcaggttaaaaaaccgaatttggtgaaattttgtaacttggtggttccttgtgctttgacagcacttgatcattggtctcctgaagtcaaagggcagggtatgataacctttgttcatcttgctaaaaatgtgagttccggtgatcttggtttgtatggagatgtggttcttgatgcgtgttgccagaatatagcttccgatgatgagatttggatacatgtggtagagttatctgtgcttcttgttactaaaatccacccaaataatcctcgaagcccgtggtatgagaagatcatgaatgagatgctcgggcatttggaacgccaaccaagaaataaggagcgacgtatcacttggctaagatttgttgagccactcttgaactctctagggcttttcttacttgctcattttcgacgtatcttccctcttttctttcagtggatgcattcagacgacccgaaacagttctgttggttcttgagagactggagacagttgtgaggttgacgtggattagacactcacctgtgttcccaagattggtggatgagcttgtttccttgtacaaagagtcatcgatgcgtaaggatcgcgatgatattagacctcttatcctccgtatcttgatgctactccgccagtgcaaaggtctacggtttgagtcagcgtggagtcaataccaggaggatccaaatctgagtactgttagtcaacatatatggactagttcaagttgatctcaagagcgtatgtttgactaaaacagccattttttttctaattttcgatattagtttggtctaggcctagtgatgcaagtaattactggcgaatcctcgaatttttgtaagcatttggctcttgactcttcttaagctaatctgatttgatac

SEQ ID NO: 42524 - protein, 254 aa, Arabidopsis thaliana
  peptide (1)..(254): Ceres Seq. ID no. 12370789
MGESTFWEISRDCFSDFSSNSNAEKLVELVEDSEKIEMLPIVLPELKDGIEKSSLGKGSDAEDVSAAMARTPVGYILAAHQLRWFVTQVKKPNLVKFCNLVVPCALTALDHWSPEVKGQGMITFVHLAKNVSSGDLGLYGDVVLDACCQNIASDDEIWIHVVELSVLLVTKIHPNNPRSPWYEKIMNEMLGHLERQPRNKERRITWLRFVEPLLNSLGLFLLAHFRRIFPLFFQWMHSDDPKQFCWFLRDWRQL

SEQ ID NO: 42525 - protein, 217 aa, Arabidopsis thaliana
  peptide (1)..(217): Ceres Seq. ID no. 12370790
MLPIVLPELKDGIEKSSLGKGSDAEDVSAAMARTPVGYILAAHQLRWFVTQVKKPNLVKFCNLVVPCALTALDHWSPEVKGQGMITFVHLAKNVSSGDLGLYGDVVLDACCQNIASDDEIWIHVVELSVLLVTKIHPNNPRSPWYEKIMNEMLGHLERQPRNKERRITWLRFVEPLLNSLGLFLLAHFRRIFPLFFQWMHSDDPKQFCWFLRDWRQL

SEQ ID NO: 42526 - protein, 187 aa, Arabidopsis thaliana
  peptide (1)..(187): Ceres Seq. ID no. 12370791
MARTPVGYILAAHQLRWFVTQVKKPNLVKFCNLVVPCALTALDHWSPEVKGQGMITFVHLAKNVSSGDLGLYGDVVLDACCQNIASDDEIWIHVVELSVLLVTKIHPNNPRSPWYEKIMNEMLGHLERQPRNKERRITWLRFVEPLLNSLGLFLLAHFRRIFPLFFQWMHSDDPKQFCWFLRDWRQL

SEQ ID NO: 42527 - DNA, 1184 bp, Arabidopsis thaliana
  misc_feature (1)..(1184): Ceres Seq. ID no. 13575138
  misc_feature (1)..(1184): Ortholog of  Ceres SEQ ID NO 12583469 as cited in SEQ ID NO 51031
  misc_feature (1)..(1184): Ortholog of  Ceres SEQ ID NO 13597389 as cited in SEQ ID NO 63426
  misc_feature (1)..(1184): Ortholog of  Ceres SEQ ID NO 13595998 as cited in SEQ ID NO 68161
  misc_feature (1)..(1184): Ortholog of  Ceres SEQ ID NO 15180463 as cited in SEQ ID NO 0
atacaaacacacattttgttcacacagagatagacatggcttccgatataaacagaagaagatcgttctctcttctagtcttgattattgtgatgctttatgggcataaaggtgattcaaaatgtgatttcgaagcaattttcaacttcggagactcgaattcggacactggcggattttgggctgcttttcctgcccaatctggtccatggggaatgacttatttcaagaaaccagccggtcgtgcttcagacggtcgtcttatcattgattttctagccaaatctcttggaatgcctttcctaagcccatatttgcaatctattggatcggattttcgacatggcgcaaactttgcgacgttagcgtccacggttctcttgccaaacacgtctttatttgtctccggaatcagccctttctcactcgctattcagctgaatcagatgaaacaattcaaggttaatgtcgacgagtcacattctttggaccgaccaggattgaagatcttaccgtctaaaattgttttcggaaaatcgctatacacgttttatattggtcaaaacgatttcacatccaatttagccagtattggagttgagagagtgaaactatatcttccacaagtcataggccaaattgctggaacgattaaggagatatatggaataggtggtcggacatttttggtattgaatttagcaccggttggatgttacccggcgattttaaccggttacactcataccgatgctgatttagacaagtatggatgtctcattcctgtaaacaaagcagtcaaatattacaacacgttattgaataagacattatctcagaccagaaccgaactaaaaaacgctaccgtaatttatttagacacgcacaagatattgcttgatctctttcaacaccccaaatcctacggtatgaaacacggtattaaagcttgttgtggatatggtggacgtccatacaatttcaatcagaagttattttgtggcaacaccaaagtgattggaaatttttctacgacggccaaagcttgccatgatcctcacaactacgtgagttgggatggaattcatgcgacggaggccgcaaatcaccacatttccatggccattctcgacggttcgatatcatatcctccgttcatactcaataacctatgttcgccttag

SEQ ID NO: 42528 - protein, 393 aa, Arabidopsis thaliana
  peptide (1)..(393): Ceres Seq. ID no. 13575139
TNTHFVHTEIDMASDINRRRSFSLLVLIIVMLYGHKGDSKCDFEAIFNFGDSNSDTGGFWAAFPAQSGPWGMTYFKKPAGRASDGRLIIDFLAKSLGMPFLSPYLQSIGSDFRHGANFATLASTVLLPNTSLFVSGISPFSLAIQLNQMKQFKVNVDESHSLDRPGLKILPSKIVFGKSLYTFYIGQNDFTSNLASIGVERVKLYLPQVIGQIAGTIKEIYGIGGRTFLVLNLAPVGCYPAILTGYTHTDADLDKYGCLIPVNKAVKYYNTLLNKTLSQTRTELKNATVIYLDTHKILLDLFQHPKSYGMKHGIKACCGYGGRPYNFNQKLFCGNTKVIGNFSTTAKACHDPHNYVSWDGIHATEAANHHISMAILDGSISYPPFILNNLCSP

SEQ ID NO: 42529 - protein, 382 aa, Arabidopsis thaliana
  peptide (1)..(382): Ceres Seq. ID no. 13575140
MASDINRRRSFSLLVLIIVMLYGHKGDSKCDFEAIFNFGDSNSDTGGFWAAFPAQSGPWGMTYFKKPAGRASDGRLIIDFLAKSLGMPFLSPYLQSIGSDFRHGANFATLASTVLLPNTSLFVSGISPFSLAIQLNQMKQFKVNVDESHSLDRPGLKILPSKIVFGKSLYTFYIGQNDFTSNLASIGVERVKLYLPQVIGQIAGTIKEIYGIGGRTFLVLNLAPVGCYPAILTGYTHTDADLDKYGCLIPVNKAVKYYNTLLNKTLSQTRTELKNATVIYLDTHKILLDLFQHPKSYGMKHGIKACCGYGGRPYNFNQKLFCGNTKVIGNFSTTAKACHDPHNYVSWDGIHATEAANHHISMAILDGSISYPPFILNNLCSP

SEQ ID NO: 42530 - protein, 363 aa, Arabidopsis thaliana
  peptide (1)..(363): Ceres Seq. ID no. 13575141
MLYGHKGDSKCDFEAIFNFGDSNSDTGGFWAAFPAQSGPWGMTYFKKPAGRASDGRLIIDFLAKSLGMPFLSPYLQSIGSDFRHGANFATLASTVLLPNTSLFVSGISPFSLAIQLNQMKQFKVNVDESHSLDRPGLKILPSKIVFGKSLYTFYIGQNDFTSNLASIGVERVKLYLPQVIGQIAGTIKEIYGIGGRTFLVLNLAPVGCYPAILTGYTHTDADLDKYGCLIPVNKAVKYYNTLLNKTLSQTRTELKNATVIYLDTHKILLDLFQHPKSYGMKHGIKACCGYGGRPYNFNQKLFCGNTKVIGNFSTTAKACHDPHNYVSWDGIHATEAANHHISMAILDGSISYPPFILNNLCSP

SEQ ID NO: 42531 - DNA, 1433 bp, Arabidopsis thaliana
  misc_feature (1)..(1433): Ceres Seq. ID no. 12604850
  misc_feature (1)..(1433): Ortholog of  Ceres SEQ ID NO 12618563 as cited in SEQ ID NO 65025
acgattacacgcgtttccgaaacgttgggctttgcttagctgcgacattttcagtgaacgaagaaaaccacggtagtagactagtagttgtagaaaaaaacaaaacgaaatcgaagaagaagagaggaaggatgaagaagatcccggtgcttctcatgggctgcggaggcgttggccgccaccttcttcaacacatcgtctcttgccgatcgcttcacgccaaaatgggagttcatatacgggtgattggagtatgtgatagtaaatccttagttgctccaatggatgtgctcaaagaggaactgaatgatgaactcttgtcagaagtttgccttatcaaatcaactggttctgcattatcgaagttgggtgctttggaaaaaggtggatatcgagtcgtccatgattccgagttaagcacggaaacagaagagattgcaaaacttcttggtaaatctacaggcttagctgtggtggattgctcagccagcatggagacgattgaaatattgatgaaggcagttgacttgggttgctgtattgtccttgcaaataagaagcctgttacttcaacgctggaacattacgacaaattggctttgcatccgcgattcatccgccatgaatctactgttggtgctggtcttcctgtcatcgcatccttgaaccgcataatttcgtctggagatcctgttcataggattgtcggtagtttgagcggtaccttgggatatgtaatgagtgagcttgaagatggcaagcctctaagccaagttgttcaagctgccaaaaagctggggtacactgaaccagatccacgtgacgacctcggtggcatggatgttgctagaaagggtttgattcttgctcgacttcttgggaagaggataattatggacagcattaagatagagagcttgtatccagaagagatgggacctggactcatgtctgtggatgatttcctccataatggaatagtaaaacttgatcagaatatagaggagagagttaaaaaagcttcatcaaaagggtgtgtgcttcgttatgtctgtgtgattgagggttcaagcgttcaagttggcattcgagaagtttcaaaagattcaccattgggacggctaagaggcagtgacaatatagtagagatatatagccgttgctacaaggagcagcctttggtgattcaaggtgccggagccgggaacgacacaactgcagccggtgttcttgcagacatcatcgacttgcaggatctttttcactgagaggaggctgtggtatttagtttttatcaaaataataataacacaattcataattgatctcttctctgatcttgtcaaggcagaaaattagccaacaagaacgtggcctctccttaacattaccaaaaagagatttttttttttaaaaaaaaaaaaaaaaaaaaa

SEQ ID NO: 42532 - protein, 421 aa, Arabidopsis thaliana
  peptide (1)..(421): Ceres Seq. ID no. 12604851
DYTRFRNVGLCLAATFSVNEENHGSRLVVVEKNKTKSKKKRGRMKKIPVLLMGCGGVGRHLLQHIVSCRSLHAKMGVHIRVIGVCDSKSLVAPMDVLKEELNDELLSEVCLIKSTGSALSKLGALEKGGYRVVHDSELSTETEEIAKLLGKSTGLAVVDCSASMETIEILMKAVDLGCCIVLANKKPVTSTLEHYDKLALHPRFIRHESTVGAGLPVIASLNRIISSGDPVHRIVGSLSGTLGYVMSELEDGKPLSQVVQAAKKLGYTEPDPRDDLGGMDVARKGLILARLLGKRIIMDSIKIESLYPEEMGPGLMSVDDFLHNGIVKLDQNIEERVKKASSKGCVLRYVCVIEGSSVQVGIREVSKDSPLGRLRGSDNIVEIYSRCYKEQPLVIQGAGAGNDTTAAGVLADIIDLQDLFH

SEQ ID NO: 42533 - protein, 378 aa, Arabidopsis thaliana
  peptide (1)..(378): Ceres Seq. ID no. 12604852
MKKIPVLLMGCGGVGRHLLQHIVSCRSLHAKMGVHIRVIGVCDSKSLVAPMDVLKEELNDELLSEVCLIKSTGSALSKLGALEKGGYRVVHDSELSTETEEIAKLLGKSTGLAVVDCSASMETIEILMKAVDLGCCIVLANKKPVTSTLEHYDKLALHPRFIRHESTVGAGLPVIASLNRIISSGDPVHRIVGSLSGTLGYVMSELEDGKPLSQVVQAAKKLGYTEPDPRDDLGGMDVARKGLILARLLGKRIIMDSIKIESLYPEEMGPGLMSVDDFLHNGIVKLDQNIEERVKKASSKGCVLRYVCVIEGSSVQVGIREVSKDSPLGRLRGSDNIVEIYSRCYKEQPLVIQGAGAGNDTTAAGVLADIIDLQDLFH

SEQ ID NO: 42534 - protein, 370 aa, Arabidopsis thaliana
  peptide (1)..(370): Ceres Seq. ID no. 12604853
MGCGGVGRHLLQHIVSCRSLHAKMGVHIRVIGVCDSKSLVAPMDVLKEELNDELLSEVCLIKSTGSALSKLGALEKGGYRVVHDSELSTETEEIAKLLGKSTGLAVVDCSASMETIEILMKAVDLGCCIVLANKKPVTSTLEHYDKLALHPRFIRHESTVGAGLPVIASLNRIISSGDPVHRIVGSLSGTLGYVMSELEDGKPLSQVVQAAKKLGYTEPDPRDDLGGMDVARKGLILARLLGKRIIMDSIKIESLYPEEMGPGLMSVDDFLHNGIVKLDQNIEERVKKASSKGCVLRYVCVIEGSSVQVGIREVSKDSPLGRLRGSDNIVEIYSRCYKEQPLVIQGAGAGNDTTAAGVLADIIDLQDLFH

SEQ ID NO: 42535 - DNA, 1451 bp, Arabidopsis thaliana
  misc_feature (1)..(1451): Ceres Seq. ID no. 12337750
  misc_feature (1)..(1451): Ortholog of  Ceres SEQ ID NO 15177298 as cited in SEQ ID NO 52711
accagaagaagagccacacactcacaaattaaaaagagagagagagagagagagacagagagagagagagattctgcggaggagcttcttcttcgtagggtgttcatcgttattaacgttatcgcccctacgtcagctccatctccagaaacatgggtgcaggtggaagaatgccggttcctacttcttccaagaaatcggaaaccgacaccacaaagcgtgtgccgtgcgagaaaccgcctttctcggtgggagatctgaagaaagcaatcccgccgcattgtttcaaacgctcaatccctcgctctttctcctaccttatcagtgacatcattatagcctcatgcttctactacgtcgccaccaattacttctctctcctccctcagcctctctcttacttggcttggccactctattgggcctgtcaaggctgtgtcctaactggtatctgggtcatagcccacgaatgcggtcaccacgcattcagcgactaccaatggctggatgacacagttggtcttatcttccattccttcctcctcgtcccttacttctcctggaagtatagtcatcgccgtcaccattccaacactggatccctcgaaagagatgaagtatttgtcccaaagcagaaatcagcaatcaagtggtacgggaaatacctcaacaaccctcttggacgcatcatgatgttaaccgtccagtttgtcctcgggtggcccttgtacttagcctttaacgtctctggcagaccgtatgacgggttcgcttgccatttcttccccaacgctcccatctacaatgaccgagaacgcctccagatatacctctctgatgcgggtattctagccgtctgttttggtctttaccgttacgctgctgcacaagggatggcctcgatgatctgcctctacggagtaccgcttctgatagtgaatgcgttcctcgtcttgatcacttacttgcagcacactcatccctcgttgcctcactacgattcatcagagtgggactggctcaggggagctttggctaccgtagacagagactacggaatcttgaacaaggtgttccacaacattacagacacacacgtggctcatcacctgttctcgacaatgccgcattataacgcaatggaagctacaaaggcgataaagccaattctgggagactattaccagttcgatggaacaccgtggtatgtggcgatgtatagggaggcaaaggagtgtatctatgtagaaccggacagggaaggtgacaagaaaggtgtgtactggtacaacaataagttatgaggatgatggtgaagaaattgtcgacttttctcttgtctgtttgtcttttgttaaagaagctatgcttcgttttaataatcttattgtccattttgttgtgttatgacattttggctgctcattatgttatgtgggaagttagtgttc

SEQ ID NO: 42536 - protein, 383 aa, Arabidopsis thaliana; identical to SEQ ID NO: 39928
  peptide (1)..(383): Ceres Seq. ID no. 12337751

SEQ ID NO: 42537 - protein, 377 aa, Arabidopsis thaliana; identical to SEQ ID NO: 39929
  peptide (1)..(377): Ceres Seq. ID no. 12337752

SEQ ID NO: 42538 - protein, 204 aa, Arabidopsis thaliana; identical to SEQ ID NO: 39930
  peptide (1)..(204): Ceres Seq. ID no. 12337753

SEQ ID NO: 42539 - DNA, 1251 bp, Arabidopsis thaliana
  misc_feature (1)..(1251): Ceres Seq. ID no. 12334113
  misc_feature (1)..(1251): Ortholog of  Ceres SEQ ID NO 15171943 as cited in SEQ ID NO 54306
  misc_feature (1)..(1251): Ortholog of  Ceres SEQ ID NO 13655812 as cited in SEQ ID NO 64743
  misc_feature (1)..(1251): Ortholog of  Ceres SEQ ID NO 15178828 as cited in SEQ ID NO 0
tgaaagttcttaagtggttccacgatgtttccattttgttctgacttccgaggccaacgagatgagtccaataaacaaagggcacggaaacattctttttaaattagtcttcttgagatcgaaggataacttcaattcaattcttttccaaggtacacacagctgatttttgtgataagaagattgattgagatgggtactagagctcagcagattcctttacttgaaggtgagactgataattacgatggtgttactgtaaccatggtggaacctatggattctgaggtttttactgaaagtcttagggcttctctttcgcattggagagaagaggggaagaagggaatttggataaagctgcctcttggattggctaatcttgtggaggctgcagttagtgaaggatttagatatcaccacgcggagcctgagtacttgatgcttgtatcttggatctctgaaactcctgatacaatcccagccaatgcttctcatgttgtaggtgctggtgctttggtcatcaacaaaaatactaaagaggtcctcgttgtccaggagaggagtgggtttttcaaagataaaaatgtgtggaagctgcctactggtgttatcaacgagggcgaggatatatggactggagtagctagggaagtggaagaagaaactggaattattgcagattttgtcgaagtactggctttcaggcaaagccacaaagccatcttaaaaaagaaaacagatatgtttttcctgtgtgtcttaagtccgcgctcttacgatattactgaacaaaaatctgagatcttgcaagctaagtggatgccgatccaagagtatgtagaccaaccatggaacaagaagaacgagatgttcaagttcatggctaacatttgccaaaagaagtgtgaggaagaatacttgggattcgccattgtgccaactaccacatcatctggtaaagagagctttatctactgcaatgcggatcatgccaagcgccttaaagtatcgcgtgaccaagcctctgcttctctctgaaaacattctcatctgattctgtttgatctcggcatgtgtgtgtccagtgtgtacaaaacaggaaactttcttctatattattccgattctacaaaattgcgtctaaatatttaagtttataccatctctatgagccactgtaaaacttgccatcgacttctagtctatttccagtgatggtttgattctcccaacgcttacgtgcttttt

SEQ ID NO: 42540 - protein, 282 aa, Arabidopsis thaliana
  peptide (1)..(282): Ceres Seq. ID no. 12334114
MGTRAQQIPLLEGETDNYDGVTVTMVEPMDSEVFTESLRASLSHWREEGKKGIWIKLPLGLANLVEAAVSEGFRYHHAEPEYLMLVSWISETPDTIPANASHVVGAGALVINKNTKEVLVVQERSGFFKDKNVWKLPTGVINEGEDIWTGVAREVEEETGIIADFVEVLAFRQSHKAILKKKTDMFFLCVLSPRSYDITEQKSEILQAKWMPIQEYVDQPWNKKNEMFKFMANICQKKCEEEYLGFAIVPTTTSSGKESFIYCNADHAKRLKVSRDQASASL

SEQ ID NO: 42541 - protein, 258 aa, Arabidopsis thaliana; identical to SEQ ID NO: 21781
  peptide (1)..(258): Ceres Seq. ID no. 12334115

SEQ ID NO: 42542 - protein, 254 aa, Arabidopsis thaliana; identical to SEQ ID NO: 21782
  peptide (1)..(254): Ceres Seq. ID no. 12334116

SEQ ID NO: 42543 - DNA, 811 bp, Arabidopsis thaliana
  misc_feature (1)..(811): Ceres Seq. ID no. 12422552
  misc_feature (1)..(811): Ortholog of  Ceres SEQ ID NO 14307801 as cited in SEQ ID NO 59512
  misc_feature (1)..(811): Ortholog of  Ceres SEQ ID NO 14309110 as cited in SEQ ID NO 0
  misc_feature (1)..(811): Ortholog of  Ceres SEQ ID NO 15225903 as cited in SEQ ID NO 0
agaacaaaacaaacaaaaagtcatgtctccgacgacgacatcgttacgatccctaagcttctcgctttacgcttcttctaattctactccgatttctacaccaattgaggcccgacagttactgagttcatgcagtagattctacggtctgtcctcttcgagctcttcttcctcccttactacttcatctttgatcggaaatcttgttttctcatcaaggaatcagtctctctccgtaaaggtccaagcgttagctgctgaaaccgaacagccaaaatggtgggagaggaaagcagggccaaacatgattgacattacctcagctgagcagtttctcaacgcgttaaaagatgcgggagatagattagttatcgtagatttttacggaacttggtgtggttcttgccgtgcaatgttcccaaagctctgcaaaacggcgaaagaacaccctgacatcttgttccttaaagtaaactttgacgagaacaagtctctctgcaaaagcttaaacgtcaaggtgttaccgtatttccacttctaccgcggtgctgatggccaagtcgaatccttctcatgctctcttgccaagttccagaaactgagagaggcgatagagagacacaatgtaggaagtatcagtaacatctcttcttcagcttctgagaaagttgaagattcaagtgaataatcaatgcctggttcagattgatcacagattattttgttaaatcgcttccctgtatatatgttgactgcattttccatgtggtgcatcataatttttgtacataaataaatgagtctgacttcg

SEQ ID NO: 42544 - protein, 228 aa, Arabidopsis thaliana
  peptide (1)..(228): Ceres Seq. ID no. 12422553
EQNKQKVMSPTTTSLRSLSFSLYASSNSTPISTPIEARQLLSSCSRFYGLSSSSSSSSLTTSSLIGNLVFSSRNQSLSVKVQALAAETEQPKWWERKAGPNMIDITSAEQFLNALKDAGDRLVIVDFYGTWCGSCRAMFPKLCKTAKEHPDILFLKVNFDENKSLCKSLNVKVLPYFHFYRGADGQVESFSCSLAKFQKLREAIERHNVGSISNISSSASEKVEDSSE

SEQ ID NO: 42545 - protein, 221 aa, Arabidopsis thaliana
  peptide (1)..(221): Ceres Seq. ID no. 12422554
MSPTTTSLRSLSFSLYASSNSTPISTPIEARQLLSSCSRFYGLSSSSSSSSLTTSSLIGNLVFSSRNQSLSVKVQALAAETEQPKWWERKAGPNMIDITSAEQFLNALKDAGDRLVIVDFYGTWCGSCRAMFPKLCKTAKEHPDILFLKVNFDENKSLCKSLNVKVLPYFHFYRGADGQVESFSCSLAKFQKLREAIERHNVGSISNISSSASEKVEDSSE

SEQ ID NO: 42546 - protein, 127 aa, Arabidopsis thaliana
  peptide (1)..(127): Ceres Seq. ID no. 12422555
MIDITSAEQFLNALKDAGDRLVIVDFYGTWCGSCRAMFPKLCKTAKEHPDILFLKVNFDENKSLCKSLNVKVLPYFHFYRGADGQVESFSCSLAKFQKLREAIERHNVGSISNISSSASEKVEDSSE

SEQ ID NO: 42547 - DNA, 847 bp, Arabidopsis thaliana
  misc_feature (1)..(847): Ceres Seq. ID no. 12488557
  misc_feature (1)..(847): Ortholog of  Ceres SEQ ID NO 13646254 as cited in SEQ ID NO 20314
  misc_feature (1)..(847): Ortholog of  Ceres SEQ ID NO 13639196 as cited in SEQ ID NO 56195
  misc_feature (1)..(847): Ortholog of  Ceres SEQ ID NO 15179459 as cited in SEQ ID NO 0
actcactcaagaagacatctaaagccatcaaaaatatatccatagaagcttcatcgaaatggcgaatcaagcagctgctgcagcattcttccttttcgctttagccgtcttctccaacttggagctctcagcttcttcacttgtcagtggcaagatctcttgccttgactgccaccgcgatttcgacttctcaggcattaaggtcctccttaaatgcgacggagagaagaaacaaataaccgcggtggcagctgcagacggatctttccggtcagtgcttccaacggctgacaaaaaaggctccataaattgtcttgcaaagctcttgggaggccctgagcaactctatgctcacaaacacaacttggtctctgaattggtcaaatctaaacacgattccaaagttttaactacctcaaacccacttgccttctctctctcctgccccaaaccatcccgagatgatatcggaagtatgatcggagattccaagactattaattttccgggggcaggaggttttggattcccacctgccagcttctttcccttcttaccaatcattggtatcccatgatttaaataagtgttacttttaagtccttaaagacatatgtatacatatgttttgttgtttacgtgaatgaagccagccaagacaagacacaaatatttagcaaattacattactttgtttagtgagatataaggtttgtttatgagctaagaaaatgttatttattggctttatttagtttaaatcagttgcttttgtatcaagtttgtaataagaaggttgggttaatccaacaacatacgctttattgtgaacattcatgcttctatg

SEQ ID NO: 42548 - protein, 172 aa, Arabidopsis thaliana
  peptide (1)..(172): Ceres Seq. ID no. 12488558
MANQAAAAAFFLFALAVFSNLELSASSLVSGKISCLDCHRDFDFSGIKVLLKCDGEKKQITAVAAADGSFRSVLPTADKKGSINCLAKLLGGPEQLYAHKHNLVSELVKSKHDSKVLTTSNPLAFSLSCPKPSRDDIGSMIGDSKTINFPGAGGFGFPPASFFPFLPIIGIP

SEQ ID NO: 42549 - DNA, 1110 bp, Arabidopsis thaliana
  misc_feature (1)..(1110): Ceres Seq. ID no. 13504710
  misc_feature (1)..(1110): Ortholog of  Ceres SEQ ID NO 13595655 as cited in SEQ ID NO 56768
gccgtcttttatctctttaccggtaagagaagccggtttcagatttgatcaattcgaagaattgtggctttcgttcgttgggtgaatccttgcttcgtcctttttgatagattgctactgtgttttcgaggaagttgtgtggagatagttagagagatttatgagatttcaagaggggttattataacgcacgcatggtgttcgacggaaagccgcagagaagttttgttgctatccgatttgactgagactcaaagtttgaaaattgttacttgggtattgagaaagctaaccttgggcaggttcgtatatgagttgggagtaaaacgacggtgatacatttgactgtttttcaactaaactagctttgaaatggtgagcttgtctgtttcgaataagagatacacttacatacacgaaagtggaagtaagtcaactagagaagccattgatattcaccatgtgattatcaacggaagcagcggaactggttatgcccgtcgttgggggcttggtttcttccttgtgtttctggcgagttctatgtactttttgcttggaaaggacaatccagctagaactctttcttggggctgccttttaagtggtttcttggttatgctacatagtcgcaagttcgtcaagaaagaatctgtgataatcttgccaaccttcgggatccaacttgaaactcaatatttaagtggaaaaactgtctccaggtttatccctattgacaagattttgaagcctgtgttggtcgaatgtgtcactcccattacgtgttactggagtctctctttatttcttcgtggtgaagaacaacttacattggtgtttaaggaactgcgtcctccattgaagatgttggttcccatttggaaagcattgtgtgctgctatcggtacagaccaccaaagtgaaacgatagctgaagaagaacatgatgtatctagttaactgcagttgtgattagagaacttgtagatttgttacttgttgttggcagttttgtttggaagatgatcacacaatatgttctgtaatgggagaattgacttgacacaaaaaaagaaaaaagaaaaaaactctttgagtggtgaacatttc

SEQ ID NO: 42550 - protein, 195 aa, Arabidopsis thaliana
  peptide (1)..(195): Ceres Seq. ID no. 13504711
MVSLSVSNKRYTYIHESGSKSTREAIDIHHVIINGSSGTGYARRWGLGFFLVFLASSMYFLLGKDNPARTLSWGCLLSGFLVMLHSRKFVKKESVIILPTFGIQLETQYLSGKTVSRFIPIDKILKPVLVECVTPITCYWSLSLFLRGEEQLTLVFKELRPPLKMLVPIWKALCAAIGTDHQSETIAEEEHDVSS

SEQ ID NO: 42551 - protein, 138 aa, Arabidopsis thaliana
  peptide (1)..(138): Ceres Seq. ID no. 13504712
MYFLLGKDNPARTLSWGCLLSGFLVMLHSRKFVKKESVIILPTFGIQLETQYLSGKTVSRFIPIDKILKPVLVECVTPITCYWSLSLFLRGEEQLTLVFKELRPPLKMLVPIWKALCAAIGTDHQSETIAEEEHDVSS

SEQ ID NO: 42552 - protein, 113 aa, Arabidopsis thaliana
  peptide (1)..(113): Ceres Seq. ID no. 13504713
MLHSRKFVKKESVIILPTFGIQLETQYLSGKTVSRFIPIDKILKPVLVECVTPITCYWSLSLFLRGEEQLTLVFKELRPPLKMLVPIWKALCAAIGTDHQSETIAEEEHDVSS

SEQ ID NO: 42553 - DNA, 822 bp, Arabidopsis thaliana
  misc_feature (1)..(822): Ceres Seq. ID no. 12326710
  misc_feature (1)..(822): Ortholog of  Ceres SEQ ID NO 13597604 as cited in SEQ ID NO 65175
ctctcagattttacaggcaaatcgatttcactcgaagactggttgttgtgtaattgtgttcgtcgtctcaggttttcaatatctgtctctttgagggttcaagaagttccatggagtagctgagaatcctacagagaaaatggctaacaatttgaaagaatatttggctaagaattgtgtttcgaaagatgtgaatcttggaagttgtactgtgcttgagactgctggtcaaggagctcttgcttctctctatcagttgctacaatccgcggttaacacaaaagagtcagagtcgttgaccggaaaaaccatatgggttcactttggagttaatagtggcgctacaaaatttgcaattgagcaacaagctgtgaatgaagcgacttttcgttgtcctgatgaattgggttggaaacctcagaatttgccaattgttccctctgatggtccaatctcaactgtaagaaagactaatcttcctgttgaagagataacaaaggcgttggagaagaatggctttgaagtgataacatcagatgatgcaggtcgatttgtgtgtaactatgtctattaccattctctgagatttgcagagcagaataagaccagatcactctttgttcacgttcctcttttcgttgccgtggatgaagaaacccaaatgagattcactgtttctctgctggaggtactcgcttctatttgcaagtaatgttatcccaaatgtggctattcttattcatgaaatgtgcatcatggaccgattgtctccccacgggaaaaattcgcttatcaataaatggaatataagttcacttctct

SEQ ID NO: 42554 - protein, 190 aa, Arabidopsis thaliana; identical to SEQ ID NO: 22925
  peptide (1)..(190): Ceres Seq. ID no. 12326711

SEQ ID NO: 42555 - DNA, 1055 bp, Arabidopsis thaliana
  misc_feature (1)..(1055): Ceres Seq. ID no. 12324495
  misc_feature (1)..(1055): Ortholog of  Ceres SEQ ID NO 12608127 as cited in SEQ ID NO 57579
  misc_feature (1)..(1055): Ortholog of  Ceres SEQ ID NO 12634558 as cited in SEQ ID NO 0
  misc_feature (1)..(1055): Ortholog of  Ceres SEQ ID NO 15180294 as cited in SEQ ID NO 0
acttgtgatcaaaatctcaagatccaaaactcttctttcaaacatggaccgaaccatgtttctttccctgacaatagcctcactcttggtcggagtcgtctcagctggtgactggaacatcttgaaccaactcagaggactcggctcatcgtcaagccaaaatggtatcgtttctaaaggtatcaagacggacctgaaaggatactgtgaaagctggaggatcaacgtggaagttcacaacatcagaaagttcgatgtggtgcctcaagagtgtgtatcgcacattaaggattacatgacgtcatcgcagtacaaggatgacgtggcgagaaccgttgatgaggtcattcttcatttcgggagcatgtgctgtagcaagtctaagtgtgacggcatggacgcttggatctttgatatcgatgacacgcttctctctaccatcccttaccacaagaaaaatggcttcttcggaggagagaaattgaactcaacgaaattcgaggattggatacagaagaagaaagcaccagcagtgccacacatgaagaaattgtaccacgacatcagagaaagaggcattaagatcttcttgatctcttcccggaaagaatatctcaggtctgccaccgtcgacaacctcatccaagccggttactatggctggtccaacctaatgctcagggggctagaagatcagcaaaaggaagtgaaacaatacaagtcagagaagagaaaatggctaatgagtcttggttacagagtctggggagtgatgggtgaccaatggagtagctttgcaggctgtcctcttcccaggagaaccttcaagctccctaactccatctactatgtcgcctgatcaaaaccaaacacaaaactttgatttagcttcaaacaaaaagaagaatccacgaataagagagagctgttttgaatctgtttcttgtttattttcccctttttcgtgtcatattatattgagagacttatgcatccaaaagaacaaacaaatggttatatgtaacagagagaaatcaaatcaaaatcacacatta

SEQ ID NO: 42556 - protein, 285 aa, Arabidopsis thaliana
  peptide (1)..(285): Ceres Seq. ID no. 12324496
LVIKISRSKTLLSNMDRTMFLSLTIASLLVGVVSAGDWNILNQLRGLGSSSSQNGIVSKGIKTDLKGYCESWRINVEVHNIRKFDVVPQECVSHIKDYMTSSQYKDDVARTVDEVILHFGSMCCSKSKCDGMDAWIFDIDDTLLSTIPYHKKNGFFGGEKLNSTKFEDWIQKKKAPAVPHMKKLYHDIRERGIKIFLISSRKEYLRSATVDNLIQAGYYGWSNLMLRGLEDQQKEVKQYKSEKRKWLMSLGYRVWGVMGDQWSSFAGCPLPRRTFKLPNSIYYVA

SEQ ID NO: 42557 - protein, 271 aa, Arabidopsis thaliana
  peptide (1)..(271): Ceres Seq. ID no. 12324497
MDRTMFLSLTIASLLVGVVSAGDWNILNQLRGLGSSSSQNGIVSKGIKTDLKGYCESWRINVEVHNIRKFDVVPQECVSHIKDYMTSSQYKDDVARTVDEVILHFGSMCCSKSKCDGMDAWIFDIDDTLLSTIPYHKKNGFFGGEKLNSTKFEDWIQKKKAPAVPHMKKLYHDIRERGIKIFLISSRKEYLRSATVDNLIQAGYYGWSNLMLRGLEDQQKEVKQYKSEKRKWLMSLGYRVWGVMGDQWSSFAGCPLPRRTFKLPNSIYYVA

SEQ ID NO: 42558 - protein, 267 aa, Arabidopsis thaliana
  peptide (1)..(267): Ceres Seq. ID no. 12324498
MFLSLTIASLLVGVVSAGDWNILNQLRGLGSSSSQNGIVSKGIKTDLKGYCESWRINVEVHNIRKFDVVPQECVSHIKDYMTSSQYKDDVARTVDEVILHFGSMCCSKSKCDGMDAWIFDIDDTLLSTIPYHKKNGFFGGEKLNSTKFEDWIQKKKAPAVPHMKKLYHDIRERGIKIFLISSRKEYLRSATVDNLIQAGYYGWSNLMLRGLEDQQKEVKQYKSEKRKWLMSLGYRVWGVMGDQWSSFAGCPLPRRTFKLPNSIYYVA

SEQ ID NO: 42559 - DNA, 1860 bp, Arabidopsis thaliana
  misc_feature (1)..(1860): Ceres Seq. ID no. 12336491
  misc_feature (1)..(1860): Ortholog of  Ceres SEQ ID NO 14310886 as cited in SEQ ID NO 54536
  misc_feature (1)..(1860): Ortholog of  Ceres SEQ ID NO 14315515 as cited in SEQ ID NO 57454
acaatcagtctctttctctaaaccttcaccaatttctctctctctctcttgcccttttacacagccatttgttagattcctctctcaataagcctctcttctcttttctattggagtttttgcattagactgattagctcaaagcaaaacccataaaccaaaatcttctctttgtgttcttgtttttttcatttctccaatttttctttgtggaggaggtttttcactttttgtttttctgggtttttattggctttcttctgcaaaaaccataactttattttttctgggtttttcttcgtaaagaagcttcccaaaacccagttttttgtataagctcaattagtagcaaacaagaaaaaacaatcttaaactcaatttcacaaaatctctgattcttgtgaaaatttgtatattgcaaaactttggaaaaaaaagagaaaaaatatggggaagcaaggtccttgctatcactgtggagttacaagtacacctctatggagaaacgggccaccagagaagccggtgttgtgcaatgcgtgtggttcgaggtggagaactaaaggatcattagtaaactacacacctcttcatgctcgtgctgaaggtgatgagactgagattgaggatcatagaactcaaacggtgatgattaagggaatgtctttgaacaaaaagattcccaagaggaaaccatatcaagaaaacttcacagtgaaaagagctaacttggaattccataccggtttcaagaggaaggctctggatgaagaagctagcaatagatcgagttcaggatcggttgtatcaaactccgagagctgtgcacaatctaatgcgtgggactcgacttttccttgtaagagaaggacatgtgtgggacgtccaaaggcagcttcttctgttgaaaagctcacaaaggatctttatactattctacaagaacagcaatcttcttgtctctctggtacttcagaggaagatttgctttttgagaatgaaacaccaatgctgttaggacatggtagtgttcttatgagagatcctcactcaggtgctcgagaagaggaatctgaagctagctcactcttagttgagagcagcaagtcttcatcagttcattctgttaaatttggtggaaaagcaatgaagcaggagcaagtgaagaggagcaaatctcaagtcttaggaagacatagttcactactctgtagcatagatttgaaggatgttttcaactttgatgagttcatagaaaatttcacagaggaagaacagcaaaaactgatgaaattacttcctcaagttgactctgttgatcgtcctgatagcctcagaagcatgtttgagagttctcaattcaaagagaacttatccttgtttcagcaacttgtggcagatggtgtttttgagacaaattcgtcttatgcaaaacttgaagacattaagacacttgcaaagcttgctttatcagatcctaacaaatcccatttgttggaaagctattacatgctcaagagaagagagattgaagactgtgttactacaacatcaagggtctcaagcttgagtccatcgaataataatagtcttgtaaccattgaaagaccttgtgaaagcttaaaccaaaacttctcagagacaagaggtgtgatgagaagcccgaaagaagtgatgaagattagatcaaagcacaccgaagagaatttagagaatagtgtatcttcctttaaacctgtgagctgtggtggacctctggtgtttagctatgaagataatgatatttctgatcaggatcttcttcttgatgtgccgtcgaacggctcattccctcaagcagagcttctaaacatgatatga

SEQ ID NO: 42560 - protein, 470 aa, Arabidopsis thaliana
  peptide (1)..(470): Ceres Seq. ID no. 12336492
MGKQGPCYHCGVTSTPLWRNGPPEKPVLCNACGSRWRTKGSLVNYTPLHARAEGDETEIEDHRTQTVMIKGMSLNKKIPKRKPYQENFTVKRANLEFHTGFKRKALDEEASNRSSSGSVVSNSESCAQSNAWDSTFPCKRRTCVGRPKAASSVEKLTKDLYTILQEQQSSCLSGTSEEDLLFENETPMLLGHGSVLMRDPHSGAREEESEASSLLVESSKSSSVHSVKFGGKAMKQEQVKRSKSQVLGRHSSLLCSIDLKDVFNFDEFIENFTEEEQQKLMKLLPQVDSVDRPDSLRSMFESSQFKENLSLFQQLVADGVFETNSSYAKLEDIKTLAKLALSDPNKSHLLESYYMLKRREIEDCVTTTSRVSSLSPSNNNSLVTIERPCESLNQNFSETRGVMRSPKEVMKIRSKHTEENLENSVSSFKPVSCGGPLVFSYEDNDISDQDLLLDVPSNGSFPQAELLNMI

SEQ ID NO: 42561 - protein, 403 aa, Arabidopsis thaliana
  peptide (1)..(403): Ceres Seq. ID no. 12336493
MIKGMSLNKKIPKRKPYQENFTVKRANLEFHTGFKRKALDEEASNRSSSGSVVSNSESCAQSNAWDSTFPCKRRTCVGRPKAASSVEKLTKDLYTILQEQQSSCLSGTSEEDLLFENETPMLLGHGSVLMRDPHSGAREEESEASSLLVESSKSSSVHSVKFGGKAMKQEQVKRSKSQVLGRHSSLLCSIDLKDVFNFDEFIENFTEEEQQKLMKLLPQVDSVDRPDSLRSMFESSQFKENLSLFQQLVADGVFETNSSYAKLEDIKTLAKLALSDPNKSHLLESYYMLKRREIEDCVTTTSRVSSLSPSNNNSLVTIERPCESLNQNFSETRGVMRSPKEVMKIRSKHTEENLENSVSSFKPVSCGGPLVFSYEDNDISDQDLLLDVPSNGSFPQAELLNMI

SEQ ID NO: 42562 - protein, 399 aa, Arabidopsis thaliana
  peptide (1)..(399): Ceres Seq. ID no. 12336494
MSLNKKIPKRKPYQENFTVKRANLEFHTGFKRKALDEEASNRSSSGSVVSNSESCAQSNAWDSTFPCKRRTCVGRPKAASSVEKLTKDLYTILQEQQSSCLSGTSEEDLLFENETPMLLGHGSVLMRDPHSGAREEESEASSLLVESSKSSSVHSVKFGGKAMKQEQVKRSKSQVLGRHSSLLCSIDLKDVFNFDEFIENFTEEEQQKLMKLLPQVDSVDRPDSLRSMFESSQFKENLSLFQQLVADGVFETNSSYAKLEDIKTLAKLALSDPNKSHLLESYYMLKRREIEDCVTTTSRVSSLSPSNNNSLVTIERPCESLNQNFSETRGVMRSPKEVMKIRSKHTEENLENSVSSFKPVSCGGPLVFSYEDNDISDQDLLLDVPSNGSFPQAELLNMI

SEQ ID NO: 42563 - DNA, 888 bp, Arabidopsis thaliana
  misc_feature (1)..(888): Ceres Seq. ID no. 12326707
  misc_feature (1)..(888): Ortholog of  Ceres SEQ ID NO 13656286 as cited in SEQ ID NO 69168
attcttctttatctctctctctctctcaagactattgagcttctttcttttttcctgagtcttttagtctgatctcttacaagaatggcgttcgcaggaacaacccagaaatgcatggcatgtgacaaaacagtttatcttgtcgacaagttaaccgccgataaccgggtctaccacaaagcttgtttccgatgtcaccattgcaaaggaactctcaagcttagcaattacaactcctttgaaggagttctctactgcagaccacatttcgatcaaaacttcaagagaactggaagtcttgagaaaagcttcgaagggacaccaaagattgggaaacctgataggcctttggagggagagagacctgctggaaccaaagtttcgaatatgtttggtggaacacgagagaaatgcgttggttgcgacaaaaccgtgtatccaattgagaaggtatcggtgaatggaacattgtaccacaagagctgcttcaagtgtacacatggaggctgcacgataagcccttcgaattacatagctcacgagggtaagctatattgcaagcatcatcatattcagctgatcaaggagaaaggaaacttgagccagctcgaaggaggaggagagaatgccgccaaggacaaagtcgtcgctgcttaaagaaacaattcaatctctctgggatgattttgactatcgaagaatcaaaagagtcactacttctccatcgatcgataacatatattggttttgtttcttcctacgtttgtgtttttctttttggtctttaatatgttttttttttttttgggacctttgttcactcttttattgggtttcttgaaatgaaactagagaaacaaagaaataatggatgtttgcttatgagat

SEQ ID NO: 42564 - protein, 190 aa, Arabidopsis thaliana; identical to SEQ ID NO: 24619
  peptide (1)..(190): Ceres Seq. ID no. 12326708

SEQ ID NO: 42565 - protein, 180 aa, Arabidopsis thaliana; identical to SEQ ID NO: 24620
  peptide (1)..(180): Ceres Seq. ID no. 12326709

SEQ ID NO: 42566 - DNA, 1426 bp, Arabidopsis thaliana
  misc_feature (1)..(1426): Ceres Seq. ID no. 13489571
  misc_feature (1)..(1426): Ortholog of  Ceres SEQ ID NO 15226004 as cited in SEQ ID NO 56808
aagtataacaaagaacccaacttgtgaacctaaattgctgtgaaagagatcgttcttctctctgtttcacataaaaggaaaacataagaaaagaaaaaaaaaaatctttctctttcacaatcttaatttctgctcaccatcaaggcaagtttccttcttttgatcctcaacaatttccattgctactaaaaatatcttctttccaaaacaattcacgcatttacgtttttctcaatctttacatatatggtaaccaactcttattccattcctctgtaactcacacaaattcctgtccaaaaattagttttttcttttcatgtgatgtgagaatttgggttacgagaaagatgaagactattagtggattaggtattgggttaagtttaatgtttgggtttcttctattagcacttgttggagaagtctactatcttctaagatgtaagaagcacaagaagagagtcataagccaagagagtgaagaagagaaagaagaagaacaacaacaaaacggatacgctaaagaactaatccagctcttctgcttcaaaaaacctcaatctctgcagcaaaacaatggaggaagagaaggtgaagtctcaatgaatgaagatgggaatccagatttagaacttgggttgatgaaacacttgaatggaggagatctagggtttgaagcagagcttatgaagcttcataaccagaggtttctattcacaatcatggaagagacaaaagcagatttggaatctgaagatgggggtaaatcaagattaggttcaagatcaagaagaagaagcttgagtgatgttcctaatgactgtaatacccctggattcactccattggcttctcctaaaaagtcatcatctcctctggagtcttatccacaccatggattcaatcctctgtttgagtcagacggtgagcttgagtttaacaagtttttcaggtcctcttcttcacctccaccgaagtttaagttcatgagagatgctgaagagaagctaaggaagagattgattgaagaagccaaaagaagagaactctcgattgtaacagaaggttcgtttctcaagtttatgaatcctgcgatgaacagagagaagaaacagagtattcaagaatgtgatgaaacggtgtcgttttctccttcttcttcctcatcaggtacaacaattacaaatcttagaacgttagtggttgtttagtattagcatctctgtggctttactcttttaatttttatttttggttgaatttttgtttccaaaaatttcaattatattgtgtgaaaattctatctttcctttctctcattcttgttatttaggaatgatttcttctgtacgtatcaatctgaaattttttgcagatgcttgttttgttttcgtctaagaaatcttcttaagatatagaaatt

SEQ ID NO: 42567 - protein, 287 aa, Arabidopsis thaliana
  peptide (1)..(287): Ceres Seq. ID no. 13489572
MKTISGLGIGLSLMFGFLLLALVGEVYYLLRCKKHKKRVISQESEEEKEEEQQQNGYAKELIQLFCFKKPQSLQQNNGGREGEVSMNEDGNPDLELGLMKHLNGGDLGFEAELMKLHNQRFLFTIMEETKADLESEDGGKSRLGSRSRRRSLSDVPNDCNTPGFTPLASPKKSSSPLESYPHHGFNPLFESDGELEFNKFFRSSSSPPPKFKFMRDAEEKLRKRLIEEAKRRELSIVTEGSFLKFMNPAMNREKKQSIQECDETVSFSPSSSSSGTTITNLRTLVVV

SEQ ID NO: 42568 - protein, 274 aa, Arabidopsis thaliana
  peptide (1)..(274): Ceres Seq. ID no. 13489573
MFGFLLLALVGEVYYLLRCKKHKKRVISQESEEEKEEEQQQNGYAKELIQLFCFKKPQSLQQNNGGREGEVSMNEDGNPDLELGLMKHLNGGDLGFEAELMKLHNQRFLFTIMEETKADLESEDGGKSRLGSRSRRRSLSDVPNDCNTPGFTPLASPKKSSSPLESYPHHGFNPLFESDGELEFNKFFRSSSSPPPKFKFMRDAEEKLRKRLIEEAKRRELSIVTEGSFLKFMNPAMNREKKQSIQECDETVSFSPSSSSSGTTITNLRTLVVV

SEQ ID NO: 42569 - protein, 202 aa, Arabidopsis thaliana
  peptide (1)..(202): Ceres Seq. ID no. 13489574
MNEDGNPDLELGLMKHLNGGDLGFEAELMKLHNQRFLFTIMEETKADLESEDGGKSRLGSRSRRRSLSDVPNDCNTPGFTPLASPKKSSSPLESYPHHGFNPLFESDGELEFNKFFRSSSSPPPKFKFMRDAEEKLRKRLIEEAKRRELSIVTEGSFLKFMNPAMNREKKQSIQECDETVSFSPSSSSSGTTITNLRTLVVV

SEQ ID NO: 42570 - DNA, 1668 bp, Arabidopsis thaliana
  misc_feature (1)..(1668): Ceres Seq. ID no. 12331175
  misc_feature (1)..(1668): Ortholog of  Ceres SEQ ID NO 14301587 as cited in SEQ ID NO 66080
atctgcattgttctccgcctctctctctcaaactcttcagtttgcaaaacccttaagaaggtgtgaattagtaagtaatggggaagaagaagtttattgataagaaaaaggcggcgactttcgagttgtgtcctcgtgatacgtcagacccaagatacagtgatgcaccaggtggtgataagatcttcttacgagttgatcaaaaccctgttaacatcaatggtttcattgaagaagatgaagaagattttagagttagggtatcctgatgatggttataattacttggagcatttgagagagattaagaatactggtggtggttctaatttctatgtgaatcctaagtatgaggttgctcagttacctcgtgatgttaaggcttatgatgcgtctcgtgttaagatctctggtatggtgaatgaagaaggtaatgataataagttgatgtatagtgttgcgtccaagactgttaacgtcaaggtgcagaaagctattgatcctgaagttgctgcgttgcttgaaaacagtgatgggtctgagtttggttctgatgttgaggatttggaagaagattttgttgttcaagctaatcttactcaaaagggtgaatcttctggtgtgagcaatggagagctcgagttttctgtaagacgtgaggttagagaaagagaaagtgatgaacctgtggctgaaaacccgagagttcctcgtcaaattgatgagctatttgatcagctcgaactcaatgaatatggaagtgatagtgacggtgatggttacatagctgaagatggagaagaagaagaagaagaagacttcatggctcaagaagttcagaatcttattcatgggaaggcaaaagattatgagcttgaagaaaaatatatgaaccctgcggatatactgaagaacagtgactctgtcagagataaagaggaagtggacactgctgctcatgttatccgccgaactgtagaatatggtgaaaattttgataacgggaatgaagatgaatttgtagagctgactgaagaaagcagcgatgaaagcgagaagcatgattgtgaaaccatagtctcaacatactcgaatctcgataacctccctggtaaaatccttgctgcagagtcagctaggcagaagaagctgagtgaaacattagctaacgcattgagttcaaatggaagaatcattaatctccaagggagagagaggattcctgtcgagtttttacctggtaggagagctgaacaaaccgatgtcaaagcggaaatcccaaaagctgaaccgatcaagaggaagactcatggtcaagagtcgaaagaagagaagaaagagcggaaaaatgctgtaaaagccgaaaagcgagaagcaaggataattaagaaacagacaaagatgctgtattgcggtgaaacgcagcgtgctcaaagagctgttgctacctctggtccatcgtcgagacctctaaaataatatgttactaaggtaaaacaaaacaattctcagactgtttaaaaccagtttttccagccatttcgtgtaatatttgctgtttgtttttttctttttcatcaagatttgaaaatcttgaatcttgttttggatgtggacgttttgaatattatttattacttttactagtctaatttcgagaaagtgatg

SEQ ID NO: 42571 - protein, 438 aa, Arabidopsis thaliana
  peptide (1)..(438): Ceres Seq. ID no. 12331176
MHQVVIRSSYELIKTLLTSMVSLKKMKKILELGYPDDGYNYLEHLREIKNTGGGSNFYVNPKYEVAQLPRDVKAYDASRVKISGMVNEEGNDNKLMYSVASKTVNVKVQKAIDPEVAALLENSDGSEFGSDVEDLEEDFVVQANLTQKGESSGVSNGELEFSVRREVRERESDEPVAENPRVPRQIDELFDQLELNEYGSDSDGDGYIAEDGEEEEEEDFMAQEVQNLIHGKAKDYELEEKYMNPADILKNSDSVRDKEEVDTAAHVIRRTVEYGENFDNGNEDEFVELTEESSDESEKHDCETIVSTYSNLDNLPGKILAAESARQKKLSETLANALSSNGRIINLQGRERIPVEFLPGRRAEQTDVKAEIPKAEPIKRKTHGQESKEEKKERKNAVKAEKREARIIKKQTKMLYCGETQRAQRAVATSGPSSRPLK

SEQ ID NO: 42572 - protein, 419 aa, Arabidopsis thaliana
  peptide (1)..(419): Ceres Seq. ID no. 12331177
MVSLKKMKKILELGYPDDGYNYLEHLREIKNTGGGSNFYVNPKYEVAQLPRDVKAYDASRVKISGMVNEEGNDNKLMYSVASKTVNVKVQKAIDPEVAALLENSDGSEFGSDVEDLEEDFVVQANLTQKGESSGVSNGELEFSVRREVRERESDEPVAENPRVPRQIDELFDQLELNEYGSDSDGDGYIAEDGEEEEEEDFMAQEVQNLIHGKAKDYELEEKYMNPADILKNSDSVRDKEEVDTAAHVIRRTVEYGENFDNGNEDEFVELTEESSDESEKHDCETIVSTYSNLDNLPGKILAAESARQKKLSETLANALSSNGRIINLQGRERIPVEFLPGRRAEQTDVKAEIPKAEPIKRKTHGQESKEEKKERKNAVKAEKREARIIKKQTKMLYCGETQRAQRAVATSGPSSRPLK

SEQ ID NO: 42573 - protein, 413 aa, Arabidopsis thaliana
  peptide (1)..(413): Ceres Seq. ID no. 12331178
MKKILELGYPDDGYNYLEHLREIKNTGGGSNFYVNPKYEVAQLPRDVKAYDASRVKISGMVNEEGNDNKLMYSVASKTVNVKVQKAIDPEVAALLENSDGSEFGSDVEDLEEDFVVQANLTQKGESSGVSNGELEFSVRREVRERESDEPVAENPRVPRQIDELFDQLELNEYGSDSDGDGYIAEDGEEEEEEDFMAQEVQNLIHGKAKDYELEEKYMNPADILKNSDSVRDKEEVDTAAHVIRRTVEYGENFDNGNEDEFVELTEESSDESEKHDCETIVSTYSNLDNLPGKILAAESARQKKLSETLANALSSNGRIINLQGRERIPVEFLPGRRAEQTDVKAEIPKAEPIKRKTHGQESKEEKKERKNAVKAEKREARIIKKQTKMLYCGETQRAQRAVATSGPSSRPLK

SEQ ID NO: 42574 - DNA, 1275 bp, Arabidopsis thaliana
  misc_feature (1)..(1275): Ceres Seq. ID no. 12338095
  misc_feature (1)..(1275): Ortholog of  Ceres SEQ ID NO 15176596 as cited in SEQ ID NO 55168
  misc_feature (1)..(1275): Ortholog of  Ceres SEQ ID NO 14301576 as cited in SEQ ID NO 62362
aatctttttttttttgcttattatttttttgactttgatctcccatcagttcatcttcttcttcttcttctgatcaaccatggctgctgctataagtgctgcagtctctttaccttcctccaagtcatcctctctcctcaccaaaatctcctctgtatcccctcaaaggattttcctcaagaagagcacagtgtgttacagaagagttgtgtcagtgaaggctcaggtgacaacagatactaccgaggcaccaccagttaaagtagtcaaggagtctaagaaacaggaagaagggattgttgtcaacaaattcaaacctaagaacccttacactggtcgctgccttttgaacaccaagatcaccggtgatgacgctcccggtgagacttggcacattgtcttcaccaccgaaggtgaggttccgtatagagaaggacaatcgataggagtgattccagagggaatagacaagaacgggaagccgcacaagctcaggctttactctatcgcgagtagtgccattggtgactttggagactccaagaccgtttctctctgtgtcaagagactagtttacacaaatgatggcggagagattgttaagggggtctgctccaacttcttgtgtgacttgaagccgggtgatgaagctaagatcactggacctgttggcaaggaaatgcttatgccaaaagaccccaatgccaccatcatcatgcttggaacaggaactggaatagctccattcagatcatttttgtggaaaatgttctttgaggagcacgaggactacaagttcaatggtttggcgtggcttttcttgggtgtacccagaagcagctcactgctatacaaggaggagtttgagaagatgaaggagaagaacccagacaacttcaggctggactttgcggtgagcagagagcagacgaacgagaagggagagaaaatgtacattcagacaagaatggcagagtatgcagaaagagctgtgggagttgctgaagaaagacaacacctttgtttacatgtgtggtcttaagggtatggagaagggtatcgatgacattatggtctcgcttgctgctaaagatgggatcgattggttggagtacaagaagcaattgaagaggagtgaacagtggaatgttgaagtctactaaggaagcttctgagggagtaattatataatgtagataaaaagcttcagatgcattgtgaaatcttcatatctgcttcttttttctttctcaaggattttcaatcaaaacatcc

SEQ ID NO: 42575 - protein, 320 aa, Arabidopsis thaliana
  peptide (1)..(320): Ceres Seq. ID no. 12338096
MAAAISAAVSLPSSKSSSLLTKISSVSPQRIFLKKSTVCYRRVVSVKAQVTTDTTEAPPVKVVKESKKQEEGIVVNKFKPKNPYTGRCLLNTKITGDDAPGETWHIVFTTEGEVPYREGQSIGVIPEGIDKNGKPHKLRLYSIASSAIGDFGDSKTVSLCVKRLVYTNDGGEIVKGVCSNFLCDLKPGDEAKITGPVGKEMLMPKDPNATIIMLGTGTGIAPFRSFLWKMFFEEHEDYKFNGLAWLFLGVPRSSSLLYKEEFEKMKEKNPDNFRLDFAVSREQTNEKGEKMYIQTRMAEYAERAVGVAEERQHLCLHVWS

SEQ ID NO: 42576 - DNA, 1925 bp, Arabidopsis thaliana
  misc_feature (1)..(1925): Ceres Seq. ID no. 12336250
  misc_feature (1)..(1925): Ortholog of  Ceres SEQ ID NO 14315134 as cited in SEQ ID NO 59476
  misc_feature (1)..(1925): Ortholog of  Ceres SEQ ID NO 12616332 as cited in SEQ ID NO 63449
  misc_feature (1)..(1925): Ortholog of  Ceres SEQ ID NO 13597498 as cited in SEQ ID NO 64648
  misc_feature (1)..(1925): Ortholog of  Ceres SEQ ID NO 14308053 as cited in SEQ ID NO 67790
atatactttctctgtttacattctcgtttccgaggagaaaagtctcgatcttctggatctggggtttggtttggtttggggttgactcggttttgactcgggacaagtcgtctcgtgagatggatgtctctcgtttattagtatctctttgagagtctgtctttctgggttcaatagattcttatagtttcgcttagaaacacgcacaaaaagatgtcgttgaagcatcatcacagaggattagagctctctgcttcgaagagttttgtctcaaagaaatggactttatttctctgtatcggtttcttctgcgcaggaattctcttctccgacagaatgtggccagagcctgaatccaatgttgtatcaagggacacagtagcatcagatgaacggctgcggttagagtctgaggactgtgattcatcaaaaaagggtttaaagcgtgaatcgaaagacatccttggagatgtttacaagagtccagatgcaattcaaacgcttgataaaacgatttcaaagctggaaacagaactggccgatgcaagagctgcgcaagaatctatcatgaatggttcaccagtttctgatgactttaagctccctgaaactgtcactaaaagaaagtatctgatggttgttggtgttaatactgcgtttagcagcagaaagcgcagggattcagtccgtgctacttggatgcctcccggtgaggagagaaagaagctcgaggaagagaaagggatcgtgatgcggtttgtgataggccatagttctactcccggtggaattcttgatagagcgattcaggctgaagaaagtaaacatggagacttcttgaggctggatcatgttgaaggttatctcgagctgtcagcaaagactaaaacttactttaccacggcttttgcaatgtgggatgcagacttctacgtcaaagtcgatgatgatgtgcatgtaaatatagccacgcttggagcagaattagcaagataccggatgaagccccgagtgtacattggttgcatgaaatctggacctgttcttgctcagaaaggagtgagatatcatgaacccgaatactggaaatttggagaagagggtaacaaatacttccgccatgccacaggtcagctctatgcaatatccagggagttggcgtcttacatatcgataaaccaaaacgtacttcacaaatatgtgaatgaagatgtctctttaggatcatggtttcttggattagatgtggagcatgtagatgaccgtaggctatgttgtggtacaacagattgtgagtggaaggcgcaggcgggcaacatctgtgttgcctcgttcgattggagctgcagtgggatttgtagatcagcggataggatgaaggatgttcatcgtaggtgtggagaaggtgaaaaggcccttctggctgcatctttctgaacacaataactaaagaaacacattgaggaagaagagtacagagacaaatccgctcgacagtctacacttggtagtatagacacacagtcaaactctctctatatatgtatgtatgtatgtatgtatgtatgtatcttgtgaactgagatgagaagggtgctttttgccctcctttcttgtttctttatgcttttctcaattctctgaaggtctggagttctttgcacacagaaaatgcagattttagctgcaaaggcggactccatgagtgcaccttcagagtcatttcattgaggcgttttctctgccttttgagcttttcttcttcatttctttttggattttgcctattttgttcattttttcctttgccatgattgtggtgaaacatgggttgtttatgtgtgtacttgaaacacaaaactagtcaataaagattagaccatatgagaagaaattcagaagcttaataaaaacttttcttggcg

SEQ ID NO: 42577 - protein, 407 aa, Arabidopsis thaliana
  peptide (1)..(407): Ceres Seq. ID no. 12336251
MSLKHHHRGLELSASKSFVSKKWTLFLCIGFFCAGILFSDRMWPEPESNVVSRDTVASDERLRLESEDCDSSKKGLKRESKDILGDVYKSPDAIQTLDKTISKLETELADARAAQESIMNGSPVSDDFKLPETVTKRKYLMVVGVNTAFSSRKRRDSVRATWMPPGEERKKLEEEKGIVMRFVIGHSSTPGGILDRAIQAEESKHGDFLRLDHVEGYLELSAKTKTYFTTAFAMWDADFYVKVDDDVHVNIATLGAELARYRMKPRVYIGCMKSGPVLAQKGVRYHEPEYWKFGEEGNKYFRHATGQLYAISRELASYISINQNVLHKYVNEDVSLGSWFLGLDVEHVDDRRLCCGTTDCEWKAQAGNICVASFDWSCSGICRSADRMKDVHRRCGEGEKALLAASF

SEQ ID NO: 42578 - protein, 366 aa, Arabidopsis thaliana
  peptide (1)..(366): Ceres Seq. ID no. 12336252
MWPEPESNVVSRDTVASDERLRLESEDCDSSKKGLKRESKDILGDVYKSPDAIQTLDKTISKLETELADARAAQESIMNGSPVSDDFKLPETVTKRKYLMVVGVNTAFSSRKRRDSVRATWMPPGEERKKLEEEKGIVMRFVIGHSSTPGGILDRAIQAEESKHGDFLRLDHVEGYLELSAKTKTYFTTAFAMWDADFYVKVDDDVHVNIATLGAELARYRMKPRVYIGCMKSGPVLAQKGVRYHEPEYWKFGEEGNKYFRHATGQLYAISRELASYISINQNVLHKYVNEDVSLGSWFLGLDVEHVDDRRLCCGTTDCEWKAQAGNICVASFDWSCSGICRSADRMKDVHRRCGEGEKALLAASF

SEQ ID NO: 42579 - protein, 289 aa, Arabidopsis thaliana
  peptide (1)..(289): Ceres Seq. ID no. 12336253
MNGSPVSDDFKLPETVTKRKYLMVVGVNTAFSSRKRRDSVRATWMPPGEERKKLEEEKGIVMRFVIGHSSTPGGILDRAIQAEESKHGDFLRLDHVEGYLELSAKTKTYFTTAFAMWDADFYVKVDDDVHVNIATLGAELARYRMKPRVYIGCMKSGPVLAQKGVRYHEPEYWKFGEEGNKYFRHATGQLYAISRELASYISINQNVLHKYVNEDVSLGSWFLGLDVEHVDDRRLCCGTTDCEWKAQAGNICVASFDWSCSGICRSADRMKDVHRRCGEGEKALLAASF

SEQ ID NO: 42580 - DNA, 920 bp, Arabidopsis thaliana
  misc_feature (1)..(920): Ceres Seq. ID no. 12339008
  misc_feature (1)..(920): Ortholog of  Ceres SEQ ID NO 14311659 as cited in SEQ ID NO 51212
  misc_feature (1)..(920): Ortholog of  Ceres SEQ ID NO 12635180 as cited in SEQ ID NO 0
gaccaaaaaaaaaactcaagagagactttgtggccatggcagcctctctccaatccaccgctacattcctccagtcggcgaagatcgccaccgctccttctcgcggaagttctcacctccgatcgactcaagccgtcggcaaatcttttgggctcgaaacttcctcggctcgcctcacttgctccttccagtctgactttaaggacttcaccggtaaatgctccgacgctgtcaaaatcgccggattcgctcttgccacctctgctctcgtcgtctcgggagcaagtgcggagggagctccaaagagattgacctatgacgagatcgaaggacccttcgaggttgcttcagacggaagcgtcaatttcaaggaagaagatggaatcgactatgctgcagtcacagtccaacttccaggaggtgaacgtgtgccattccttttcacagtcaaacagcttgactcctcaggcaaaccagacagcttcaccggaaaattcttggttccatcgtaccgtggctcttccttcttggacccaaagggccgtggtggatccacaggatatgacaacgccgtggcattgccagctggaggcagaggagacgaggaggagcttgtaaaggagaacgtgaagaacactgccgcttcagtgggagagatcactctgaaagtgacaaagagcaagccggagacaggagaggtgatcggagtgttcgagagtcttcagccgtcggatactgacttgggtgctaaggtaccaaaggatgtgaagatccaaggggtgtggtatggtcaacttgagtgatcatgttattatattttccgttgattgtgtttgatgataatgataacatcttttgatgctttcttcgtttatctctcttatataaaatgcacatgcctaagatcttgaattttctgc

SEQ ID NO: 42581 - protein, 266 aa, Arabidopsis thaliana
  peptide (1)..(266): Ceres Seq. ID no. 12339009
PKKKLKRDFVAMAASLQSTATFLQSAKIATAPSRGSSHLRSTQAVGKSFGLETSSARLTCSFQSDFKDFTGKCSDAVKIAGFALATSALVVSGASAEGAPKRLTYDEIEGPFEVASDGSVNFKEEDGIDYAAVTVQLPGGERVPFLFTVKQLDSSGKPDSFTGKFLVPSYRGSSFLDPKGRGGSTGYDNAVALPAGGRGDEEELVKENVKNTAASVGEITLKVTKSKPETGEVIGVFESLQPSDTDLGAKVPKDVKIQGVWYGQLE

SEQ ID NO: 42582 - protein, 255 aa, Arabidopsis thaliana
  peptide (1)..(255): Ceres Seq. ID no. 12339010
MAASLQSTATFLQSAKIATAPSRGSSHLRSTQAVGKSFGLETSSARLTCSFQSDFKDFTGKCSDAVKIAGFALATSALVVSGASAEGAPKRLTYDEIEGPFEVASDGSVNFKEEDGIDYAAVTVQLPGGERVPFLFTVKQLDSSGKPDSFTGKFLVPSYRGSSFLDPKGRGGSTGYDNAVALPAGGRGDEEELVKENVKNTAASVGEITLKVTKSKPETGEVIGVFESLQPSDTDLGAKVPKDVKIQGVWYGQLE

SEQ ID NO: 42583 - DNA, 1195 bp, Arabidopsis thaliana
  misc_feature (1)..(1195): Ceres Seq. ID no. 12395686
  misc_feature (1)..(1195): Ortholog of  Ceres SEQ ID NO 13523550 as cited in SEQ ID NO 58816
agagcaaagagtttttgtgtggctagtggcatcaatggagctctcgatctcacaatcaccgcgtgttcggttctcgtctctggcgcctcgtttcttagcagcttctcatcatcatcgtccttctgtgcatttagctgggaagtttataagcctccctcgagatgttcgcttcacgagcttatcaacttcaagaatgcggtccaaatttgtttcaaccaattatagaaaaatctcaatccgggcatgttctcaggttggtgctgctgagtctgatgatccagtgctggatagaattgcccggttccaaaatgcttgctggagatttcttagaccccatacaatccgcggaacagctttaggatccactgccttggtgacaagagctttgatagagaacactcatttgatcaaatggagtcttgtactaaaggcactttcaggtcttcttgctcttatttgtgggaatggttatatagtcggcatcaatcagatctacgacattggaatcgacaaagtgaacaaaccatacttgccaatagcagcaggagatctatcagtgcagtctgcttggttgttagtgatattttttgcgatagcagggcttttagttgtcggatttaactttggtccattcattacaagcctatactctcttggcctttttctgggaaccatctattctgttccacccctcagaatgaaaagattcccagttgcagcatttcttattattgccacggtacgaggtttccttcttaactttggtgtgtaccatgctacaagagctgctcttggacttccatttcagtggagtgcacctgtggcgttcatcacatcttttgtgacactgtttgcactggtcattgctattacaaaggaccttcctgatgttgaaggagatcgaaagttccaaatatcaaccctggcaacaaaacttggagtgagaaacattgcattcctcggttctggacttctgctagtaaattatgtttcagccatatcactagctttctacatgcctcaggtttttagaggtagcttgatgattcctgcacatgtgatcttggcttcaggcttaattttccagacatgggtactagaaaaagcaaactacaccaaggaagctatctcaggatattatcggtttatatggaatctcttctacgcagagtatctgttattccccttcctctag

SEQ ID NO: 42584 - protein, 397 aa, Arabidopsis thaliana
  peptide (1)..(397): Ceres Seq. ID no. 12395687
EQRVFVWLVASMELSISQSPRVRFSSLAPRFLAASHHHRPSVHLAGKFISLPRDVRFTSLSTSRMRSKFVSTNYRKISIRACSQVGAAESDDPVLDRIARFQNACWRFLRPHTIRGTALGSTALVTRALIENTHLIKWSLVLKALSGLLALICGNGYIVGINQIYDIGIDKVNKPYLPIAAGDLSVQSAWLLVIFFAIAGLLVVGFNFGPFITSLYSLGLFLGTIYSVPPLRMKRFPVAAFLIIATVRGFLLNFGVYHATRAALGLPFQWSAPVAFITSFVTLFALVIAITKDLPDVEGDRKFQISTLATKLGVRNIAFLGSGLLLVNYVSAISLAFYMPQVFRGSLMIPAHVILASGLIFQTWVLEKANYTKEAISGYYRFIWNLFYAEYLLFPFL

SEQ ID NO: 42585 - protein, 386 aa, Arabidopsis thaliana
  peptide (1)..(386): Ceres Seq. ID no. 12395688
MELSISQSPRVRFSSLAPRFLAASHHHRPSVHLAGKFISLPRDVRFTSLSTSRMRSKFVSTNYRKISIRACSQVGAAESDDPVLDRIARFQNACWRFLRPHTIRGTALGSTALVTRALIENTHLIKWSLVLKALSGLLALICGNGYIVGINQIYDIGIDKVNKPYLPIAAGDLSVQSAWLLVIFFAIAGLLVVGFNFGPFITSLYSLGLFLGTIYSVPPLRMKRFPVAAFLIIATVRGFLLNFGVYHATRAALGLPFQWSAPVAFITSFVTLFALVIAITKDLPDVEGDRKFQISTLATKLGVRNIAFLGSGLLLVNYVSAISLAFYMPQVFRGSLMIPAHVILASGLIFQTWVLEKANYTKEAISGYYRFIWNLFYAEYLLFPFL

SEQ ID NO: 42586 - protein, 333 aa, Arabidopsis thaliana
  peptide (1)..(333): Ceres Seq. ID no. 12395689
MRSKFVSTNYRKISIRACSQVGAAESDDPVLDRIARFQNACWRFLRPHTIRGTALGSTALVTRALIENTHLIKWSLVLKALSGLLALICGNGYIVGINQIYDIGIDKVNKPYLPIAAGDLSVQSAWLLVIFFAIAGLLVVGFNFGPFITSLYSLGLFLGTIYSVPPLRMKRFPVAAFLIIATVRGFLLNFGVYHATRAALGLPFQWSAPVAFITSFVTLFALVIAITKDLPDVEGDRKFQISTLATKLGVRNIAFLGSGLLLVNYVSAISLAFYMPQVFRGSLMIPAHVILASGLIFQTWVLEKANYTKEAISGYYRFIWNLFYAEYLLFPFL

SEQ ID NO: 42587 - DNA, 2144 bp, Arabidopsis thaliana
  misc_feature (1)..(2144): Ceres Seq. ID no. 12370339
  misc_feature (1)..(2144): Ortholog of  Ceres SEQ ID NO 12557432 as cited in SEQ ID NO 92
aaggaatcgaaaacccagaagaggactcagtgaacaaatttcttcaggttaaatttcctcactattctactgtgtttttgttctcagaatcctcgaaaatcgtaatattgtttttcgtatgctcctaaaatctgggcaattcattagatttcgttgcgtagataaacttaagcttgatgtattctttggtacaatgtaattctgtttagttctataacttggaatcactctaagtgtaatgtatattgatgcgaagtcaaatgttgctgaatttttgctctcctgcatttttccccaattttttctgagccagtattgtgaaaaattggagtctgagaaaactgaaaagtttaatgtattctcatttaatcagtgttcatagattcactagttgtttgaccagggcttaggcttaatcattcttgtgacacttggttttcttttaaatctgttttgatgttcagttttctttggaagctatatacccataaacttaaaatgaataaagatggaagctttagctgatataatttgggtgtttctttctttcttccttggtgtgaagctgtttcaaaatgtctcggaggtatgatagtcgcaccacgatcttctcaccggaaggtcgtctctaccaggttgaatatgctatggaagctattggcaatgctggttctgccattggaatcttggcaaaagacggagtggtgttggttggtgagaagaaagtcacttctaaacttcttcaaacctcttcatccatggagaaaatgtacaagatcgatgaccatgtggcttgtgcagttgctggtataatgtctgatgccaacattctgattaacactgctcgagttcaagctcagcgttacacctttatgtaccaagagccaatgcccgtttagcagctggttcagtctctttgtgacaccaagcaaggatacacccagtttggtggtctccgcccgtttggagtttcctttctttttgcaggctgggacaggaaccacgggtttcagctgtatatgagtgacccaagtggaaactatggtggatggcaagctgcagctgttggagcaaataatcaagcggctcagtctattcttaagcaagactataaggatgatgcaacgagggaagaagtggttcagctcgctatcaaggttttgagcaagacgatggacagcacgagctttacagctgaaaaactcgagcttgctgagttgtatctgactccttcaaaatgtgttaagtaccatgttcactcgcctgactcgctcactaagctcttggttaagcatggtgtgactcaaccagccgcagaaacttcctaagctagaaactggtgacagttttacctgacccgcctggttactgtagatgtccatttgctttctttccctttggagatatcgtatcagaatcaatttaccactctgattatgtcatgtgattcatttgggttgactatcttttatcttgagattgatcttcttctagtctaaagtaaagttagactttagaggttttattcaataaatgaatgagcaatcaccaacgggcccattagaaagcccataacattcattgattgaggtaacgggttttaatggctcaaattaacgaagaatcagaatctctttaagtttcaccacgtcgatttaacggtcaagagtgtctgtttattaacagaacagtaaaaatgttaccgctcaaagcgtatatcttgagcgccaaatggaatttcattggtacaatgcccagaagttctgggccagaactggcctcattgtaagagattttttaggagatttatgcagatctggaaaaacaagtttttctctcttggattatctacaaaatattatttacttaagtagttgtcagttagacaatgccctgaatccaaggaattgtatcgaccgggattgaagagaccattcttgcatcgtctcttctttttgcagcatcgcgattgtatgaaacattgatggccagatctttcttctataagtcaatcaaccggccaccggaattaccctaaaaacatagaaaatatgttgaaatatattgagatattagtcatcgactatgactaagtgtcacaaacttttgtgtgataggattcaatcaatccaatggatcttagt

SEQ ID NO: 42588 - protein, 107 aa, Arabidopsis thaliana
  peptide (1)..(107): Ceres Seq. ID no. 12370340
MSRRYDSRTTIFSPEGRLYQVEYAMEAIGNAGSAIGILAKDGVVLVGEKKVTSKLLQTSSSMEKMYKIDDHVACAVAGIMSDANILINTARVQAQRYTFMYQEPMPV

SEQ ID NO: 42589 - protein, 102 aa, Arabidopsis thaliana
  peptide (1)..(102): Ceres Seq. ID no. 12370341
MSDPSGNYGGWQAAAVGANNQAAQSILKQDYKDDATREEVVQLAIKVLSKTMDSTSFTAEKLELAELYLTPSKCVKYHVHSPDSLTKLLVKHGVTQPAAETS

SEQ ID NO: 42590 - protein, 83 aa, Arabidopsis thaliana
  peptide (1)..(83): Ceres Seq. ID no. 12370342
MEAIGNAGSAIGILAKDGVVLVGEKKVTSKLLQTSSSMEKMYKIDDHVACAVAGIMSDANILINTARVQAQRYTFMYQEPMPV

SEQ ID NO: 42591 - DNA, 1332 bp, Arabidopsis thaliana
  misc_feature (1)..(1332): Ceres Seq. ID no. 13645913
  misc_feature (1)..(1332): Ortholog of  Ceres SEQ ID NO 12612333 as cited in SEQ ID NO 56421
atcacttccttgtcacaaaccaaaccctaaaccatctttctcaacatggcgcttcttcacaagcaaaacatttcctttgtgatactcctcctcctcggtctccttgccgtctcttatgcttgtgattgtagtgaccctcctaaaccatcaccacaccctgttaaaccgccaaaacatcccgctaaaccacctaagccccctaccgttaaaccacctactcacaccccaaagcctcccactgtgaagcctccacctccatacattccatgccctcctccgccctatactccaaaacctccaaccgtgaagccaccaccacctccctacgtgaagccaccaccacctcccactgtgaagccaccaccacctccttacgtgaagccaccaccaccccctaccgtgaagccaccaccaccacccacgccgtatactccaccaccacccacgccgtatactcctccaccacccacggtgaagccaccaccaccaccggtcgttaccccaccaccgccaacaccaaccccagaggcgccatgtccgccaccaccaccaacaccatatcctcctccgcctaaaccggaaacttgtccaatcgacgcactgaaactaggcgcatgtgtggacgtgctaggcggtttgattcacatcggactagggaaaagctacgctaaggcaaagtgttgcccacttcttgacgacttagtgggtcttgacgcggcggtttgtctctgcaccaccattagagcgaagcttctcaacattgacctcattatcccaattgctctagaggttcttgtcgactgtggtaagactcctccacctcgtggcttcaagtgtcctactccgctaaaaaggactcctctcttggaagttcacaagtctcgttcctttaataatcaagcaccaagttctcagcgaaatcaaggaatcgaaaacccagaagaggactcagtgaacaaatttcttcagctattggcaatgctggttctgccattggaattcttggcaaaagacggagtggtgttggttggtgagaagaaagtcacttctaaacttcttcaaacctcttcatccatggagaaaatgtacaagatcgatgaccatgtggcttgtgcagttgctggctgggacaggaaccacgggtttcagctgtatatgagtgacccaagtggaaactatggtggatggcaagctgcagctgttggagcaaataatcaagcggctcagtctattcttaagcaagactataaggatgatgcaacgagggaagaagtggttcagctcgctatcaaggttttgagcaagacgatgacagcacgacttgacagctga

SEQ ID NO: 42592 - protein, 428 aa, Arabidopsis thaliana
  peptide (1)..(428): Ceres Seq. ID no. 13645914
MALLHKQNISFVILLLLGLLAVSYACDCSDPPKPSPHPVKPPKHPAKPPKPPTVKPPTHTPKPPTVKPPPPYIPCPPPPYTPKPPTVKPPPPPYVKPPPPPTVKPPPPPYVKPPPPPTVKPPPPPTPYTPPPPTPYTPPPPTVKPPPPPVVTPPPPTPTPEAPCPPPPPTPYPPPPKPETCPIDALKLGACVDVLGGLIHIGLGKSYAKAKCCPLLDDLVGLDAAVCLCTTIRAKLLNIDLIIPIALEVLVDCGKTPPPRGFKCPTPLKRTPLLEVHKSRSFNNQAPSSQRNQGIENPEEDSVNKFLQLLAMLVLPLEFLAKDGVVLVGEKKVTSKLLQTSSSMEKMYKIDDHVACAVAGWDRNHGFQLYMSDPSGNYGGWQAAAVGANNQAAQSILKQDYKDDATREEVVQLAIKVLSKTMTARLDS

SEQ ID NO: 42593 - DNA, 1667 bp, Arabidopsis thaliana
  misc_feature (1)..(1667): Ceres Seq. ID no. 13489635
  misc_feature (1)..(1667): Ortholog of  Ceres SEQ ID NO 13502874 as cited in SEQ ID NO 66298
  misc_feature (1)..(1667): Ortholog of  Ceres SEQ ID NO 12614124 as cited in SEQ ID NO 68392
tggagcatcactggcagcaatgaccaccactgagtttcaaagctgcttcatcttcctcctcttatgtctcttctcactcgtctgttactctctctttttcaggaaaccaagctcaagacgggacgcccatggctgtgatctgcctccgagccctccttctttgccagtcatcggccatcttcaccttatcctctcttcccttgtccacaagtcttttcaaaagatctcctccaactacggacctctcctccatctccgcatcttcaacgttcccatagtcctcgtctcctctgcgtcagtggcctacgatatcttcagggtgcatgacttgaacgtctcttctcgcggctcccctccgtttgaggagtcactgttgttcggatctaccggcttcattagtgctccctatggagattatttcaagttcatgaagaaacacctggtcacaaagctccttggaccacaggcactcgagcgctcacgcctcatccggacaaatgaactagaacggttttacataaacctgcttgataaggcgacgaagaaggagagcgttgaaattggtaaggaagcgatgaagctcagtaacaacagcatctgcaagatgatcatggggaggagttgtttagaggaaaagggtgaggcagagagagtcaggggtttgattatcgagtcgttttacttgacgaagaaatttttcttggcattcactttgcgcgggctgctcgagaagcttggaatctcgctgttcaaaaaagaaataatgggagtttcccgcagatttgatgatttgctcgaaaggtatcttagggaacatgaagagaaaccagataatgagcatcaagatacggacatgattgatgcactattggcagcttatcgagacgaaaaggccgagtataagatcactaggaaccagatcaaggcgtttttagtggatattttcattgcgggcactgacatctcggcgctaacaacgcagggaacaatggctgagatcattaacaaccctaacatatttgtgagaattagagaagaaatcgattctgttgtagggaaatcaaggctgattcaagaaacggatctaccaaagctcccttacttgcaagcggtagtcaaagaagggcttagattgcacccgcctacgcctctcatggtaagggagttccaagaagggtgtaaggtcaaaggtttctacataccagcgagcacaacccttgttgttaatggttatgctgtgatgagagatccaaatgtctgggaagaccctgaggagttcaagccggagaggtttttagcttcttcaagattaatgcaagaggacgagataagagagcaagccctcaagtacatcgctttcggtagtggaaggagaggctgcccaggagcaaatgtagcttatatctttgtaggaaccgcgattggaatgatggtgcaatgctttgactggagaatcaatggagaaaaggttgacatgaaagaggccattggaggactgaacctgaccttggctcatccccttaagtgcactcctgttgctcgattcccaaaacctttttaagttcaaattattaaaaccgatgttccatgtttgatgttggtgactggactagtgttgtaagatggttgaagtaaaataataaggaagcttgctttctgttgttctg

SEQ ID NO: 42594 - protein, 519 aa, Arabidopsis thaliana
  peptide (1)..(519): Ceres Seq. ID no. 13489636
GASLAAMTTTEFQSCFIFLLLCLFSLVCYSLFFRKPSSRRDAHGCDLPPSPPSLPVIGHLHLILSSLVHKSFQKISSNYGPLLHLRIFNVPIVLVSSASVAYDIFRVHDLNVSSRGSPPFEESLLFGSTGFISAPYGDYFKFMKKHLVTKLLGPQALERSRLIRTNELERFYINLLDKATKKESVEIGKEAMKLSNNSICKMIMGRSCLEEKGEAERVRGLIIESFYLTKKFFLAFTLRGLLEKLGISLFKKEIMGVSRRFDDLLERYLREHEEKPDNEHQDTDMIDALLAAYRDEKAEYKITRNQIKAFLVDIFIAGTDISALTTQGTMAEIINNPNIFVRIREEIDSVVGKSRLIQETDLPKLPYLQAVVKEGLRLHPPTPLMVREFQEGCKVKGFYIPASTTLVVNGYAVMRDPNVWEDPEEFKPERFLASSRLMQEDEIREQALKYIAFGSGRRGCPGANVAYIFVGTAIGMMVQCFDWRINGEKVDMKEAIGGLNLTLAHPLKCTPVARFPKPF

SEQ ID NO: 42595 - protein, 513 aa, Arabidopsis thaliana
  peptide (1)..(513): Ceres Seq. ID no. 13489637
MTTTEFQSCFIFLLLCLFSLVCYSLFFRKPSSRRDAHGCDLPPSPPSLPVIGHLHLILSSLVHKSFQKISSNYGPLLHLRIFNVPIVLVSSASVAYDIFRVHDLNVSSRGSPPFEESLLFGSTGFISAPYGDYFKFMKKHLVTKLLGPQALERSRLIRTNELERFYINLLDKATKKESVEIGKEAMKLSNNSICKMIMGRSCLEEKGEAERVRGLIIESFYLTKKFFLAFTLRGLLEKLGISLFKKEIMGVSRRFDDLLERYLREHEEKPDNEHQDTDMIDALLAAYRDEKAEYKITRNQIKAFLVDIFIAGTDISALTTQGTMAEIINNPNIFVRIREEIDSVVGKSRLIQETDLPKLPYLQAVVKEGLRLHPPTPLMVREFQEGCKVKGFYIPASTTLVVNGYAVMRDPNVWEDPEEFKPERFLASSRLMQEDEIREQALKYIAFGSGRRGCPGANVAYIFVGTAIGMMVQCFDWRINGEKVDMKEAIGGLNLTLAHPLKCTPVARFPKPF

SEQ ID NO: 42596 - protein, 377 aa, Arabidopsis thaliana
  peptide (1)..(377): Ceres Seq. ID no. 13489638
MKKHLVTKLLGPQALERSRLIRTNELERFYINLLDKATKKESVEIGKEAMKLSNNSICKMIMGRSCLEEKGEAERVRGLIIESFYLTKKFFLAFTLRGLLEKLGISLFKKEIMGVSRRFDDLLERYLREHEEKPDNEHQDTDMIDALLAAYRDEKAEYKITRNQIKAFLVDIFIAGTDISALTTQGTMAEIINNPNIFVRIREEIDSVVGKSRLIQETDLPKLPYLQAVVKEGLRLHPPTPLMVREFQEGCKVKGFYIPASTTLVVNGYAVMRDPNVWEDPEEFKPERFLASSRLMQEDEIREQALKYIAFGSGRRGCPGANVAYIFVGTAIGMMVQCFDWRINGEKVDMKEAIGGLNLTLAHPLKCTPVARFPKPF

SEQ ID NO: 42597 - DNA, 889 bp, Arabidopsis thaliana
  misc_feature (1)..(889): Ceres Seq. ID no. 12330482
  misc_feature (1)..(889): Ortholog of  Ceres SEQ ID NO 12784064 as cited in SEQ ID NO 66982
  misc_feature (1)..(889): Ortholog of  Ceres SEQ ID NO 15177907 as cited in SEQ ID NO 0
aaaggttccttctgtttccagacaaagaaaacacaaattcattccctcctcctcttcatctcttttgcagatatggatggttattattctctgtctcccatctctgtcctccaccggattaaagattccttccatttcgccgtctctgcccttctcgccaacctcttctccgctctcttcaccttcttcttcgctttaggggctttgatcggccaagaaacagagagcggtttcatcagaggagccgccgttggtgctatctcaggcgccgtcttctccatcgaagtctttgaatcttccctcctcctttggcaatccgatgagtctggaattggatgccttctctacttgccttttgagcgggaggcttgttcgtgagcgtatcggtcctgcaatgctaagtgccgtccagagtcagatgggagctgtggagtcccagttccaagatcatacagacatctttgacactgccatttcaaagggtctcactggggactctctcaacaggatccctaaggtccgaatcacagacacctctccggagattgtctcttgctctgtctgccttcaggactttcaggtgggagagacagttagaagtttgccgcactgccatcatatgttccacctaccatgcatcgacaaatggcttcgcaggcatgcttcttgtcccttgtgcagaagacatctttgaattgattttgaactcttctttcttctcttctttgtacatgaggtataggcatacacacacacacatatatacacactagtagtcttccttgattttttttagattacacgttacacagattttgatgcaccaatcattgtaacttcactcatctcttggagatcctgtttatttatgctacttattcttggctcc

SEQ ID NO: 42598 - protein, 125 aa, Arabidopsis thaliana
  peptide (1)..(125): Ceres Seq. ID no. 12330483
KGSFCFQTKKTQIHSLLLFISFADMDGYYSLSPISVLHRIKDSFHFAVSALLANLFSALFTFFFALGALIGQETESGFIRGAAVGAISGAVFSIEVFESSLLLWQSDESGIGCLLYLPFEREACS

SEQ ID NO: 42599 - protein, 124 aa, Arabidopsis thaliana
  peptide (1)..(124): Ceres Seq. ID no. 12330484
MSLELDAFSTCLLSGRLVRERIGPAMLSAVQSQMGAVESQFQDHTDIFDTAISKGLTGDSLNRIPKVRITDTSPEIVSCSVCLQDFQVGETVRSLPHCHHMFHLPCIDKWLRRHASCPLCRRHL

SEQ ID NO: 42600 - protein, 101 aa, Arabidopsis thaliana
  peptide (1)..(101): Ceres Seq. ID no. 12330485
MDGYYSLSPISVLHRIKDSFHFAVSALLANLFSALFTFFFALGALIGQETESGFIRGAAVGAISGAVFSIEVFESSLLLWQSDESGIGCLLYLPFEREACS

SEQ ID NO: 42601 - DNA, 1326 bp, Arabidopsis thaliana
  misc_feature (1)..(1326): Ceres Seq. ID no. 12331255
  misc_feature (1)..(1326): Ortholog of  Ceres SEQ ID NO 13495070 as cited in SEQ ID NO 53216
  misc_feature (1)..(1326): Ortholog of  Ceres SEQ ID NO 13656228 as cited in SEQ ID NO 65648
  misc_feature (1)..(1326): Ortholog of  Ceres SEQ ID NO 15176717 as cited in SEQ ID NO 0
  misc_feature (1)..(1326): Ortholog of  Ceres SEQ ID NO 15179618 as cited in SEQ ID NO 0
gtgttccgattccgatttctcttttctccttgatccttattctgattcagtctcactttttgcagatctcgtccgttgttgcataagtgctatggatctcgcgtcgaatcttggtgggaagatcgataaatccgatgttctcaccgccgtcgaaaagtatgagcaatatcatgtcttccatggaggaaacgaggaagagagaaaagccaattatactgacatggttaataagtactatgaccttgctactagcttttatgagtacggatggggagaatccttccattttgcacaaagatggaaaggagaatcgcttcgagagagtattaagcgacacgagcactttcttgctcttcagcttggcatccaaccaggacaaaaggtactggatgtaggatgtggaattggtggaccgttgagggaaattgcaagattcagcaattcagttgttaccgggctcaacaataacgaataccagatcaccagaggcaaggaactaaaccgacttgcaggtgtcgacaagacatgtaactttgtcaaggctgacttcatgaagatgccattcccggaaaacagtttcgatgcagtttatgcaatagaagcaacttgccatgcacctgatgcgtatggatgctacaaagagatctacagagtgctaaagcctgggcaatgttttgctgcctatgagtggtgtatgactgatgcatttgaccctgataacgccgaacatcagaaaataaagggagagatagagattggagatggtcttcctgacattaggctgactacaaaatgcctcgaagctctgaagcaggccggttttgaagtgatatgggaaaaggatctggccaaggactcgccggtcccatggtacttacctcttgacaaaaatcatttctcactcagtagcttccgccttacagctgttggacgattcataaccaaaaacatggtcaagatccttgaatacataagacttgcacctcaaggaagccaaagggtctcaaatttcctggagcaggctgcggaaggattagtcgacggtggaaggagagagattttcacgccaatgtatttcttcttggcccggaagccagagtaagcggatgagagatggcaatggtcatcgtaggtcgaatgaagtgacaaaatttctcaatttgcagtcttattttctatgtttatcggatttgttgcagagtttcttattcaccaactatattttggatgttcgtaacatgtcacgtgttgttcatgtgcactctgcctgaaatctgaatcatgtgcacatgcccaaaatatcttggaatctttctttctctttag

SEQ ID NO: 42602 - protein, 366 aa, Arabidopsis thaliana
  peptide (1)..(366): Ceres Seq. ID no. 12331256
CSDSDFSFLLDPYSDSVSLFADLVRCCISAMDLASNLGGKIDKSDVLTAVEKYEQYHVFHGGNEEERKANYTDMVNKYYDLATSFYEYGWGESFHFAQRWKGESLRESIKRHEHFLALQLGIQPGQKVLDVGCGIGGPLREIARFSNSVVTGLNNNEYQITRGKELNRLAGVDKTCNFVKADFMKMPFPENSFDAVYAIEATCHAPDAYGCYKEIYRVLKPGQCFAAYEWCMTDAFDPDNAEHQKIKGEIEIGDGLPDIRLTTKCLEALKQAGFEVIWEKDLAKDSPVPWYLPLDKNHFSLSSFRLTAVGRFITKNMVKILEYIRLAPQGSQRVSNFLEQAAEGLVDGGRREIFTPMYFFLARKPE

SEQ ID NO: 42603 - protein, 336 aa, Arabidopsis thaliana; identical to SEQ ID NO: 26651
  peptide (1)..(336): Ceres Seq. ID no. 12331257

SEQ ID NO: 42604 - protein, 293 aa, Arabidopsis thaliana; identical to SEQ ID NO: 26652
  peptide (1)..(293): Ceres Seq. ID no. 12331258

SEQ ID NO: 42605 - DNA, 1385 bp, Arabidopsis thaliana
  misc_feature (1)..(1385): Ceres Seq. ID no. 13576570
  misc_feature (1)..(1385): Ortholog of  Ceres SEQ ID NO 13594132 as cited in SEQ ID NO 58933
gtggagcagaagaaacatttgatttgatgagatggggaagaagaaagggaaagcgatcatagtaggaggaagtatagcaggcttatcttgcgcacactcgctcacgttagcatgctgggatgttttggttctcgagaaatcttccgaacctcctgttgggagtcctactggtgctgggctcggactcgaccctcaggctcggcagatcatcaaatcatggcttactactccacagctcttagatgaaatcaccttgcctctctcgattgatcagaatcagacaactgatagtgagaagaaagtgacaaggattttaacaagagatgaggattttgatttccgagcagcttattggtcagatattcaatctcttctgtataacgcattgcctcagaccatgtttctttggggacataagtttctgtctttcacaatgtcacaagatgaatctaatgtaaaggttaagactttagttgtggaaactcaagaaactgttgaaattgaaggagacttacttattgcagctgatgggtgtttgtcttcgattcggaaaactttcttgcctgactttaaactgaggtactctggttattgtgcttggagaggtgtatttgatttctcagggaatgagaactcggaaacagttagtgggattaagaaagtgtatccggatcttggaaaatgcttgtattttgatctcggtgaacagactcatagcgtgttttacgagctttttaacaagaaactcaactggatttggtatgtcaatcaaccagagcctgacctgaaaagcaactctgttactctaaaagtgagtcaagaaatgatcaataagatgcatcaagaagcagaaaccatttggatccccgaactagcgagactcatgagtgaaacaaaggatcctttccttaatgttatttacgactctgaccctttagaacgaatcttttggggaaacatcgtgttggttggagacgcggctcatcccacgacccctcatggtctaagaagcacaaacatgtcgatacttgatgcggaagtgctaggcaaatgcttagagaactgtggacctgagaatgtaagtttgggtcttgaggaatatcagagaataagattgcctgttgtttctgagcaagttttgtatgcaaggcgtttggggcgtatcaagcaaggtctggatcatgacggaattggagatggcgtttttggtttggagcagagaaacatgccattcttttcctgtgctccccttatctagtgataaatatttgatgtgagagatgttgtatgttaataattgtgtgtttaatagacttgaacatattgtttggaacgttaatgtagaaactatggatacttcaaatacaagttatataaaaatgagg

SEQ ID NO: 42606 - protein, 408 aa, Arabidopsis thaliana
  peptide (1)..(408): Ceres Seq. ID no. 13576571
MGKKKGKAIIVGGSIAGLSCAHSLTLACWDVLVLEKSSEPPVGSPTGAGLGLDPQARQIIKSWLTTPQLLDEITLPLSIDQNQTTDSEKKVTRILTRDEDFDFRAAYWSDIQSLLYNALPQTMFLWGHKFLSFTMSQDESNVKVKTLVVETQETVEIEGDLLIAADGCLSSIRKTFLPDFKLRYSGYCAWRGVFDFSGNENSETVSGIKKVYPDLGKCLYFDLGEQTHSVFYELFNKKLNWIWYVNQPEPDLKSNSVTLKVSQEMINKMHQEAETIWIPELARLMSETKDPFLNVIYDSDPLERIFWGNIVLVGDAAHPTTPHGLRSTNMSILDAEVLGKCLENCGPENVSLGLEEYQRIRLPVVSEQVLYARRLGRIKQGLDHDGIGDGVFGLEQRNMPFFSCAPLI

SEQ ID NO: 42607 - protein, 286 aa, Arabidopsis thaliana
  peptide (1)..(286): Ceres Seq. ID no. 13576572
MFLWGHKFLSFTMSQDESNVKVKTLVVETQETVEIEGDLLIAADGCLSSIRKTFLPDFKLRYSGYCAWRGVFDFSGNENSETVSGIKKVYPDLGKCLYFDLGEQTHSVFYELFNKKLNWIWYVNQPEPDLKSNSVTLKVSQEMINKMHQEAETIWIPELARLMSETKDPFLNVIYDSDPLERIFWGNIVLVGDAAHPTTPHGLRSTNMSILDAEVLGKCLENCGPENVSLGLEEYQRIRLPVVSEQVLYARRLGRIKQGLDHDGIGDGVFGLEQRNMPFFSCAPLI

SEQ ID NO: 42608 - protein, 274 aa, Arabidopsis thaliana
  peptide (1)..(274): Ceres Seq. ID no. 13576573
MSQDESNVKVKTLVVETQETVEIEGDLLIAADGCLSSIRKTFLPDFKLRYSGYCAWRGVFDFSGNENSETVSGIKKVYPDLGKCLYFDLGEQTHSVFYELFNKKLNWIWYVNQPEPDLKSNSVTLKVSQEMINKMHQEAETIWIPELARLMSETKDPFLNVIYDSDPLERIFWGNIVLVGDAAHPTTPHGLRSTNMSILDAEVLGKCLENCGPENVSLGLEEYQRIRLPVVSEQVLYARRLGRIKQGLDHDGIGDGVFGLEQRNMPFFSCAPLI

SEQ ID NO: 42609 - DNA, 1183 bp, Arabidopsis thaliana
  misc_feature (1)..(1183): Ceres Seq. ID no. 12385330
  misc_feature (1)..(1183): Ortholog of  Ceres SEQ ID NO 14311938 as cited in SEQ ID NO 51615
  misc_feature (1)..(1183): Ortholog of  Ceres SEQ ID NO 14302059 as cited in SEQ ID NO 68322
aataggtcagagagaacatttcttattggtttagtttgacgtctggtctctgttttgcttctttctaatcaacccatagctttcattctttttcttctttcagcagtgttttcaagaaaatgctagtaatactttttgtgtctgtcaatttcaggagaaaaggcattttctttgtcgccatcgatttgaaccggcccctatctgaacaagggccatttgatgttgttttgcataagttgttgggaaaagagtgggaagaggttattgaggattaccaacaaaaacacccagaagtgactgtgcttgatcctccaggatcaatacagcgtatatataatcgacaatcgatgcttcagggtatggcagatttgaaactgtcagattgcagtggcagcctttttgttccaaagcaaatggttgtcttgaaagattcagcagctagtgctgatgcagttgtggaagctggtctcaaatttccactagttgcaaagccgctctggatcgatgggactgcaaagtcacatcaattgtacttggcttatgacaggcgctcgcttgcagagcttgatccgcctttagtccttcaagagtttgttaatcatggtggagttatgttcaaggtatttgtggtgggtgatgttataaaagtcatgagacggttttctctaccaaatgtgagtaattgtgaaaaagccaaagttgatggcgtcttccaattcccaagggtttcatcagctgctgcttcagctgataacgcagacttggaccctcgtgttgctgagctacctccaaagcctttcctcgaggcgcttgtgaaagagctaagaagcttattgggacttcggcttttcaacatagacatgatcagggaacatgggagcaaaaacgtgttttatgttattgacatcaactattttcctggttacggaaaactgccagactacgagcaagtctttgtagatttcttccaaaatctggcgcaggtcaaatataagaagagacaacattgtaaatgaaagaaaatggcggcagtttttagatggtctactaagaagcgacaaataataaaatgtctaattatggatttgtacagaatttagctctcccttttggaagcagtatcagataaacaagttttgattactgattttgaattttcagtgaaataaacgtctcttcatcc

SEQ ID NO: 42610 - protein, 298 aa, Arabidopsis thaliana
  peptide (1)..(298): Ceres Seq. ID no. 12385331
MLVILFVSVNFRRKGIFFVAIDLNRPLSEQGPFDVVLHKLLGKEWEEVIEDYQQKHPEVTVLDPPGSIQRIYNRQSMLQGMADLKLSDCSGSLFVPKQMVVLKDSAASADAVVEAGLKFPLVAKPLWIDGTAKSHQLYLAYDRRSLAELDPPLVLQEFVNHGGVMFKVFVVGDVIKVMRRFSLPNVSNCEKAKVDGVFQFPRVSSAAASADNADLDPRVAELPPKPFLEALVKELRSLLGLRLFNIDMIREHGSKNVFYVIDINYFPGYGKLPDYEQVFVDFFQNLAQVKYKKRQHCK

SEQ ID NO: 42611 - protein, 222 aa, Arabidopsis thaliana
  peptide (1)..(222): Ceres Seq. ID no. 12385332
MLQGMADLKLSDCSGSLFVPKQMVVLKDSAASADAVVEAGLKFPLVAKPLWIDGTAKSHQLYLAYDRRSLAELDPPLVLQEFVNHGGVMFKVFVVGDVIKVMRRFSLPNVSNCEKAKVDGVFQFPRVSSAAASADNADLDPRVAELPPKPFLEALVKELRSLLGLRLFNIDMIREHGSKNVFYVIDINYFPGYGKLPDYEQVFVDFFQNLAQVKYKKRQHCK

SEQ ID NO: 42612 - protein, 218 aa, Arabidopsis thaliana
  peptide (1)..(218): Ceres Seq. ID no. 12385333
MADLKLSDCSGSLFVPKQMVVLKDSAASADAVVEAGLKFPLVAKPLWIDGTAKSHQLYLAYDRRSLAELDPPLVLQEFVNHGGVMFKVFVVGDVIKVMRRFSLPNVSNCEKAKVDGVFQFPRVSSAAASADNADLDPRVAELPPKPFLEALVKELRSLLGLRLFNIDMIREHGSKNVFYVIDINYFPGYGKLPDYEQVFVDFFQNLAQVKYKKRQHCK

SEQ ID NO: 42613 - DNA, 1326 bp, Arabidopsis thaliana
  misc_feature (1)..(1326): Ceres Seq. ID no. 13497100
  misc_feature (1)..(1326): Ortholog of  Ceres SEQ ID NO 15170037 as cited in SEQ ID NO 55447
  misc_feature (1)..(1326): Ortholog of  Ceres SEQ ID NO 13582350 as cited in SEQ ID NO 56734
  misc_feature (1)..(1326): Ortholog of  Ceres SEQ ID NO 12578315 as cited in SEQ ID NO 62451
  misc_feature (1)..(1326): Ortholog of  Ceres SEQ ID NO 12615907 as cited in SEQ ID NO 62860
  misc_feature (1)..(1326): Ortholog of  Ceres SEQ ID NO 13597295 as cited in SEQ ID NO 63743
  misc_feature (1)..(1326): Ortholog of  Ceres SEQ ID NO 12617090 as cited in SEQ ID NO 64005
  misc_feature (1)..(1326): Ortholog of  Ceres SEQ ID NO 13597233 as cited in SEQ ID NO 64370
  misc_feature (1)..(1326): Ortholog of  Ceres SEQ ID NO 13600370 as cited in SEQ ID NO 0
actcaaagtcgagccttccttcctttatctcttataccctttttgattcttcttcaattttctgacatcaaatggcggcaaagctgatatccaccggtttccgtcatactactttgccggaaaactatgtccggccaatctccgaccgtccacgactctctgaagtctctcaactcgaagatttccctctcatcgatctctcttccactgatcgatcttttctcatccaacaaatccaccaagcttgtgcccgattcggattttttcaggtcataaatcacggagttaacaaacaaataatagatgagatggtgagtgttgcgcgtgagttctttagcatgtctatggaagaaaaaatgaagctatattcagacgatccaacgaagacaacaagattatcgacgagcttcaatgtgaagaaagaagaagtcaacaattggagagactatctaagactccattgttatcctatccacaagtatgtcaatgagtggccgtcaaaccctccttctttcaaggaaatagtaagtaaatacagtagagaagtaagagaagtgggatttaaaatagaggaattaatatcagagagcttaggtttagaaaaagattacatgaagaaagtgcttggtgaacaaggtcaacacatggcagtcaactattatcctccatgtcctgaacctgagctcacttacggtttacctgctcataccgacccaaacgccctaaccattcttcttcaagacactactgtttgcggtctccagatcttgatcgacggtcagtggttcgccgttaatccacatcctgatgcttttgtcatcaacataggtgaccagttacaggcattaagtaatggagtatacaaaagtgtttggcatcgcgctgtaacaaacacagaaaatccgagactatcggtcgcatcgtttctgtgcccagctgactgtgctgtcatgagcccggccaagcccttgtgggaagctgaggacgatgaaacgaaaccagtctacaaagatttcacttatgcagagtattacaagaagttttggagtaggaatctggaccaagaacattgcctcgagaattttctaaacaactaagatacatatatctttggcctttgtgtttgtctagtaggcatatatatacaagtcaataacagcattgatgttcgattctacattcctaccaacattttgttctagacgtatgataatagtaggaatcatgatcatatgtcttgataataactatcatgggcatatttgtttgtgtgttaaataatttcttaccttttatttttctatatgcttcaaaacttttaacttt

SEQ ID NO: 42614 - protein, 341 aa, Arabidopsis thaliana
  peptide (1)..(341): Ceres Seq. ID no. 13497101
MAAKLISTGFRHTTLPENYVRPISDRPRLSEVSQLEDFPLIDLSSTDRSFLIQQIHQACARFGFFQVINHGVNKQIIDEMVSVAREFFSMSMEEKMKLYSDDPTKTTRLSTSFNVKKEEVNNWRDYLRLHCYPIHKYVNEWPSNPPSFKEIVSKYSREVREVGFKIEELISESLGLEKDYMKKVLGEQGQHMAVNYYPPCPEPELTYGLPAHTDPNALTILLQDTTVCGLQILIDGQWFAVNPHPDAFVINIGDQLQALSNGVYKSVWHRAVTNTENPRLSVASFLCPADCAVMSPAKPLWEAEDDETKPVYKDFTYAEYYKKFWSRNLDQEHCLENFLNN

SEQ ID NO: 42615 - protein, 262 aa, Arabidopsis thaliana
  peptide (1)..(262): Ceres Seq. ID no. 13497102
MVSVAREFFSMSMEEKMKLYSDDPTKTTRLSTSFNVKKEEVNNWRDYLRLHCYPIHKYVNEWPSNPPSFKEIVSKYSREVREVGFKIEELISESLGLEKDYMKKVLGEQGQHMAVNYYPPCPEPELTYGLPAHTDPNALTILLQDTTVCGLQILIDGQWFAVNPHPDAFVINIGDQLQALSNGVYKSVWHRAVTNTENPRLSVASFLCPADCAVMSPAKPLWEAEDDETKPVYKDFTYAEYYKKFWSRNLDQEHCLENFLNN

SEQ ID NO: 42616 - protein, 252 aa, Arabidopsis thaliana
  peptide (1)..(252): Ceres Seq. ID no. 13497103
MSMEEKMKLYSDDPTKTTRLSTSFNVKKEEVNNWRDYLRLHCYPIHKYVNEWPSNPPSFKEIVSKYSREVREVGFKIEELISESLGLEKDYMKKVLGEQGQHMAVNYYPPCPEPELTYGLPAHTDPNALTILLQDTTVCGLQILIDGQWFAVNPHPDAFVINIGDQLQALSNGVYKSVWHRAVTNTENPRLSVASFLCPADCAVMSPAKPLWEAEDDETKPVYKDFTYAEYYKKFWSRNLDQEHCLENFLNN

SEQ ID NO: 42617 - DNA, 1471 bp, Arabidopsis thaliana
  misc_feature (1)..(1471): Ceres Seq. ID no. 13493970
  misc_feature (1)..(1471): Ortholog of  Ceres SEQ ID NO 15172093 as cited in SEQ ID NO 54938
aaatatattcatcaaataaacaaaaatctctgtatttttttttaaaaaagatggctgatttggatttacagaggaagatggtatctccgaagctccacgtcaccattcctgagccgtgtaagctctcctccgtctcttctccaatctcctcctcttcttccgccgcttgctctgcttacgagctttacctccgtttgcctgaacttagaaacctctggtcctctctctatttccctcactggatctccgagcccgttctcaaaccagctcttcaagctcttgagatcactttccggttaatcctcaccgttgcttctgacacacgtccttacatcaaccgccgcgaatggatccgacggttggattccctcactaccagccagataaaaatcgtggcggctatctgcggagatgaagacaactacgaagagaacgtatcggcggctccggtcagcaatggctggagctcgttgagtttgctttcggagatcgccacgtgtcgtacatcggagagtgttggacagaagatcttgtctacgatcgagaatgagatgcgttggtgtaagtatacgctcggtttaggagaaccaaacctcgccggaaaaccgtatcttcaatacgacgccgtttgtctcccggaggagctacatagcctcaagaacaatccttacgcagatcacatcgagaaccaagagaatcaaatgctctacactagtcatcagattcttgaatcgtggatttacgtttctgtgaatcttttatatagaatcgaatcgagaatcgaagagggaaaattcgaaaaagcttcttcagacgtctacttgttggagagaatctggaagcttctatcagagattgaagatttacacattcttatggatcctgaagatttcttgaaggtgaagaaacagttacaaatcaaatcgacgtttccaaacgacgcattttgttttaggtcaaagggcttagtagagatggcgaagatgtccaaagagctgagacagaaagtgccagctgttcttgaggtggaggtggatcccaccggaggtccgaggttgcaagaggcggcgatgaagctttactcgaggaaaacagagtacgagaagatacatttgcttcagggaatgcaggccgtggagtctgcagccaagagattcttcttcggataccagaagttggttgcagcgatgattgggaatgcagaggcgaatgcaaatagaacggtggcgaatcacgagtcctatgattcactgactcaggtgtttatggagccaccgtattacccgagcctagacgccgcaaagacatttctgggagagttctggagccaattgtgatgcaatggaagatattgacacaactacttaacaaacactatcaacagatgtaacactactgaaatttttggaagcatctaacgatcagtgtatgaatatatgtaactcattttttagcacaaaacaatattttc

SEQ ID NO: 42618 - protein, 444 aa, Arabidopsis thaliana
  peptide (1)..(444): Ceres Seq. ID no. 13493971
IYSSNKQKSLYFFLKKMADLDLQRKMVSPKLHVTIPEPCKLSSVSSPISSSSSAACSAYELYLRLPELRNLWSSLYFPHWISEPVLKPALQALEITFRLILTVASDTRPYINRREWIRRLDSLTTSQIKIVAAICGDEDNYEENVSAAPVSNGWSSLSLLSEIATCRTSESVGQKILSTIENEMRWCKYTLGLGEPNLAGKPYLQYDAVCLPEELHSLKNNPYADHIENQENQMLYTSHQILESWIYVSVNLLYRIESRIEEGKFEKASSDVYLLERIWKLLSEIEDLHILMDPEDFLKVKKQLQIKSTFPNDAFCFRSKGLVEMAKMSKELRQKVPAVLEVEVDPTGGPRLQEAAMKLYSRKTEYEKIHLLQGMQAVESAAKRFFFGYQKLVAAMIGNAEANANRTVANHESYDSLTQVFMEPPYYPSLDAAKTFLGEFWSQL

SEQ ID NO: 42619 - protein, 428 aa, Arabidopsis thaliana
  peptide (1)..(428): Ceres Seq. ID no. 13493972
MADLDLQRKMVSPKLHVTIPEPCKLSSVSSPISSSSSAACSAYELYLRLPELRNLWSSLYFPHWISEPVLKPALQALEITFRLILTVASDTRPYINRREWIRRLDSLTTSQIKIVAAICGDEDNYEENVSAAPVSNGWSSLSLLSEIATCRTSESVGQKILSTIENEMRWCKYTLGLGEPNLAGKPYLQYDAVCLPEELHSLKNNPYADHIENQENQMLYTSHQILESWIYVSVNLLYRIESRIEEGKFEKASSDVYLLERIWKLLSEIEDLHILMDPEDFLKVKKQLQIKSTFPNDAFCFRSKGLVEMAKMSKELRQKVPAVLEVEVDPTGGPRLQEAAMKLYSRKTEYEKIHLLQGMQAVESAAKRFFFGYQKLVAAMIGNAEANANRTVANHESYDSLTQVFMEPPYYPSLDAAKTFLGEFWSQL

SEQ ID NO: 42620 - protein, 419 aa, Arabidopsis thaliana
  peptide (1)..(419): Ceres Seq. ID no. 13493973
MVSPKLHVTIPEPCKLSSVSSPISSSSSAACSAYELYLRLPELRNLWSSLYFPHWISEPVLKPALQALEITFRLILTVASDTRPYINRREWIRRLDSLTTSQIKIVAAICGDEDNYEENVSAAPVSNGWSSLSLLSEIATCRTSESVGQKILSTIENEMRWCKYTLGLGEPNLAGKPYLQYDAVCLPEELHSLKNNPYADHIENQENQMLYTSHQILESWIYVSVNLLYRIESRIEEGKFEKASSDVYLLERIWKLLSEIEDLHILMDPEDFLKVKKQLQIKSTFPNDAFCFRSKGLVEMAKMSKELRQKVPAVLEVEVDPTGGPRLQEAAMKLYSRKTEYEKIHLLQGMQAVESAAKRFFFGYQKLVAAMIGNAEANANRTVANHESYDSLTQVFMEPPYYPSLDAAKTFLGEFWSQL

SEQ ID NO: 42621 - DNA, 1365 bp, Arabidopsis thaliana
  misc_feature (1)..(1365): Ceres Seq. ID no. 12331103
  misc_feature (1)..(1365): Ortholog of  Ceres SEQ ID NO 13585342 as cited in SEQ ID NO 63601
gagattggtgagttggctgtggcgtctggagttttacaaagctgtaaactaagacagctaaaggatcaagtctgaagaatggtttagccaaaaagcatcagaagaggaatattttgctcgattctttattccttcaaattcaatacaccaacgacgaggctacttgcttttccttcgagtagccatcttcgttatcaatcatcgtcatcatctagtttatataaagatcaaacctttgaccatttataccgtttttgtgtcccagactcaaagcaattattttatcctttgtgttactgaatcagggttgatgggggattctcctagttcaaatagagttaagcttcgggatgggagattcttagcttataaagaaagaggagttccaaaggaaaaggccaaatacaagatcattcttgttcatggctttggaagctccaaagatatgaacttctctgcctcaaaagagcttatagaagaacttgaggtgtacttgctattctacgaccgttctggatatggagaatcagattcaaacacaaaacgttcgttggaaagcgaagttgaagacatagcagaacttgcagatcagctggagttaggacctaagttttatctaattggaatttccatgggatcttaccctacttggggttgcctaagacacatacctcacaggttatccggcgtggcttttgttgctccggtggttaattatcgatggccttcacttccgaagaagctaatcaaaaaagattataggacaggtattatcaaatggggtttgaggatatcaaaatatgcacctggactgttacattggtggatcattcaaaagctcttcgcttcaactagttcggtccttgaaagcaatccggtctacttcaacagccacgacatagaagtgctcaagcgaaaaactggttttcccatgcttactaaggaaaagctacgggaaagaaatgttttcgatactctaagggacgattttatggtttgtttcgggcaatgggacttcgaacccgcggatctaagcatcagtacaaagagctatattcacatctggcatggtaaggaagacaaagttgttccatttcaacttcaaagatgcattctgcagaaacaacctttgatcaactaccacgaaatcccccaaggcggacatctgatcgtacactacgatggcatttgcgatacgattctacgtgcactattgctcaaggaagaacaacaaaagctgtataaaataaattgatttgtaacagattctgtgtttgattgattgattcagttctacaaaacaaagtatgttcaaagtgtacattgtacaatgacaatatatatgtgtataatataaagtgtttg

SEQ ID NO: 42622 - protein, 314 aa, Arabidopsis thaliana
  peptide (1)..(314): Ceres Seq. ID no. 12331104
MGDSPSSNRVKLRDGRFLAYKERGVPKEKAKYKIILVHGFGSSKDMNFSASKELIEELEVYLLFYDRSGYGESDSNTKRSLESEVEDIAELADQLELGPKFYLIGISMGSYPTWGCLRHIPHRLSGVAFVAPVVNYRWPSLPKKLIKKDYRTGIIKWGLRISKYAPGLLHWWIIQKLFASTSSVLESNPVYFNSHDIEVLKRKTGFPMLTKEKLRERNVFDTLRDDFMVCFGQWDFEPADLSISTKSYIHIWHGKEDKVVPFQLQRCILQKQPLINYHEIPQGGHLIVHYDGICDTILRALLLKEEQQKLYKIN

SEQ ID NO: 42623 - protein, 269 aa, Arabidopsis thaliana
  peptide (1)..(269): Ceres Seq. ID no. 12331105
MNFSASKELIEELEVYLLFYDRSGYGESDSNTKRSLESEVEDIAELADQLELGPKFYLIGISMGSYPTWGCLRHIPHRLSGVAFVAPVVNYRWPSLPKKLIKKDYRTGIIKWGLRISKYAPGLLHWWIIQKLFASTSSVLESNPVYFNSHDIEVLKRKTGFPMLTKEKLRERNVFDTLRDDFMVCFGQWDFEPADLSISTKSYIHIWHGKEDKVVPFQLQRCILQKQPLINYHEIPQGGHLIVHYDGICDTILRALLLKEEQQKLYKIN

SEQ ID NO: 42624 - protein, 207 aa, Arabidopsis thaliana
  peptide (1)..(207): Ceres Seq. ID no. 12331106
MGSYPTWGCLRHIPHRLSGVAFVAPVVNYRWPSLPKKLIKKDYRTGIIKWGLRISKYAPGLLHWWIIQKLFASTSSVLESNPVYFNSHDIEVLKRKTGFPMLTKEKLRERNVFDTLRDDFMVCFGQWDFEPADLSISTKSYIHIWHGKEDKVVPFQLQRCILQKQPLINYHEIPQGGHLIVHYDGICDTILRALLLKEEQQKLYKIN

SEQ ID NO: 42625 - DNA, 1106 bp, Arabidopsis thaliana
  misc_feature (1)..(1106): Ceres Seq. ID no. 13645980
  misc_feature (1)..(1106): Ortholog of  Ceres SEQ ID NO 13532807 as cited in SEQ ID NO 53012
  misc_feature (1)..(1106): Ortholog of  Ceres SEQ ID NO 15176375 as cited in SEQ ID NO 53238
  misc_feature (1)..(1106): Ortholog of  Ceres SEQ ID NO 14316507 as cited in SEQ ID NO 57397
  misc_feature (1)..(1106): Ortholog of  Ceres SEQ ID NO 13663060 as cited in SEQ ID NO 60964
  misc_feature (1)..(1106): Ortholog of  Ceres SEQ ID NO 13598532 as cited in SEQ ID NO 65204
  misc_feature (1)..(1106): Ortholog of  Ceres SEQ ID NO 13656849 as cited in SEQ ID NO 65764
  misc_feature (1)..(1106): Ortholog of  Ceres SEQ ID NO 13656501 as cited in SEQ ID NO 69206
agggtttataagacccaaacaaaaaacattcatcagtctcaattcaaaatcctccatcaatggagaaatacgagaagctcgaaaaggtcggtgaaggaacctatggaaaagtctacaaagcaatggagaaaaccaccggaaaactcgtcgctctgaagaaaactaggctcgaaatggacgaagaaggtataccaccaacggctctccgtgagatctctcttctccaaatgctttctcaatcaatctacatcgttcgtctcctctgcgtcgaacatgttattcaatcgaaagattcgactgtttctcactctcccaaatccaatctctatctcgtttttgagtatctcgacactgatctcaagaaatttatagattctcatagaaagggctcgaatcctagaccgcttgaggcttctcttgtgcagaggtttatgtttcagctttttaaaggtgtggctcattgtcatagccatggtgtgcttcaccgtgatcttaaaccgcagaatcttctattggataaggataaagggattcttaagattgctgatttgggtcttagtcgtgcttttactgtgcctcttaaggcttatacacatgagattgttactctttggtatagagctcctgaagttttgcttggttctactcattactctactgctgttgatatttggtctgttggatgcatctttgccgagatgattaggaggcaagctcttttccctggtgattctgagtttcagcaactacttcatattttcagattgttaggaacaccaactgagcagcaatggccgggtgtaatggcattgcgtgactggcatgtctatccaaagtgggagccgcaagacttatcacgtgctgttccatctctatctcctgaaggaattgatcttctcacgcaaatgttgaagtacaatccagcagaaagaatttcagcaaaagcagctctcgatcatccctactttgacagccttgacaaatctcagttctgacctctgccaaattactgatcaggcttctctttggagttctgaagctgatggctcaagtttattgtcttggtgtcttatgctgtgtgctttagaaagatttgtacttaaact

SEQ ID NO: 42626 - protein, 311 aa, Arabidopsis thaliana
  peptide (1)..(311): Ceres Seq. ID no. 13645981
MEKYEKLEKVGEGTYGKVYKAMEKTTGKLVALKKTRLEMDEEGIPPTALREISLLQMLSQSIYIVRLLCVEHVIQSKDSTVSHSPKSNLYLVFEYLDTDLKKFIDSHRKGSNPRPLEASLVQRFMFQLFKGVAHCHSHGVLHRDLKPQNLLLDKDKGILKIADLGLSRAFTVPLKAYTHEIVTLWYRAPEVLLGSTHYSTAVDIWSVGCIFAEMIRRQALFPGDSEFQQLLHIFRLLGTPTEQQWPGVMALRDWHVYPKWEPQDLSRAVPSLSPEGIDLLTQMLKYNPAERISAKAALDHPYFDSLDKSQF

SEQ ID NO: 42627 - protein, 290 aa, Arabidopsis thaliana
  peptide (1)..(290): Ceres Seq. ID no. 13645982
MEKTTGKLVALKKTRLEMDEEGIPPTALREISLLQMLSQSIYIVRLLCVEHVIQSKDSTVSHSPKSNLYLVFEYLDTDLKKFIDSHRKGSNPRPLEASLVQRFMFQLFKGVAHCHSHGVLHRDLKPQNLLLDKDKGILKIADLGLSRAFTVPLKAYTHEIVTLWYRAPEVLLGSTHYSTAVDIWSVGCIFAEMIRRQALFPGDSEFQQLLHIFRLLGTPTEQQWPGVMALRDWHVYPKWEPQDLSRAVPSLSPEGIDLLTQMLKYNPAERISAKAALDHPYFDSLDKSQF

SEQ ID NO: 42628 - protein, 273 aa, Arabidopsis thaliana
  peptide (1)..(273): Ceres Seq. ID no. 13645983
MDEEGIPPTALREISLLQMLSQSIYIVRLLCVEHVIQSKDSTVSHSPKSNLYLVFEYLDTDLKKFIDSHRKGSNPRPLEASLVQRFMFQLFKGVAHCHSHGVLHRDLKPQNLLLDKDKGILKIADLGLSRAFTVPLKAYTHEIVTLWYRAPEVLLGSTHYSTAVDIWSVGCIFAEMIRRQALFPGDSEFQQLLHIFRLLGTPTEQQWPGVMALRDWHVYPKWEPQDLSRAVPSLSPEGIDLLTQMLKYNPAERISAKAALDHPYFDSLDKSQF

SEQ ID NO: 42629 - DNA, 1697 bp, Arabidopsis thaliana
  misc_feature (1)..(1697): Ceres Seq. ID no. 12602431
  misc_feature (1)..(1697): Ortholog of  Ceres SEQ ID NO 13646157 as cited in SEQ ID NO 20485
  misc_feature (1)..(1697): Ortholog of  Ceres SEQ ID NO 15175488 as cited in SEQ ID NO 54441
  misc_feature (1)..(1697): Ortholog of  Ceres SEQ ID NO 15175098 as cited in SEQ ID NO 57679
ttttgagttttctctctctttctcttctctaaaactacttaagctaaagaatcaaacacttctcaacgtttctccaaagcctctgattagtaaacacataaagagatctatagagagagagagagtagagataaaaggtgatgaatagaggtgtgttggagagttcgccggttcagcagctgatggcagccggaaaccctaattggtggaacgtaagcggcggcatgaggccaccaccaccgttgatgggtcatcagcaggcgccgttgccaccacatatgactcctaataacaattatctccgaccacggatgatgcccactcccttcccgcacttcttgccatctccggcgacttcttcttcttcctcttcttcttcaccgtctttgcctaataaccctaatctctcttcttggcttgaaagcaatgatctccctcctgagtcttggagccttagccaacttcttttgggtggattgatgatgggagaggaagagagattggagatgatgaaccatcataatcatcatgatgaacaacaacaccatggttttcaagggaagataagattggagaattgggaagaacaagtgttaagccaccaacaagcttccatggtggctgttgacatcaaacaagagggtaacattaacaacaacaatggctatgtcatatcttccccgaactcacctcctaacaaatcttgtgttacaacaactaccacaacaagcctcaatagtaacgacgataacatcaacaacaataataatatgttggatttctctagcaatcacaatggtcttcacttgtcagaagggagacacactcctccggatcgatcctctgagtgtaacagcttagagattggtgggtctactaataagaagccaaggctccaaccttctccttcgtcacaatcaaccctcaaggtgagaaaggagaaactaggaggccgaatcgcagcgcttcatcagctagtatctccatttggaaagactgacacagcctctgtcctgtcggaagctattggatacattagattccttcagagtcaaattgaggctctgagtcatccatactttggtacgactgcctcggggaatatgaggcaccaacaacatttgcaaggagataggagttgcatatttcctgaggaccctggtcagctcgtgaacgatcagtgcatgaagagaagaggagcttcgtcgtcatctacggacaatcaaaatgcaagtgaagagcctaagaaagatctgagaagtcgaggtttatgtcttgtcccaatctcatgcacactccaagtaggcagcgacaacggcgcggactattgggctccagcacttggctccgccggtttccattgagccaatgaaattacgccacgtggaattccagcgttagagaaaaatgatataacatcacgagcagtcagtctactgagaaaacaacaaattgagtttccaaggctgattgctcatgatgctatacaaagttcttcgtttaaaactttgctagagaatttgcgtctggcgtctgatgaatatgcgtttggcgtttcatcatttgatgcgttatcagatgatatgaccaagtgatcaatttatgttcttgctttaggaaactgtttgttttcttttaccggttaattgtaatttgtggttaagtacttattttaattacttccacgtggtttgtat

SEQ ID NO: 42630 - protein, 407 aa, Arabidopsis thaliana
  peptide (1)..(407): Ceres Seq. ID no. 12602432
MNRGVLESSPVQQLMAAGNPNWWNVSGGMRPPPPLMGHQQAPLPPHMTPNNNYLRPRMMPTPFPHFLPSPATSSSSSSSSPSLPNNPNLSSWLESNDLPPESWSLSQLLLGGLMMGEEERLEMMNHHNHHDEQQHHGFQGKIRLENWEEQVLSHQQASMVAVDIKQEGNINNNNGYVISSPNSPPNKSCVTTTTTTSLNSNDDNINNNNNMLDFSSNHNGLHLSEGRHTPPDRSSECNSLEIGGSTNKKPRLQPSPSSQSTLKVRKEKLGGRIAALHQLVSPFGKTDTASVLSEAIGYIRFLQSQIEALSHPYFGTTASGNMRHQQHLQGDRSCIFPEDPGQLVNDQCMKRRGASSSSTDNQNASEEPKKDLRSRGLCLVPISCTLQVGSDNGADYWAPALGSAGFH

SEQ ID NO: 42631 - protein, 393 aa, Arabidopsis thaliana
  peptide (1)..(393): Ceres Seq. ID no. 12602433
MAAGNPNWWNVSGGMRPPPPLMGHQQAPLPPHMTPNNNYLRPRMMPTPFPHFLPSPATSSSSSSSSPSLPNNPNLSSWLESNDLPPESWSLSQLLLGGLMMGEEERLEMMNHHNHHDEQQHHGFQGKIRLENWEEQVLSHQQASMVAVDIKQEGNINNNNGYVISSPNSPPNKSCVTTTTTTSLNSNDDNINNNNNMLDFSSNHNGLHLSEGRHTPPDRSSECNSLEIGGSTNKKPRLQPSPSSQSTLKVRKEKLGGRIAALHQLVSPFGKTDTASVLSEAIGYIRFLQSQIEALSHPYFGTTASGNMRHQQHLQGDRSCIFPEDPGQLVNDQCMKRRGASSSSTDNQNASEEPKKDLRSRGLCLVPISCTLQVGSDNGADYWAPALGSAGFH

SEQ ID NO: 42632 - protein, 379 aa, Arabidopsis thaliana
  peptide (1)..(379): Ceres Seq. ID no. 12602434
MRPPPPLMGHQQAPLPPHMTPNNNYLRPRMMPTPFPHFLPSPATSSSSSSSSPSLPNNPNLSSWLESNDLPPESWSLSQLLLGGLMMGEEERLEMMNHHNHHDEQQHHGFQGKIRLENWEEQVLSHQQASMVAVDIKQEGNINNNNGYVISSPNSPPNKSCVTTTTTTSLNSNDDNINNNNNMLDFSSNHNGLHLSEGRHTPPDRSSECNSLEIGGSTNKKPRLQPSPSSQSTLKVRKEKLGGRIAALHQLVSPFGKTDTASVLSEAIGYIRFLQSQIEALSHPYFGTTASGNMRHQQHLQGDRSCIFPEDPGQLVNDQCMKRRGASSSSTDNQNASEEPKKDLRSRGLCLVPISCTLQVGSDNGADYWAPALGSAGFH

SEQ ID NO: 42633 - DNA, 1371 bp, Arabidopsis thaliana
  misc_feature (1)..(1371): Ceres Seq. ID no. 12604741
  misc_feature (1)..(1371): Ortholog of  Ceres SEQ ID NO 15226389 as cited in SEQ ID NO 52992
  misc_feature (1)..(1371): Ortholog of  Ceres SEQ ID NO 14312152 as cited in SEQ ID NO 57197
  misc_feature (1)..(1371): Ortholog of  Ceres SEQ ID NO 14314319 as cited in SEQ ID NO 57500
  misc_feature (1)..(1371): Ortholog of  Ceres SEQ ID NO 13664395 as cited in SEQ ID NO 67508
  misc_feature (1)..(1371): Ortholog of  Ceres SEQ ID NO 13662335 as cited in SEQ ID NO 68440
aacttattcaaaccaattcacatcttcccaaacccaactactacaacttgtattaagaaaaagatatattcccttagcttctttgatcaatatattcgtcagggttctcgtcaaagtcctcagcatcttcatcatatgtccggaggaataatggatgaagagatcgagattcctccgttcttcctttgtcctatctctttggagatcatgaaagatccagtgatagtctctaccggaataacctacgacagagacagcatcgagaaatggctatttgcaggcaagaaaaactcgtgtccggtcaccaaacaagacataaccgacgcggatctcaccccgaatcacactctacgccgtctcatccaatcttggtgcaccctaaacgcctcctacggcgtcgagaggatccctaccccaagacctccgatttgtaaatctgagatcgaaaagctcattagagattcagcctcttcccatgaaaaccaagtcaagtgtctcaaacgacttcgtcagattgtgtcggagaacgcgaccaacaagcggtgtttagaggcagcgggagtaccggagttcttggccaacatcgtaagcaacgactcagaaaatgggagtttgaccgacgaagccctcaacttactttaccacctcgagacctcagagacagtcctcaagaatcttttaaacaacaagaaagataacaatatcgtaaagtcgttgacgaagatcatgcagcgtgggatgtacgagtccagagtctatgccactttgcttctcaagaacattctcgaagtagcggatccaatgcagagtatgactctcaagccagaggttttcactgaggtcgtccagatcttggacgaccggatctcgcagaaggcgaccaaagctgccatgcatatattggtgaacatatgcccatggggaaggaacagacacaaggccgtggaagctggagtaatctctgtgatcatcgagcttctcatggacgagagcttcacatcagagaggagaggtccagagatggcgatggtggttcttgatctgttgtgtcagtgtgcggagggacgagccgagttcttgaaccacggagcagccatagcggtggtgtgcaagaagatacttagggtttcacagacagcaagcgatagagcggttagggttttgttgtcggtgggaaggttctgcgcaacgcctgctttgttgcacgagatgttacagttgggggttgtagcgaagctttgtcttgtgcttcaagtaagctgtggaggtaagaccaaagagaaggcaaaggagttgcttaagttgcacgctagggtctggaaggactcgccttgtctcccaaaaaacatgattcttgcatatccctgctga

SEQ ID NO: 42634 - protein, 456 aa, Arabidopsis thaliana
  peptide (1)..(456): Ceres Seq. ID no. 12604742
NLFKPIHIFPNPTTTTCIKKKIYSLSFFDQYIRQGSRQSPQHLHHMSGGIMDEEIEIPPFFLCPISLEIMKDPVIVSTGITYDRDSIEKWLFAGKKNSCPVTKQDITDADLTPNHTLRRLIQSWCTLNASYGVERIPTPRPPICKSEIEKLIRDSASSHENQVKCLKRLRQIVSENATNKRCLEAAGVPEFLANIVSNDSENGSLTDEALNLLYHLETSETVLKNLLNNKKDNNIVKSLTKIMQRGMYESRVYATLLLKNILEVADPMQSMTLKPEVFTEVVQILDDRISQKATKAAMHILVNICPWGRNRHKAVEAGVISVIIELLMDESFTSERRGPEMAMVVLDLLCQCAEGRAEFLNHGAAIAVVCKKILRVSQTASDRAVRVLLSVGRFCATPALLHEMLQLGVVAKLCLVLQVSCGGKTKEKAKELLKLHARVWKDSPCLPKNMILAYPC

SEQ ID NO: 42635 - protein, 411 aa, Arabidopsis thaliana
  peptide (1)..(411): Ceres Seq. ID no. 12604743
MSGGIMDEEIEIPPFFLCPISLEIMKDPVIVSTGITYDRDSIEKWLFAGKKNSCPVTKQDITDADLTPNHTLRRLIQSWCTLNASYGVERIPTPRPPICKSEIEKLIRDSASSHENQVKCLKRLRQIVSENATNKRCLEAAGVPEFLANIVSNDSENGSLTDEALNLLYHLETSETVLKNLLNNKKDNNIVKSLTKIMQRGMYESRVYATLLLKNILEVADPMQSMTLKPEVFTEVVQILDDRISQKATKAAMHILVNICPWGRNRHKAVEAGVISVIIELLMDESFTSERRGPEMAMVVLDLLCQCAEGRAEFLNHGAAIAVVCKKILRVSQTASDRAVRVLLSVGRFCATPALLHEMLQLGVVAKLCLVLQVSCGGKTKEKAKELLKLHARVWKDSPCLPKNMILAYPC

SEQ ID NO: 42636 - protein, 406 aa, Arabidopsis thaliana
  peptide (1)..(406): Ceres Seq. ID no. 12604744
MDEEIEIPPFFLCPISLEIMKDPVIVSTGITYDRDSIEKWLFAGKKNSCPVTKQDITDADLTPNHTLRRLIQSWCTLNASYGVERIPTPRPPICKSEIEKLIRDSASSHENQVKCLKRLRQIVSENATNKRCLEAAGVPEFLANIVSNDSENGSLTDEALNLLYHLETSETVLKNLLNNKKDNNIVKSLTKIMQRGMYESRVYATLLLKNILEVADPMQSMTLKPEVFTEVVQILDDRISQKATKAAMHILVNICPWGRNRHKAVEAGVISVIIELLMDESFTSERRGPEMAMVVLDLLCQCAEGRAEFLNHGAAIAVVCKKILRVSQTASDRAVRVLLSVGRFCATPALLHEMLQLGVVAKLCLVLQVSCGGKTKEKAKELLKLHARVWKDSPCLPKNMILAYPC

SEQ ID NO: 42637 - DNA, 786 bp, Arabidopsis thaliana
  misc_feature (1)..(786): Ceres Seq. ID no. 12738597
  misc_feature (1)..(786): Ortholog of  Ceres SEQ ID NO 13657873 as cited in SEQ ID NO 66361
aaacgttctagcaggaaagaagaagaacagagtatctgtgacggtcccatctatcagcacaaatgctcttggttatggtgcatttcttggaatatatgccaacttgagatatcagctgttatgtggatttgaaagaggagtgagcagtcactttgacgtcataggagtagcactcttcttcggcactgccttgaggattatgaatgtgcaattaggggaaaagtcaagacaagtatggctaggtgtagaggcagacccactggcgcagtcagatgatctgctggcaaaagcatacaaccgaccctcagaggaagcagtagcaaagccatcttcaaaatggttcatctcaaagaatgcaattgtctcagggctactcgggaagaagcaagaagattcagtttcagattctccacctccaaaggctcgggcgaaaaaggatagtgaggaagaaggtggctgcatctgcctcttaaataaccaacaaaacctctaaaatgtcacaattttcagagtccatggaagaacaacagtgaggttttgttgttcatttgaggcacacatgaaaaaagttttgttgccagaggaaggaagaagggatcaccaaacttggaggaattgaaaaacagctctatagcttcttttttttttttttactttatgactcgttctctctagttttaagtgcttttggaaagacatttctatttttaggtgtggtgataaagatgcttatctctggttaaaattctgtattttctcaatgtttctaataaatagccacatctt

SEQ ID NO: 42638 - protein, 163 aa, Arabidopsis thaliana
  peptide (1)..(163): Ceres Seq. ID no. 12738598
NVLAGKKKNRVSVTVPSISTNALGYGAFLGIYANLRYQLLCGFERGVSSHFDVIGVALFFGTALRIMNVQLGEKSRQVWLGVEADPLAQSDDLLAKAYNRPSEEAVAKPSSKWFISKNAIVSGLLGKKQEDSVSDSPPPKARAKKDSEEEGGCICLLNNQQNL

SEQ ID NO: 42639 - protein, 97 aa, Arabidopsis thaliana
  peptide (1)..(97): Ceres Seq. ID no. 12738599
MNVQLGEKSRQVWLGVEADPLAQSDDLLAKAYNRPSEEAVAKPSSKWFISKNAIVSGLLGKKQEDSVSDSPPPKARAKKDSEEEGGCICLLNNQQNL

SEQ ID NO: 42640 - DNA, 1475 bp, Arabidopsis thaliana
  misc_feature (1)..(1475): Ceres Seq. ID no. 12330833
  misc_feature (1)..(1475): Ortholog of  Ceres SEQ ID NO 13595351 as cited in SEQ ID NO 55934
  misc_feature (1)..(1475): Ortholog of  Ceres SEQ ID NO 13595513 as cited in SEQ ID NO 56663
  misc_feature (1)..(1475): Ortholog of  Ceres SEQ ID NO 13639645 as cited in SEQ ID NO 57488
ctgcctcaaacaaatagagcttatctcatcactcaccaaacaactctcatcaatataaagagaagagagtggtagagttatatattacacacataaacttagatatagtagtgttatattcttgattaagtaataaagatgaaaggtggaagcatggagaaaattaagccgatattggcgataatttcactgcaatttgggtatgcaggcatgtacatcatcaccatggtctcgttcaaacatggcatggaccattgggttcttgctacataccgtcatgtcgtagccacggttgtcatggctccctttgctctcatgttcgagaggaaaattaggcccaagatgacactagcaatattctggaggcttcttgctcttggaatattagagcccctcatggaccagaatttgtactacataggattgaaaaacacatcagcatcgtacacttctgcctttaccaatgcacttcccgccgtcaccttcattctcgccctcattttcaggcttgagacggtgaactttagaaaggtccacagtgttgcaaaagtggtaggaacggtaataacggttggaggagcaatgatcatgactttgtacaaaggtccggccattgagattgtgaaggccgcacataattctttccacggtggttcgagcagcacacccaccggccaacattgggtccttggaaccatagccattatgggcagtatctctacatgggctgctttcttcattttacagtcatacacattaaaagtctatccagctgagctatcactagtaacgttgatatgtgggatagggacgatcctaaacgctattgcttcgctaataatggttcgtgacccgagtgcatggaaaatcggcatggattcagggacactcgccgcggtttactctggagtggtttgttcgggaatagcttattacatacaaagcattgtgattaagcaacgtggaccggtttttacgacgtcgtttagtcctatgtgtatgatcatcactgccttcctcggtgcattggttttggctgagaaaatccatctcggaagcataatcggggcggttttcatagtgcttggactatacagtgtggtatggggtaaaagtaaagacgaagtgaatcctttggatgagaaaatcgtagccaagtcccaagagcttccgattactaacgtagtcaaacaaacgaacggtcacgatgtctcgggagcaccgactaacggtgtggttaccagtacctgatccaagtcccaaaagagaagaaagatacttaaacaaagatctcatctccatgcattggaggtggaagttttgattatctttcttgttttttgtgttttttcttttacattttctaatcgatctacgcttaacttttagtatctttttaccttatgtaatgattttctgcttctactttcttgtatttgaaatttccaaaacgaatgatgaatgcatcatttggt

SEQ ID NO: 42641 - protein, 370 aa, Arabidopsis thaliana
  peptide (1)..(370): Ceres Seq. ID no. 12330834
MKGGSMEKIKPILAIISLQFGYAGMYIITMVSFKHGMDHWVLATYRHVVATVVMAPFALMFERKIRPKMTLAIFWRLLALGILEPLMDQNLYYIGLKNTSASYTSAFTNALPAVTFILALIFRLETVNFRKVHSVAKVVGTVITVGGAMIMTLYKGPAIEIVKAAHNSFHGGSSSTPTGQHWVLGTIAIMGSISTWAAFFILQSYTLKVYPAELSLVTLICGIGTILNAIASLIMVRDPSAWKIGMDSGTLAAVYSGVVCSGIAYYIQSIVIKQRGPVFTTSFSPMCMIITAFLGALVLAEKIHLGSIIGAVFIVLGLYSVVWGKSKDEVNPLDEKIVAKSQELPITNVVKQTNGHDVSGAPTNGVVTST

SEQ ID NO: 42642 - protein, 365 aa, Arabidopsis thaliana
  peptide (1)..(365): Ceres Seq. ID no. 12330835
MEKIKPILAIISLQFGYAGMYIITMVSFKHGMDHWVLATYRHVVATVVMAPFALMFERKIRPKMTLAIFWRLLALGILEPLMDQNLYYIGLKNTSASYTSAFTNALPAVTFILALIFRLETVNFRKVHSVAKVVGTVITVGGAMIMTLYKGPAIEIVKAAHNSFHGGSSSTPTGQHWVLGTIAIMGSISTWAAFFILQSYTLKVYPAELSLVTLICGIGTILNAIASLIMVRDPSAWKIGMDSGTLAAVYSGVVCSGIAYYIQSIVIKQRGPVFTTSFSPMCMIITAFLGALVLAEKIHLGSIIGAVFIVLGLYSVVWGKSKDEVNPLDEKIVAKSQELPITNVVKQTNGHDVSGAPTNGVVTST

SEQ ID NO: 42643 - protein, 346 aa, Arabidopsis thaliana
  peptide (1)..(346): Ceres Seq. ID no. 12330836
MYIITMVSFKHGMDHWVLATYRHVVATVVMAPFALMFERKIRPKMTLAIFWRLLALGILEPLMDQNLYYIGLKNTSASYTSAFTNALPAVTFILALIFRLETVNFRKVHSVAKVVGTVITVGGAMIMTLYKGPAIEIVKAAHNSFHGGSSSTPTGQHWVLGTIAIMGSISTWAAFFILQSYTLKVYPAELSLVTLICGIGTILNAIASLIMVRDPSAWKIGMDSGTLAAVYSGVVCSGIAYYIQSIVIKQRGPVFTTSFSPMCMIITAFLGALVLAEKIHLGSIIGAVFIVLGLYSVVWGKSKDEVNPLDEKIVAKSQELPITNVVKQTNGHDVSGAPTNGVVTST

SEQ ID NO: 42644 - DNA, 1098 bp, Arabidopsis thaliana
  misc_feature (1)..(1098): Ceres Seq. ID no. 13487687
  misc_feature (1)..(1098): Ortholog of  Ceres SEQ ID NO 14303043 as cited in SEQ ID NO 67110
agagtgtgttttcgtttccgaatgctttcaattcgcagaagcttaactctagcaaaagagccaaaagatttgtttttgtttttgtgtaatctccgagctcgatgtgtatctacagatgactatgatccaccattttcgcctctctctaaacccactaaacctccaaaagagaagaagaagcagaagacgaagaagcaagaccagtcgtcggagctggtaaatgacctgaagattccagtgatttcagacctccctttcgattttaggtattcgtattcagaaactaacccggaaattgaaccgattggattccgtgaaccgaaacggttctctccatttggaccgggtcgattggaccggaaatggactgggactaccgcactggcgtcgccggagattgatcagagtcaatgggtggaggagagagcaagagttctcggcgagactttgacagaggatgaagttacagagcttattgaacggtatcggcatagtgactgtacacgacagattaatctcgggaaaggtggtgtgactcacaatatgatagatgatattcataaccattggaagaaagctgaggcagtgaggatcaaatgcttgggagtaccaactcttgacatggacaacatatgtttccacctcgaggaaaaatccggtggaaagattgtatacagaaacataaacattctagttttgtaccggggaaggaattatgatccgaagagtcgtcccatcattccactcatgttatggaagcctcatccgccaatatacccaagacttgtaaagaatgtggctgatgggttagaatttgaagagaccaaggagatgagaaatcgtgggcttcattctcctgccttaatgaaacttactaggaatggtgtttatgttaatgtcgttggaagagtgagggaagagtttgaaacagaagagattgtgagactagattgcactcatgttgggatgagtgactgcaaacgaattggtgtgaaactaaaggagatggttccatgtgttcccatattgttcaaagatgagcagatcatactctggagagggaagaggactggtgaagaagagcttgttactctatga

SEQ ID NO: 42645 - protein, 365 aa, Arabidopsis thaliana
  peptide (1)..(365): Ceres Seq. ID no. 13487688
RVCFRFRMLSIRRSLTLAKEPKDLFLFLCNLRARCVSTDDYDPPFSPLSKPTKPPKEKKKQKTKKQDQSSELVNDLKIPVISDLPFDFRYSYSETNPEIEPIGFREPKRFSPFGPGRLDRKWTGTTALASPEIDQSQWVEERARVLGETLTEDEVTELIERYRHSDCTRQINLGKGGVTHNMIDDIHNHWKKAEAVRIKCLGVPTLDMDNICFHLEEKSGGKIVYRNINILVLYRGRNYDPKSRPIIPLMLWKPHPPIYPRLVKNVADGLEFEETKEMRNRGLHSPALMKLTRNGVYVNVVGRVREEFETEEIVRLDCTHVGMSDCKRIGVKLKEMVPCVPILFKDEQIILWRGKRTGEEELVTL

SEQ ID NO: 42646 - protein, 358 aa, Arabidopsis thaliana
  peptide (1)..(358): Ceres Seq. ID no. 13487689
MLSIRRSLTLAKEPKDLFLFLCNLRARCVSTDDYDPPFSPLSKPTKPPKEKKKQKTKKQDQSSELVNDLKIPVISDLPFDFRYSYSETNPEIEPIGFREPKRFSPFGPGRLDRKWTGTTALASPEIDQSQWVEERARVLGETLTEDEVTELIERYRHSDCTRQINLGKGGVTHNMIDDIHNHWKKAEAVRIKCLGVPTLDMDNICFHLEEKSGGKIVYRNINILVLYRGRNYDPKSRPIIPLMLWKPHPPIYPRLVKNVADGLEFEETKEMRNRGLHSPALMKLTRNGVYVNVVGRVREEFETEEIVRLDCTHVGMSDCKRIGVKLKEMVPCVPILFKDEQIILWRGKRTGEEELVTL

SEQ ID NO: 42647 - protein, 184 aa, Arabidopsis thaliana
  peptide (1)..(184): Ceres Seq. ID no. 13487690
MIDDIHNHWKKAEAVRIKCLGVPTLDMDNICFHLEEKSGGKIVYRNINILVLYRGRNYDPKSRPIIPLMLWKPHPPIYPRLVKNVADGLEFEETKEMRNRGLHSPALMKLTRNGVYVNVVGRVREEFETEEIVRLDCTHVGMSDCKRIGVKLKEMVPCVPILFKDEQIILWRGKRTGEEELVTL

SEQ ID NO: 42648 - DNA, 1746 bp, Arabidopsis thaliana
  misc_feature (1)..(1746): Ceres Seq. ID no. 13489488
  misc_feature (1)..(1746): Ortholog of  Ceres SEQ ID NO 14314620 as cited in SEQ ID NO 56872
  misc_feature (1)..(1746): Ortholog of  Ceres SEQ ID NO 15178460 as cited in SEQ ID NO 66107
acggttccttctcttctctctctctctttctccgtctgtcgctgtctctctcgtcctctcctctgtttcgtagcttctgcagcagatctctctttgtccttctctctccctcagatcactatggcacagcaggaagctagtccttcccctggtgctgaggttgttggtcgtgcctttgtggagcaatactatcatattcttcaccaatctcccggtttagttcatcggttttatcaagattcgagctttttaacccgacctgatgttaccggtgctgtgactactgtcacaactatgcaagcgatcaacgacaagattctgtcgttgaaatatgaagactacacggctgagatagaaactgctgatgctcaggagtctcatgagagaggtgttattgtgctggttacaggacgcttaaccgggaacgataatgttaggaagaagtttagtcaatcttttttcttggctccacaagacaaaggatactttgtcttaaacgacgtgtttcgattccttgaggagaaagaggtgactgcacaagcccgctctgtccccatcaatggaaccactagggatgttcaggctcctattgaaccagaacgtgttgttgttagtcacgagcccgaggtagaacccgagccagttgcttctatcgaggaagaagatcttgacaatgtggcggaagtgtatgatccttctgataaagatgaaggagttgttgttgacgttgagcctattgaacctcccactcaaataagtcataatgaaatcttatcagtgcctcaaggagatgctcctaagcattcttatgcttcaatcctcaagcagatgaaaagcagtccagcaccaacaacacacgttgctagaaacaagccaagaccagctccagtcaaccagaagctgaccgcgcctcctgctgagcctgcagcaagacccgaggcttcagctcatgagaatgttccgaatagtagccatgttgatgtggaagatgatggtcattcgatttatgttcgaaatttgccgtttgactccacaccaacacaacttgaagaggtgttcaagaactttggtgcaatcaagcatgaggggattcaagtcagaagcaacaagcagcaaggtttctgttttggttttgtggaatttgaaacatctagcggaaagcaaagtgccctcgaggcctcaccagttacaattggagatcgtcaagctgttgtagaggagaagaaaacaaatagtcgaggaggaggcaacaatggaggtagcaggggaaggtacttttccggaagaggaagtttccgaaatgaaagcttcaaaggaggacgcggtggtgggggaagaggaggctatggaagaggaggaggtgagttttctggtagaccaaagagctcaaacccacgaaatggaggagaaggttaccaaagggttcctcaaaacggaggaggtggaagaggaggccgcggagaaggaggtcgtggtggagctcgaggtggtggttcatcttgactttgcttttaacgctcctctacaagagagtagttttaatttttgttttgcgtctttctttttgcctactacttgagttgatgtggtattggcttttttgtcggtctagtttttcaatattcttgctttttttcctctcttttttgtttttcatctttcaatctttctttggggtaatgtactcttcataaacaaacattcaatttcataaggaatccattatagagttgtgttctttacgcc

SEQ ID NO: 42649 - protein, 500 aa, Arabidopsis thaliana
  peptide (1)..(500): Ceres Seq. ID no. 13489489
TVPSLLSLSFSVCRCLSRPLLCFVASAADLSLSFSLPQITMAQQEASPSPGAEVVGRAFVEQYYHILHQSPGLVHRFYQDSSFLTRPDVTGAVTTVTTMQAINDKILSLKYEDYTAEIETADAQESHERGVIVLVTGRLTGNDNVRKKFSQSFFLAPQDKGYFVLNDVFRFLEEKEVTAQARSVPINGTTRDVQAPIEPERVVVSHEPEVEPEPVASIEEEDLDNVAEVYDPSDKDEGVVVDVEPIEPPTQISHNEILSVPQGDAPKHSYASILKQMKSSPAPTTHVARNKPRPAPVNQKLTAPPAEPAARPEASAHENVPNSSHVDVEDDGHSIYVRNLPFDSTPTQLEEVFKNFGAIKHEGIQVRSNKQQGFCFGFVEFETSSGKQSALEASPVTIGDRQAVVEEKKTNSRGGGNNGGSRGRYFSGRGSFRNESFKGGRGGGGRGGYGRGGGEFSGRPKSSNPRNGGEGYQRVPQNGGGGRGGRGEGGRGGARGGGSS

SEQ ID NO: 42650 - protein, 460 aa, Arabidopsis thaliana
  peptide (1)..(460): Ceres Seq. ID no. 13489490
MAQQEASPSPGAEVVGRAFVEQYYHILHQSPGLVHRFYQDSSFLTRPDVTGAVTTVTTMQAINDKILSLKYEDYTAEIETADAQESHERGVIVLVTGRLTGNDNVRKKFSQSFFLAPQDKGYFVLNDVFRFLEEKEVTAQARSVPINGTTRDVQAPIEPERVVVSHEPEVEPEPVASIEEEDLDNVAEVYDPSDKDEGVVVDVEPIEPPTQISHNEILSVPQGDAPKHSYASILKQMKSSPAPTTHVARNKPRPAPVNQKLTAPPAEPAARPEASAHENVPNSSHVDVEDDGHSIYVRNLPFDSTPTQLEEVFKNFGAIKHEGIQVRSNKQQGFCFGFVEFETSSGKQSALEASPVTIGDRQAVVEEKKTNSRGGGNNGGSRGRYFSGRGSFRNESFKGGRGGGGRGGYGRGGGEFSGRPKSSNPRNGGEGYQRVPQNGGGGRGGRGEGGRGGARGGGSS

SEQ ID NO: 42651 - protein, 402 aa, Arabidopsis thaliana
  peptide (1)..(402): Ceres Seq. ID no. 13489491
MQAINDKILSLKYEDYTAEIETADAQESHERGVIVLVTGRLTGNDNVRKKFSQSFFLAPQDKGYFVLNDVFRFLEEKEVTAQARSVPINGTTRDVQAPIEPERVVVSHEPEVEPEPVASIEEEDLDNVAEVYDPSDKDEGVVVDVEPIEPPTQISHNEILSVPQGDAPKHSYASILKQMKSSPAPTTHVARNKPRPAPVNQKLTAPPAEPAARPEASAHENVPNSSHVDVEDDGHSIYVRNLPFDSTPTQLEEVFKNFGAIKHEGIQVRSNKQQGFCFGFVEFETSSGKQSALEASPVTIGDRQAVVEEKKTNSRGGGNNGGSRGRYFSGRGSFRNESFKGGRGGGGRGGYGRGGGEFSGRPKSSNPRNGGEGYQRVPQNGGGGRGGRGEGGRGGARGGGSS

SEQ ID NO: 42652 - DNA, 1676 bp, Arabidopsis thaliana
  misc_feature (1)..(1676): Ceres Seq. ID no. 12422280
  misc_feature (1)..(1676): Ortholog of  Ceres SEQ ID NO 14303423 as cited in SEQ ID NO 54243
  misc_feature (1)..(1676): Ortholog of  Ceres SEQ ID NO 12611314 as cited in SEQ ID NO 56535
  misc_feature (1)..(1676): Ortholog of  Ceres SEQ ID NO 13661438 as cited in SEQ ID NO 61414
attaagacgggatgttgtaattaaacacctaccaacagacaaaatcaaaagataggaagccacgtatgcatatatttaggtgaagcttttgataaaacaaagcgttgggctcttccaaatatcaaaacaagttttttttgtttgttggcttataattcacctgagaaaaacaatatcaatcggctcgttttctctcctcagtgtttcttcagtagtcctgcgagatcgtataagagattcgaaaccctaatctatcaatttgatcctgtccattctctgttattgtttgagaattgtgcaatccgatggggacgatgcaccggagtggtgctcccagaaggacaaatgaaaatgcgaagcttatcataacgacaatcgtgggagtggtgtttggtttttttgttggtatcacattaccattaggttcctttagaaagattagcttaccttcaggccttatgtcatctcttgatgtagccatgtcagatgggaaattgttttctggtggcagatcacctgaagatattggttcaagaaagtctcctaagatatatgttccaaccaatccgcatggtgcagaactacttcctcctgggattatagtggcagaaacagatttctacttgcgccgattatggggtgaacctagtgaagatttgaagaagaagccaaagtatctcgtaacttttacagttggatttgagcagagaaacaacattaatgcagctgttaagaagttttctgaagatttccaaatattgttattccattatgatggccgaacaactgagtgggaccagtttgagtggtctaaaaatgcaatacatatcagtgcaaaaaagcaaacaaaatggtggtatgcaaagagatttttgcatcctgatgttgtctcagcttatgagtatatatttatatgggatgaagatcttggagtcgagcacttcaatgcagataggtgaattacttgtctgaaattgtagttgcagatcagtgacaatctttacaatttttattttaaattttcaggtacgttgagttagttaagaagcatggtttggagatttctcaaccaggcttagagccaaacaacggacttacatgggaaatgacaaagaggagaggtgaccgagatgtccacaaagaaactaaggaaaaaccaggatggtgcagtgatccacatttacctccatgtgctgcgtttgttgagattatggcacctgtattttctagagaagcatggcgatgtgtatggcatatgattcagaatgatcttgttcatggatggggtctcgattttgctctcagacgatgcgttgagcctgctcatgagaagattggtgtggtagattcacagtggattatccatcaagtgattccttcccttggaagtcagggtgagtcggaggaggggaaatctccatggcaaggggtgagggagagatgcagaaacgaatggacgatgttccagaatcgcgtggcagaagctgataaagcatacatggaacaacacaaggtaaaagaataatttgggcctcttcttactctgtctctgtaaatgaagcttacgtttccctgatcaagtgagtgtgaggagagagatctatgtagtcccctatttagtttaaaacatctcagatatatctacattattagctttttacctaatatatttcttc

SEQ ID NO: 42653 - protein, 217 aa, Arabidopsis thaliana
  peptide (1)..(217): Ceres Seq. ID no. 12422281
MGTMHRSGAPRRTNENAKLIITTIVGVVFGFFVGITLPLGSFRKISLPSGLMSSLDVAMSDGKLFSGGRSPEDIGSRKSPKIYVPTNPHGAELLPPGIIVAETDFYLRRLWGEPSEDLKKKPKYLVTFTVGFEQRNNINAAVKKFSEDFQILLFHYDGRTTEWDQFEWSKNAIHISAKKQTKWWYAKRFLHPDVVSAYEYIFIWDEDLGVEHFNADR

SEQ ID NO: 42654 - protein, 214 aa, Arabidopsis thaliana
  peptide (1)..(214): Ceres Seq. ID no. 12422282
MHRSGAPRRTNENAKLIITTIVGVVFGFFVGITLPLGSFRKISLPSGLMSSLDVAMSDGKLFSGGRSPEDIGSRKSPKIYVPTNPHGAELLPPGIIVAETDFYLRRLWGEPSEDLKKKPKYLVTFTVGFEQRNNINAAVKKFSEDFQILLFHYDGRTTEWDQFEWSKNAIHISAKKQTKWWYAKRFLHPDVVSAYEYIFIWDEDLGVEHFNADR

SEQ ID NO: 42655 - protein, 166 aa, Arabidopsis thaliana
  peptide (1)..(166): Ceres Seq. ID no. 12422283
MSSLDVAMSDGKLFSGGRSPEDIGSRKSPKIYVPTNPHGAELLPPGIIVAETDFYLRRLWGEPSEDLKKKPKYLVTFTVGFEQRNNINAAVKKFSEDFQILLFHYDGRTTEWDQFEWSKNAIHISAKKQTKWWYAKRFLHPDVVSAYEYIFIWDEDLGVEHFNADR

SEQ ID NO: 42656 - DNA, 1720 bp, Arabidopsis thaliana
  misc_feature (1)..(1720): Ceres Seq. ID no. 12580003
  misc_feature (1)..(1720): Ortholog of  Ceres SEQ ID NO 13584744 as cited in SEQ ID NO 69137
attcattcgtcttcagtcttccatttcaacaaatccttaatctgatctcacacacggcgagacacacatatagaatagagatagacagcgactctgatcgcgtaaagccacatgctttttatacaaactctacccaaataccaagtttttttaatctcccatttctgaatccttttctctctctctctctcgattctagcttcatcgctgttccaaatttaggaagtttctgagaaacaggtcacaggtctgtcttacatagttacattgatgggttgctcctggttatcgtgtcacaggagagaagctacagaagttgatggagaaatcgcagcgatagacaatgtaaagatatacaaatatagagagatacgtcaggccactgatgatttcagtgctgaaaataaaattggagaaggagggtttggttctgtgtacaagggctgtcttaaagatggaaaactcgcggctatcaaagtcctctcggctgagtcaagacaaggtgtaaaagaattcttgactgagatcaatgtgatatcagaaatacagcatgagaatttggttaagttgtatggatgctgcgtggaggggaatcataggattcttgtttacaatttccttgagaacaatagtcttgataagacgcttctagctgggggctacactcgtagtgggatacagtttgattggagtagtcgggccaatatttgtgttggggttgctaaaggtcttgcctttcttcatgaggaagtacgcccacacataattcacagagatatcaaagcaagcaacattctacttgacaaatatctatcccccaagatctctgattttggacttgctagacttatgccacctaacatgactcatgttagcactcgtgtcgcgggtacaattggttatttagcaccagagtatgcggttaggggacagttgacgcgtaaagctgatatatacagctttggagtccttctgatggagatagtcagtggaagaagtaacaaaaacacccgattacccactgagtatcaatatcttctggaaagagcttgggaactttatgagcggaatgagctcgtggatcttgttgattcagggttaaatggagtgtttgacgcagaggaagcttgtcggtacctaaaaattggtcttttgtgcacacaagacagtcccaagctaagaccaagtatgtccaccgtagtgaggttgttaacaggggagaaggatatagactacaagaaaataagcagaccgggtttgatttctgatttcatggatttgaaagtgagaggacctgtggcgacgaagacagagcaagtgaacagacaaaactacacaaacccttcttcttcgtctaatggctcatctagagatcactcaaatgcttactcatcaggggcttcatcagctaatgctggtaatacattcagcagtaccatatagaaagaaagaaaaaacctttttaaaatttttgctttttgtttttctgtttttgagatgtaaataagaaaaaagagtttgatgtttctgcagtctctcttctttttttctcgtccatggtttcaaacagaggttttctgttagttgctgaatccatagctgactgcagaaaaggcggtctctgcctcgctcttgttcaagtcagtcttcagttgcaaacagagagatttgagtgttgtatgtatgtatgtaaatatatttatagattgaagttgaatct

SEQ ID NO: 42657 - protein, 390 aa, Arabidopsis thaliana
  peptide (1)..(390): Ceres Seq. ID no. 12580004
MGCSWLSCHRREATEVDGEIAAIDNVKIYKYREIRQATDDFSAENKIGEGGFGSVYKGCLKDGKLAAIKVLSAESRQGVKEFLTEINVISEIQHENLVKLYGCCVEGNHRILVYNFLENNSLDKTLLAGGYTRSGIQFDWSSRANICVGVAKGLAFLHEEVRPHIIHRDIKASNILLDKYLSPKISDFGLARLMPPNMTHVSTRVAGTIGYLAPEYAVRGQLTRKADIYSFGVLLMEIVSGRSNKNTRLPTEYQYLLERAWELYERNELVDLVDSGLNGVFDAEEACRYLKIGLLCTQDSPKLRPSMSTVVRLLTGEKDIDYKKISRPGLISDFMDLKVRGPVATKTEQVNRQNYTNPSSSSNGSSRDHSNAYSSGASSANAGNTFSSTI

SEQ ID NO: 42658 - protein, 197 aa, Arabidopsis thaliana
  peptide (1)..(197): Ceres Seq. ID no. 12580005
MPPNMTHVSTRVAGTIGYLAPEYAVRGQLTRKADIYSFGVLLMEIVSGRSNKNTRLPTEYQYLLERAWELYERNELVDLVDSGLNGVFDAEEACRYLKIGLLCTQDSPKLRPSMSTVVRLLTGEKDIDYKKISRPGLISDFMDLKVRGPVATKTEQVNRQNYTNPSSSSNGSSRDHSNAYSSGASSANAGNTFSSTI

SEQ ID NO: 42659 - DNA, 1169 bp, Arabidopsis thaliana
  misc_feature (1)..(1169): Ceres Seq. ID no. 12338692
  misc_feature (1)..(1169): Ortholog of  Ceres SEQ ID NO 12608143 as cited in SEQ ID NO 59963
agatcttttatcactttcttcttcccggagaaaatttggccctaaatcactttcccgggaaaatcaaactctggggaaagagttgaaacaatgtcacaaggcgatacagtaccgcttcatccatcgtctcaatcagacattgacgagatcgagaatctgattaacgaaagcgtccaatcaggtcccggaaccgttctcgccgctcgtccaccgagcccaaccagaccttcgattccagtatcttcttcttcttcttcttctccgtttatgcaatcgaatcttccaccgcttcatccgtcgtcatcagctcagaaagtgacacatgtccccgttcctccgcctcttccggcggtaagtaactccagcaatttccaaggagcgagtgcttttggatctccgcctaatacgttgacggagcctgtgtgggatactgtgaagcgagatctgtctcggatcgtgagtaatttgaagcttgtggtgtttcctaatccgtatagggaagatcctgggaaggctcttagagattgggatctttggggtccgtttttcttcattgtgttcttgggtcttactctttcatggtcagcttccgtcaagaagtccgaggtatttgcagtggcatttgcactattagcagccggggcggtgatccttacactaaacgtgcttctcctgggtggacatataatcttcttccaaagcttgagccttctaggttactgtttatttccgctagacgttggagccgtgatctgcatgttgaaagacaatgtgatactgaagatggtggttgtgtctgtaacccttgcctggagctcatgggctgcttacccttttatgagctcagcggttaacccaagaagaaaagcactcgctctataccccgtcttcctcatgtatgtgtcagtcggttttctcatcatagccatcaattgaatccccaattttgagaagaaaaagggaatcatcacaggtattctcaggaatcagcttggatagaaatttttcatacatacacaaaccatcctgagttctgatgatcatgtataaacatgttttgttacccttttttgtgggtttggttaaaaagaagatcatcatttgtatgtgccccgctctatctgcattaagcttacatttatctttttggccataaatacaattttttt

SEQ ID NO: 42660 - protein, 281 aa, Arabidopsis thaliana
  peptide (1)..(281): Ceres Seq. ID no. 12338693
MSQGDTVPLHPSSQSDIDEIENLINESVQSGPGTVLAARPPSPTRPSIPVSSSSSSSPFMQSNLPPLHPSSSAQKVTHVPVPPPLPAVSNSSNFQGASAFGSPPNTLTEPVWDTVKRDLSRIVSNLKLVVFPNPYREDPGKALRDWDLWGPFFFIVFLGLTLSWSASVKKSEVFAVAFALLAAGAVILTLNVLLLGGHIIFFQSLSLLGYCLFPLDVGAVICMLKDNVILKMVVVSVTLAWSSWAAYPFMSSAVNPRRKALALYPVFLMYVSVGFLIIAIN

SEQ ID NO: 42661 - protein, 222 aa, Arabidopsis thaliana
  peptide (1)..(222): Ceres Seq. ID no. 12338694
MQSNLPPLHPSSSAQKVTHVPVPPPLPAVSNSSNFQGASAFGSPPNTLTEPVWDTVKRDLSRIVSNLKLVVFPNPYREDPGKALRDWDLWGPFFFIVFLGLTLSWSASVKKSEVFAVAFALLAAGAVILTLNVLLLGGHIIFFQSLSLLGYCLFPLDVGAVICMLKDNVILKMVVVSVTLAWSSWAAYPFMSSAVNPRRKALALYPVFLMYVSVGFLIIAIN

SEQ ID NO: 42662 - DNA, 741 bp, Arabidopsis thaliana
  misc_feature (1)..(741): Ceres Seq. ID no. 12482601
  misc_feature (1)..(741): Ortholog of  Ceres SEQ ID NO 12627215 as cited in SEQ ID NO 60976
  misc_feature (1)..(741): Ortholog of  Ceres SEQ ID NO 13654980 as cited in SEQ ID NO 63094
  misc_feature (1)..(741): Ortholog of  Ceres SEQ ID NO 12589584 as cited in SEQ ID NO 0
  misc_feature (1)..(741): Ortholog of  Ceres SEQ ID NO 12635657 as cited in SEQ ID NO 0
  misc_feature (1)..(741): Ortholog of  Ceres SEQ ID NO 12635879 as cited in SEQ ID NO 0
  misc_feature (1)..(741): Ortholog of  Ceres SEQ ID NO 13599649 as cited in SEQ ID NO 0
gttttcacttttcgatttgagaaaaaaaaaaacgatcacgaagatggcgaaagcaagctttattctactcggaactctcttcctcttcggagccatagcttcaattcaggcaaaagaagatctcaaggaggttactcacaaggtttacttcgatgtagagatcgacggcaaatccgctggtcgcgttgttataggactatttggcaaggcagttcctaaaactgcagaaaacttcagagctttgtgcacaggggagaaaggtgtagggaagagtgggaaacctctacactacaagggaagcaagttccatcgaatcattcccagctttatgatccagggaggtgacttcacgcatgggaacggtatgggtggagaatcaatctatggtcagaagtttgctgatgagaacttcaagctgaagcacactggaccagacacaaatggttcgcagttttttatcacaacggtgacaacaagctggttagatggaaggcatgtggtgtttgggaaagtggtgcaaggaatggatgtagtttataagattgaagctgagggcaaacaaagcggaactcctaagagcaaagtcgtaattgcagacagtggagaacttcctctctaagaatagcattttaaagttactcttacgagttagttgtaatctaaacacgtcccaaatgctacaagaacagaatggtgtcactggactctgaaatttcgttttcttgcgtaacagacttttcc

SEQ ID NO: 42663 - protein, 205 aa, Arabidopsis thaliana
  peptide (1)..(205): Ceres Seq. ID no. 12482602
FSLFDLRKKKTITKMAKASFILLGTLFLFGAIASIQAKEDLKEVTHKVYFDVEIDGKSAGRVVIGLFGKAVPKTAENFRALCTGEKGVGKSGKPLHYKGSKFHRIIPSFMIQGGDFTHGNGMGGESIYGQKFADENFKLKHTGPDTNGSQFFITTVTTSWLDGRHVVFGKVVQGMDVVYKIEAEGKQSGTPKSKVVIADSGELPL

SEQ ID NO: 42664 - protein, 191 aa, Arabidopsis thaliana
  peptide (1)..(191): Ceres Seq. ID no. 12482603
MAKASFILLGTLFLFGAIASIQAKEDLKEVTHKVYFDVEIDGKSAGRVVIGLFGKAVPKTAENFRALCTGEKGVGKSGKPLHYKGSKFHRIIPSFMIQGGDFTHGNGMGGESIYGQKFADENFKLKHTGPDTNGSQFFITTVTTSWLDGRHVVFGKVVQGMDVVYKIEAEGKQSGTPKSKVVIADSGELPL

SEQ ID NO: 42665 - DNA, 1856 bp, Arabidopsis thaliana
  misc_feature (1)..(1856): Ceres Seq. ID no. 12605224
  misc_feature (1)..(1856): Ortholog of  Ceres SEQ ID NO 15179924 as cited in SEQ ID NO 57437
  misc_feature (1)..(1856): Ortholog of  Ceres SEQ ID NO 15171286 as cited in SEQ ID NO 58206
  misc_feature (1)..(1856): Ortholog of  Ceres SEQ ID NO 14302451 as cited in SEQ ID NO 66180
agcctgtgtttcctctcccaattctttccatttttataccttctctcttcctcctttcttcttcactcatctcttcttcttcccttcaaccttcataatcagtggctccttcgcttattagtctttgtcaatcttaaatcgttgagtatccaaaaatcttaaactcaatggatccgtgctctttcgtacggatcatagtcggtaacttggccgttaggtttccgtcgtcgtcttcttcttcttcttcctcatcaggaccgtctgtttccggaatcaatccaacggctcctaactgttactgtaaaatcagattcaagaactttcctcgtgagattgtttctgttccggttatgttccgaactgaatctgaatccgagactcgttgctcctcctccggtaacgtatccaccgttgctgcttgtttcagtttaagtaaagctcagatcgaagcgtcgttgaagaaacctaaatttagtgttctctccgttgaggcttattcccgcggaaatagcgacggagacgacggtgttagcggcgcgtcgtgtggactcgctacggcgggtgagaagttgcttggtcgatttgaggtttcgcttgatttgaaatcggcggagacgaagagttttttggcgcataacggttgggttgctttgccgtctaagaaaacgaagagtaaaactggatccgatccggagctccacgttagcgtacgggtcgaacctgacccgagattcgtgtttcagttcgacggtgagcctgagtgtagtcctcaggtttttcaagttcaaggaaacacaaagcaagccgtgttcacttgcaaattcggctctagaaactccaactccggtgatcgaaatcttcttcacagttcttcgatgatgtctgagataagctcaacgagaagttgtatatcgtcgatgaattcggaaaaagaacaaccgtcaaaagagagaaaaggatggtcaataacggtccatgatctctccggttcacccgtggctatggcctctatggtaacacctttcgtaccatctcctggttcgaaccgggtgactcggtcaagtcccggagcgtggcttattcttcgacctgacggttgcacatggaagccatggggaagactagaagcatggcgtgaggctggttactctgacactctaggttatcgtttcgagcttttccaagacggtatagccaccgcagtttctgcatcgtcgtcgatcagtttgaaaaatggcgggagttttgttattgatgttaccggcggtacaagcacaacggcgtctacgccgacaacgagtcctcaaggaagctgggatctcggatccggttcaagcgccggttcaagacccgcgtcgagaccaggatcaggatccgggtcggatttcggatatctactaccgcaacatccgtctgcggccgcgcaaaacagagggttcgttatgtcggctacggttgaaggagttgggaaacgaagcaaaccagaagtagaagtcggtgtgacgcacgtgacatgtacggaggatgcagcagcgcacgtggcattagctgcggcggtggatctgagtttggatgcttgcaggcttttctcacacaagctaaggaaagagctgagacagcaaagccagcttggtgtcgtttgacttgtttcgctttgtcgttttaccaattcatgagttgtcttccactcacatttttttggtttgaattttctatttttttctttttaagatagcgttaggaattagccagccatttttttgagaggtggatgtcatcattattaaaaattgttaatatctttctcagtacagctaagaaatgacagtaacaactaacaaacaactcattatctc

SEQ ID NO: 42666 - protein, 491 aa, Arabidopsis thaliana
  peptide (1)..(491): Ceres Seq. ID no. 12605225
MDPCSFVRIIVGNLAVRFPSSSSSSSSSSGPSVSGINPTAPNCYCKIRFKNFPREIVSVPVMFRTESESETRCSSSGNVSTVAACFSLSKAQIEASLKKPKFSVLSVEAYSRGNSDGDDGVSGASCGLATAGEKLLGRFEVSLDLKSAETKSFLAHNGWVALPSKKTKSKTGSDPELHVSVRVEPDPRFVFQFDGEPECSPQVFQVQGNTKQAVFTCKFGSRNSNSGDRNLLHSSSMMSEISSTRSCISSMNSEKEQPSKERKGWSITVHDLSGSPVAMASMVTPFVPSPGSNRVTRSSPGAWLILRPDGCTWKPWGRLEAWREAGYSDTLGYRFELFQDGIATAVSASSSISLKNGGSFVIDVTGGTSTTASTPTTSPQGSWDLGSGSSAGSRPASRPGSGSGSDFGYLLPQHPSAAAQNRGFVMSATVEGVGKRSKPEVEVGVTHVTCTEDAAAHVALAAAVDLSLDACRLFSHKLRKELRQQSQLGVV

SEQ ID NO: 42667 - protein, 430 aa, Arabidopsis thaliana
  peptide (1)..(430): Ceres Seq. ID no. 12605226
MFRTESESETRCSSSGNVSTVAACFSLSKAQIEASLKKPKFSVLSVEAYSRGNSDGDDGVSGASCGLATAGEKLLGRFEVSLDLKSAETKSFLAHNGWVALPSKKTKSKTGSDPELHVSVRVEPDPRFVFQFDGEPECSPQVFQVQGNTKQAVFTCKFGSRNSNSGDRNLLHSSSMMSEISSTRSCISSMNSEKEQPSKERKGWSITVHDLSGSPVAMASMVTPFVPSPGSNRVTRSSPGAWLILRPDGCTWKPWGRLEAWREAGYSDTLGYRFELFQDGIATAVSASSSISLKNGGSFVIDVTGGTSTTASTPTTSPQGSWDLGSGSSAGSRPASRPGSGSGSDFGYLLPQHPSAAAQNRGFVMSATVEGVGKRSKPEVEVGVTHVTCTEDAAAHVALAAAVDLSLDACRLFSHKLRKELRQQSQLGVV

SEQ ID NO: 42668 - protein, 255 aa, Arabidopsis thaliana
  peptide (1)..(255): Ceres Seq. ID no. 12605227
MMSEISSTRSCISSMNSEKEQPSKERKGWSITVHDLSGSPVAMASMVTPFVPSPGSNRVTRSSPGAWLILRPDGCTWKPWGRLEAWREAGYSDTLGYRFELFQDGIATAVSASSSISLKNGGSFVIDVTGGTSTTASTPTTSPQGSWDLGSGSSAGSRPASRPGSGSGSDFGYLLPQHPSAAAQNRGFVMSATVEGVGKRSKPEVEVGVTHVTCTEDAAAHVALAAAVDLSLDACRLFSHKLRKELRQQSQLGVV

SEQ ID NO: 42669 - DNA, 2127 bp, Arabidopsis thaliana
  misc_feature (1)..(2127): Ceres Seq. ID no. 13646490
  misc_feature (1)..(2127): Ortholog of  Ceres SEQ ID NO 15174638 as cited in SEQ ID NO 53185
  misc_feature (1)..(2127): Ortholog of  Ceres SEQ ID NO 13657460 as cited in SEQ ID NO 66115
  misc_feature (1)..(2127): Ortholog of  Ceres SEQ ID NO 13659394 as cited in SEQ ID NO 67049
gataaccttcctctctatttttacaatttattttgttattagaagtggtagtggagtgaaaaaacaaatcctaagcagtcctaaccgatccccgaagctaaagattcttcaccttcccaaataaagcaaaacctagatccgacattgaaggaaaaaccttttagatccatctctgaaaaaaaaccaaccatgaagagagatcatcatcatcatcatcatcaagataagaagactatgatgatgaatgaagaagacgacggtaacggcatggatgagcttctagctgttcttggttacaaggttaggtcatccgaaatggctgatgttgctcagaaactcgagcagcttgaagttatgatgtctaatgttcaagaagacgatctttctcaactcgctactgagactgttcactataatccggcggagctttacacgtggcttgattctatgctcaccgaccttaatcctccgtcgtctaacgccgagtacgatcttaaagctattcccggtgacgcgattctcaatcagttcgctatcgattcggcttcttcgtctaaccaaggcggcggaggagatacgtatactacaaacaagcggttgaaatgctcaaacggcgtcgtggaaaccactacagcgacggctgagtcaactcggcatgttgtcctggttgactcgcaggagaacggtgtgcgtctcgttcacgcgcttttggcttgcgctgaagctgttcagaaagagaatctgactgtagcggaagctctggtgaagcaaatcggattcttagccgtttctcaaatcggagcgatgagaaaagtcgctacttacttcgccgaagctctcgcgcggcggatttaccgtctctctccgtcgcagagtccaatcgaccactctctctccgatactcttcagatgcacttctacgagacttgtccttatctcaagttcgctcacttcacggcgaatcaagcgattctcgaagcttttcaagggaagaaaagagttcatgtcattgatttctctatgagtcaaggtcttcaatggccggcgcttatgcaggctcttgcgcttcgacctggtggtcctcctgttttccggttaaccggaattggtccaccggcaccggataatttcgattatcttcatgaagttgggtgtaagctggctcatttagctgaggcgattcacgttgagtttgagtacagaggatttgtggctaacactttagctgatcttgatgcttcgatgcttgagcttagaccaagtgagattgaatctgttgcggttaactctgttttcgagcttcacaagctcttgggacgacctggtgcgatcgataaggttcttggtgtggtgaatcagattaaaccggagattttcactgtggttgagcaggaatcgaaccataatagtccgattttcttagatcggtttactgagtcgttgcattattactcgacgttgtttgactcgttggaaggtgtaccgagtggtcaagacaaggtcatgtcggaggtttacttgggtaaacagatctgcaacgttgtggcttgtgatggacctgaccgagttgagcgtcatgaaacgttgagtcagtggaggaaccggttcgggtctgctgggtttgcggctgcacatattggttcgaatgcgtttaagcaagcgagtatgcttttggctctgttcaacggcggtgagggttatcgggtggaggagagtgacggctgtctcatgttgggttggcacacacgaccgctcatagccacctcggcttggaaactctccaccaattagatggtggctcaatgaattgatctgttgaaccggttatgatgatagatttccgaccgaagccaaactaaatcctactgtttttccctttgtcacttgttaagatcttatctttcattatattaggtaattgaaaaattttaatctcgctttggagagttttttttttttgcatgtgacattggagggtaaattggataggcagaaatagaagtatgtgttaccaagtatgtgcaattggttgaaataaaatcatcttgagtgtcaccatctataaaattcattgtaatgactaatgagcctgattaaactgtctcttatgataatgtgctgattctc

SEQ ID NO: 42670 - protein, 533 aa, Arabidopsis thaliana
  peptide (1)..(533): Ceres Seq. ID no. 13646491
MKRDHHHHHHQDKKTMMMNEEDDGNGMDELLAVLGYKVRSSEMADVAQKLEQLEVMMSNVQEDDLSQLATETVHYNPAELYTWLDSMLTDLNPPSSNAEYDLKAIPGDAILNQFAIDSASSSNQGGGGDTYTTNKRLKCSNGVVETTTATAESTRHVVLVDSQENGVRLVHALLACAEAVQKENLTVAEALVKQIGFLAVSQIGAMRKVATYFAEALARRIYRLSPSQSPIDHSLSDTLQMHFYETCPYLKFAHFTANQAILEAFQGKKRVHVIDFSMSQGLQWPALMQALALRPGGPPVFRLTGIGPPAPDNFDYLHEVGCKLAHLAEAIHVEFEYRGFVANTLADLDASMLELRPSEIESVAVNSVFELHKLLGRPGAIDKVLGVVNQIKPEIFTVVEQESNHNSPIFLDRFTESLHYYSTLFDSLEGVPSGQDKVMSEVYLGKQICNVVACDGPDRVERHETLSQWRNRFGSAGFAAAHIGSNAFKQASMLLALFNGGEGYRVEESDGCLMLGWHTRPLIATSAWKLSTN

SEQ ID NO: 42671 - protein, 518 aa, Arabidopsis thaliana
  peptide (1)..(518): Ceres Seq. ID no. 13646492
MMMNEEDDGNGMDELLAVLGYKVRSSEMADVAQKLEQLEVMMSNVQEDDLSQLATETVHYNPAELYTWLDSMLTDLNPPSSNAEYDLKAIPGDAILNQFAIDSASSSNQGGGGDTYTTNKRLKCSNGVVETTTATAESTRHVVLVDSQENGVRLVHALLACAEAVQKENLTVAEALVKQIGFLAVSQIGAMRKVATYFAEALARRIYRLSPSQSPIDHSLSDTLQMHFYETCPYLKFAHFTANQAILEAFQGKKRVHVIDFSMSQGLQWPALMQALALRPGGPPVFRLTGIGPPAPDNFDYLHEVGCKLAHLAEAIHVEFEYRGFVANTLADLDASMLELRPSEIESVAVNSVFELHKLLGRPGAIDKVLGVVNQIKPEIFTVVEQESNHNSPIFLDRFTESLHYYSTLFDSLEGVPSGQDKVMSEVYLGKQICNVVACDGPDRVERHETLSQWRNRFGSAGFAAAHIGSNAFKQASMLLALFNGGEGYRVEESDGCLMLGWHTRPLIATSAWKLSTN

SEQ ID NO: 42672 - protein, 517 aa, Arabidopsis thaliana
  peptide (1)..(517): Ceres Seq. ID no. 13646493
MMNEEDDGNGMDELLAVLGYKVRSSEMADVAQKLEQLEVMMSNVQEDDLSQLATETVHYNPAELYTWLDSMLTDLNPPSSNAEYDLKAIPGDAILNQFAIDSASSSNQGGGGDTYTTNKRLKCSNGVVETTTATAESTRHVVLVDSQENGVRLVHALLACAEAVQKENLTVAEALVKQIGFLAVSQIGAMRKVATYFAEALARRIYRLSPSQSPIDHSLSDTLQMHFYETCPYLKFAHFTANQAILEAFQGKKRVHVIDFSMSQGLQWPALMQALALRPGGPPVFRLTGIGPPAPDNFDYLHEVGCKLAHLAEAIHVEFEYRGFVANTLADLDASMLELRPSEIESVAVNSVFELHKLLGRPGAIDKVLGVVNQIKPEIFTVVEQESNHNSPIFLDRFTESLHYYSTLFDSLEGVPSGQDKVMSEVYLGKQICNVVACDGPDRVERHETLSQWRNRFGSAGFAAAHIGSNAFKQASMLLALFNGGEGYRVEESDGCLMLGWHTRPLIATSAWKLSTN

SEQ ID NO: 42673 - DNA, 1854 bp, Arabidopsis thaliana
  misc_feature (1)..(1854): Ceres Seq. ID no. 13489613
  misc_feature (1)..(1854): Ortholog of  Ceres SEQ ID NO 12608629 as cited in SEQ ID NO 57974
ggaggagccgtcaaattgatttcgccgatttgctcatctctgactctcagttgctttgctccttctcatggagaatccggcggagaaacccgacccgaatccatcaaaacccaaaatcgaatctgaagatgaaagagaagaactaggagatattaacggcgacgaagaagaagaggaagagtatgaggaagaagacgatgggaaacctcgaacgcgagaggatgcaatcgcggataggatcaaagctgagtctctgttccgtcgtatgcgagcaactccggtcgctgtgcgtgttcacgacgtgatcgtcaagggaaacgagaagactaaggatcatgtcatcgaggctgaggtggatgttgtgaggcaagccactacgttgcaggagcttctcaaagcctctaaggttgccaatttcaatctacaagcgcttgatatcttcgattcagtcaaaattacgcttgattctggtcctcctgagcttcctggtaccaccaatgttgttatcgatgttgttgagagcaaaagccctatcaccggtcaaatcggaaccttcactaaagcagaggctcggtcatcaagccttgaaggctctttgaagtacaagaacatatttgggtatggagatatctgggacgggtctcttgcttatggctgtgatcactctgcagaggtcggcttggggatgtatttgccaaggttcagagggcgtcctactccatttacgtcgcgggtttacctttctacccaagattggcttaagttttcgtcttataaagaacgagctcttggtctttccctcgggcttatcgctagcaagtatcatgagctggcctataatattgcatggcgtaacctgatagacccatcgcaaatggcatcaagatcaataaggagacagctgggtcataatttggtttctgctctgaagtacactttcaaatttgaccagagaaactcatctttgaggccaacacgaggttactctttcatctcgacttctcaaataggtggtcttgcacctgatagtcgaactctccgctttttgcgccaggaaatcgaccttcgatatgctgttccactcgggttttatcgtgctgctctgaactttggtatagctgggggaatcacatttccatggggaagcggatacaagagcagagcttcttgtgtacctgagaggttcttcttaggtggaaacatatcgcctgtgtgttctttgggaggaccatctgcattatggggattcaagactaggggattgggtcctaacgaaccaaggagggaagtacaggacgatgagagtggtgacacatatgaacgggattttgtgggaggagatgttgcggttactgcatttgcagacctttcttttgatttcccattgaaatggttcagagacagaggaatccacggacatgtgtttgcatgtgccgggaatatggcggaattatcagagaacaagtataggaacttcacagctccaaagttgttggagacattcagaagctcagttggtgcaggaatcgtggtaccaactagtctatttcgcatggagctcaactactgccacatactgaagaaacaagaacacgatcgagcaaaatctggatttttcatgacattttcaacatcatcttaatgctacttttgatgatatcttaattttggctttgcactcacagtgtcatggcggagtcttttgttttgtttccaggagctttcattgtttaggttgttgtttggaattgaaaactgtgcaaattttagagagagagattacctgatgtgcggattgttcttgggaaggagatagatcaagaaataaaaattaactaaagttgatttgttttg

SEQ ID NO: 42674 - protein, 524 aa, Arabidopsis thaliana
  peptide (1)..(524): Ceres Seq. ID no. 13489614
MENPAEKPDPNPSKPKIESEDEREELGDINGDEEEEEEYEEEDDGKPRTREDAIADRIKAESLFRRMRATPVAVRVHDVIVKGNEKTKDHVIEAEVDVVRQATTLQELLKASKVANFNLQALDIFDSVKITLDSGPPELPGTTNVVIDVVESKSPITGQIGTFTKAEARSSSLEGSLKYKNIFGYGDIWDGSLAYGCDHSAEVGLGMYLPRFRGRPTPFTSRVYLSTQDWLKFSSYKERALGLSLGLIASKYHELAYNIAWRNLIDPSQMASRSIRRQLGHNLVSALKYTFKFDQRNSSLRPTRGYSFISTSQIGGLAPDSRTLRFLRQEIDLRYAVPLGFYRAALNFGIAGGITFPWGSGYKSRASCVPERFFLGGNISPVCSLGGPSALWGFKTRGLGPNEPRREVQDDESGDTYERDFVGGDVAVTAFADLSFDFPLKWFRDRGIHGHVFACAGNMAELSENKYRNFTAPKLLETFRSSVGAGIVVPTSLFRMELNYCHILKKQEHDRAKSGFFMTFSTSS

SEQ ID NO: 42675 - protein, 458 aa, Arabidopsis thaliana
  peptide (1)..(458): Ceres Seq. ID no. 13489615
MRATPVAVRVHDVIVKGNEKTKDHVIEAEVDVVRQATTLQELLKASKVANFNLQALDIFDSVKITLDSGPPELPGTTNVVIDVVESKSPITGQIGTFTKAEARSSSLEGSLKYKNIFGYGDIWDGSLAYGCDHSAEVGLGMYLPRFRGRPTPFTSRVYLSTQDWLKFSSYKERALGLSLGLIASKYHELAYNIAWRNLIDPSQMASRSIRRQLGHNLVSALKYTFKFDQRNSSLRPTRGYSFISTSQIGGLAPDSRTLRFLRQEIDLRYAVPLGFYRAALNFGIAGGITFPWGSGYKSRASCVPERFFLGGNISPVCSLGGPSALWGFKTRGLGPNEPRREVQDDESGDTYERDFVGGDVAVTAFADLSFDFPLKWFRDRGIHGHVFACAGNMAELSENKYRNFTAPKLLETFRSSVGAGIVVPTSLFRMELNYCHILKKQEHDRAKSGFFMTFSTSS

SEQ ID NO: 42676 - protein, 318 aa, Arabidopsis thaliana
  peptide (1)..(318): Ceres Seq. ID no. 13489616
MYLPRFRGRPTPFTSRVYLSTQDWLKFSSYKERALGLSLGLIASKYHELAYNIAWRNLIDPSQMASRSIRRQLGHNLVSALKYTFKFDQRNSSLRPTRGYSFISTSQIGGLAPDSRTLRFLRQEIDLRYAVPLGFYRAALNFGIAGGITFPWGSGYKSRASCVPERFFLGGNISPVCSLGGPSALWGFKTRGLGPNEPRREVQDDESGDTYERDFVGGDVAVTAFADLSFDFPLKWFRDRGIHGHVFACAGNMAELSENKYRNFTAPKLLETFRSSVGAGIVVPTSLFRMELNYCHILKKQEHDRAKSGFFMTFSTSS

SEQ ID NO: 42677 - DNA, 777 bp, Arabidopsis thaliana
  misc_feature (1)..(777): Ceres Seq. ID no. 13646172
  misc_feature (1)..(777): Ortholog of  Ceres SEQ ID NO 12586351 as cited in SEQ ID NO 64028
  misc_feature (1)..(777): Ortholog of  Ceres SEQ ID NO 13654441 as cited in SEQ ID NO 67814
  misc_feature (1)..(777): Ortholog of  Ceres SEQ ID NO 13596128 as cited in SEQ ID NO 67831
  misc_feature (1)..(777): Ortholog of  Ceres SEQ ID NO 12585194 as cited in SEQ ID NO 68878
  misc_feature (1)..(777): Ortholog of  Ceres SEQ ID NO 12589186 as cited in SEQ ID NO 0
aaaaaagtccattgtttcaagcaatactctcaagtctaaagaagaataaaaaaaatggatgaagaagttgagaacaaagtgatactccatggatcattcgcgagtccttacagcaaaaggattgagttagccctaaggcttaaatccataccttaccaattcgtgcaagaagatctccagaacaagagccaaaccctgctccggtataacccggttcacaagaagatcccggttcttgtccacaacggtaaacccatctctgagtccttgtttatcattgaatacatcgacgaaacgtggagtaacggtccacatattttgccagaagacccttatagaagatctaaagtccggttttgggctaactacatccaattacatctttacgatttggtgataaaagtggtgaaaagcgaaggagaagagcaaaagaaagctctcacagaagtaaaggagaagctgagcgttatagagaaagaagggcttaaggagattttctctgacactgatggtgaaccaactgtgacgaacgagaccatgagcctcgtagacattgtgatgtgcactttgcttagcccttacaaggcacacgaagaagttttgggtctgaaaattattgacccagagatagttcctggtgtctacgggtggatcaatgctataaacgaaaccagcgtggtcaaagatctaagtcctccttatgaacaaatcctagagattcttcgggctttcagacagatgtctctctctcccgttcttgaaacttatcagtcataa

SEQ ID NO: 42678 - protein, 240 aa, Arabidopsis thaliana
  peptide (1)..(240): Ceres Seq. ID no. 13646173
MDEEVENKVILHGSFASPYSKRIELALRLKSIPYQFVQEDLQNKSQTLLRYNPVHKKIPVLVHNGKPISESLFIIEYIDETWSNGPHILPEDPYRRSKVRFWANYIQLHLYDLVIKVVKSEGEEQKKALTEVKEKLSVIEKEGLKEIFSDTDGEPTVTNETMSLVDIVMCTLLSPYKAHEEVLGLKIIDPEIVPGVYGWINAINETSVVKDLSPPYEQILEILRAFRQMSLSPVLETYQS

SEQ ID NO: 42679 - DNA, 1212 bp, Arabidopsis thaliana
  misc_feature (1)..(1212): Ceres Seq. ID no. 12331218
  misc_feature (1)..(1212): Ortholog of  Ceres SEQ ID NO 12614972 as cited in SEQ ID NO 61986
  misc_feature (1)..(1212): Ortholog of  Ceres SEQ ID NO 12625706 as cited in SEQ ID NO 64144
  misc_feature (1)..(1212): Ortholog of  Ceres SEQ ID NO 13584933 as cited in SEQ ID NO 65009
  misc_feature (1)..(1212): Ortholog of  Ceres SEQ ID NO 12634984 as cited in SEQ ID NO 0
  misc_feature (1)..(1212): Ortholog of  Ceres SEQ ID NO 13599377 as cited in SEQ ID NO 0
acaacactcgacacaaaagcaaaaacaaaaatgggtgagaaagatattccaaggaacttgaaggaagaagaagaagaagaagaagaaaaccaaagtgaagaaaccaaaagtttgatctcttcacttccttcagacatagattgctcagggaccaagttgtacaagtaccaaggatgttggtacgacaaagatattctccaagcaatcctcaatttcaacaaaaactttcagccacaagaaacggatataattgttgcttctttccccaaatcgggtacgacttggctcaaggcactcacattcgcactcgcgcaaagatcaaaacacacttcagacaatcatcctctgctaactcataatcctcatgagctagtgccgtacctcgagctcgatctttatctcaaaagctcgaaaccggatttgaccaagttgccatcatcatctccgagattgttctcaacccacatgtcctttgatgcgcttaaagtaccgttgaaagagtctccttgcaagatcgtgtacgtgtgcaggaacgtgaatgacgtattgatatcactttggtgtttcgaaaactccatgagtggagaaaacaatttaagtctcgaggctttgttcgagtctttatgtagcggagttaacttatgcggtcccttatgggaaaatgtgttaggctattggagaggaagcttggaagatcctaagcatgtgcttttcttgaggtacgaggagttgaagacggagcctcgtgtgcaaatcaagagacttgcagagttcttagattgtccattcacaaaggaagaagaagatagtggaggtgtagacaagatcttggaactttgttctctaagaaaccttagcggtttggagatcaacaaaacaggaagcttgtcggaaggagtaagtttcaagagttttttccgtaaaggggaagttggtgattggaagagttatatgactcctgaaatggaaaacaaaatcgacatgattgttgaggagaaacttcaaggctctggtttgaaattgtagagttcatatctctatgtatatgtgtgggaacaggtttaatctcaaacctaataatgctggtttgttcttttcttgtatgcaatgtaataaaagttactttgatgtaaggttaagagtttaagattcttagtgatgtgttgttgtttttgtttcgtttgataacgaataaagctagcggcttttctc

SEQ ID NO: 42680 - protein, 341 aa, Arabidopsis thaliana
  peptide (1)..(341): Ceres Seq. ID no. 12331219
TTLDTKAKTKMGEKDIPRNLKEEEEEEEENQSEETKSLISSLPSDIDCSGTKLYKYQGCWYDKDILQAILNFNKNFQPQETDIIVASFPKSGTTWLKALTFALAQRSKHTSDNHPLLTHNPHELVPYLELDLYLKSSKPDLTKLPSSSPRLFSTHMSFDALKVPLKESPCKIVYVCRNVNDVLISLWCFENSMSGENNLSLEALFESLCSGVNLCGPLWENVLGYWRGSLEDPKHVLFLRYEELKTEPRVQIKRLAEFLDCPFTKEEEDSGGVDKILELCSLRNLSGLEINKTGSLSEGVSFKSFFRKGEVGDWKSYMTPEMENKIDMIVEEKLQGSGLKL

SEQ ID NO: 42681 - protein, 331 aa, Arabidopsis thaliana
  peptide (1)..(331): Ceres Seq. ID no. 12331220
MGEKDIPRNLKEEEEEEEENQSEETKSLISSLPSDIDCSGTKLYKYQGCWYDKDILQAILNFNKNFQPQETDIIVASFPKSGTTWLKALTFALAQRSKHTSDNHPLLTHNPHELVPYLELDLYLKSSKPDLTKLPSSSPRLFSTHMSFDALKVPLKESPCKIVYVCRNVNDVLISLWCFENSMSGENNLSLEALFESLCSGVNLCGPLWENVLGYWRGSLEDPKHVLFLRYEELKTEPRVQIKRLAEFLDCPFTKEEEDSGGVDKILELCSLRNLSGLEINKTGSLSEGVSFKSFFRKGEVGDWKSYMTPEMENKIDMIVEEKLQGSGLKL

SEQ ID NO: 42682 - protein, 186 aa, Arabidopsis thaliana
  peptide (1)..(186): Ceres Seq. ID no. 12331221
MSFDALKVPLKESPCKIVYVCRNVNDVLISLWCFENSMSGENNLSLEALFESLCSGVNLCGPLWENVLGYWRGSLEDPKHVLFLRYEELKTEPRVQIKRLAEFLDCPFTKEEEDSGGVDKILELCSLRNLSGLEINKTGSLSEGVSFKSFFRKGEVGDWKSYMTPEMENKIDMIVEEKLQGSGLKL

SEQ ID NO: 42683 - DNA, 1442 bp, Arabidopsis thaliana
  misc_feature (1)..(1442): Ceres Seq. ID no. 12336256
  misc_feature (1)..(1442): Ortholog of  Ceres SEQ ID NO 12625831 as cited in SEQ ID NO 65139
attcattcattcatgtctctacccaaatctatctggtaactcaaaatcatcacttcttctactcaacaatttcacaatcccatccccaattttacaatccctagatctccctccctcttcaattcgctgtagttttcatggaccttgttcgattgagagacataggttcaatttcacctcagagaagaaggaaatggctgattctattagcggttttcggtgtttcgggttacggagtttacagggtttacaattctcaatacatcgctaagaagacgaagcgtcttatgaaactcttctcaggcattgtttcattcgccgaaatggtcatcgattccgcggagacgataagtatcgtttctcgagatttgaaagagtttctcgaatcaaattcccacgaaatccctaatagcttgaaacagctatcgaaaatcaccaaatcaaaagagttcactgattctctagctagggtttctgaagctgtagcgattggtgttttccgtgggtataattccgatccaaacgtcgaaaaagaatcgaatttgagtgtagttgatagagttttctcagaggaaggagctggttttgtttctgttgttgttggtagttttgctaagaatcttgttcttggattttactctggtgagattgagattggtagtgatgattctttaaaacctagatggatgaatttgcttagtgatgataagtgtagagagcttttagcagattgtattgagagattcactagctcagctgtatcggtgtatatcgataaaacggttggtgttaatacttatgatcagatattcgctggtttgacgaatccgaaacatcgagatagtgctcgagatgttcttgtttcggtttgtaatggagctcttgagacgttcatgagaacttctcatgatgtcttcacatcttcaggagagaaaaccgattcctccttgaggaagtcggagaatcgagaaaacggatgggcagaggcgctttcgactactttagcagtgccgagtaataggaagttcatgtttgatgttacgggaagagtgacgctagagacgatgagatcaattcttgagtttgtaatcttgaaaacgtcacaaagttttaagaggagtttggatgtgattcatgaagaagttacagagagaggacgtcaagtagttggatacgttggtgccaaatcttcagtgataatcactgtttgtcttgcggtttactttcacatctttaaccgctttgttcgaggccctccggtttgtttaagccagcaattctagttaatcggatcgatctattagcttgttagagttgttagggacattagatcttcagccttccatattcttattggtaagttggagctgaatagcgtagtagagtcttagcagtgttatgtacccacatattcattattgtttatttatagaggattcttg

SEQ ID NO: 42684 - protein, 381 aa, Arabidopsis thaliana
  peptide (1)..(381): Ceres Seq. ID no. 12336257
MDLVRLRDIGSISPQRRRKWLILLAVFGVSGYGVYRVYNSQYIAKKTKRLMKLFSGIVSFAEMVIDSAETISIVSRDLKEFLESNSHEIPNSLKQLSKITKSKEFTDSLARVSEAVAIGVFRGYNSDPNVEKESNLSVVDRVFSEEGAGFVSVVVGSFAKNLVLGFYSGEIEIGSDDSLKPRWMNLLSDDKCRELLADCIERFTSSAVSVYIDKTVGVNTYDQIFAGLTNPKHRDSARDVLVSVCNGALETFMRTSHDVFTSSGEKTDSSLRKSENRENGWAEALSTTLAVPSNRKFMFDVTGRVTLETMRSILEFVILKTSQSFKRSLDVIHEEVTERGRQVVGYVGAKSSVIITVCLAVYFHIFNRFVRGPPVCLSQQF

SEQ ID NO: 42685 - protein, 331 aa, Arabidopsis thaliana
  peptide (1)..(331): Ceres Seq. ID no. 12336258
MKLFSGIVSFAEMVIDSAETISIVSRDLKEFLESNSHEIPNSLKQLSKITKSKEFTDSLARVSEAVAIGVFRGYNSDPNVEKESNLSVVDRVFSEEGAGFVSVVVGSFAKNLVLGFYSGEIEIGSDDSLKPRWMNLLSDDKCRELLADCIERFTSSAVSVYIDKTVGVNTYDQIFAGLTNPKHRDSARDVLVSVCNGALETFMRTSHDVFTSSGEKTDSSLRKSENRENGWAEALSTTLAVPSNRKFMFDVTGRVTLETMRSILEFVILKTSQSFKRSLDVIHEEVTERGRQVVGYVGAKSSVIITVCLAVYFHIFNRFVRGPPVCLSQQF

SEQ ID NO: 42686 - protein, 319 aa, Arabidopsis thaliana
  peptide (1)..(319): Ceres Seq. ID no. 12336259
MVIDSAETISIVSRDLKEFLESNSHEIPNSLKQLSKITKSKEFTDSLARVSEAVAIGVFRGYNSDPNVEKESNLSVVDRVFSEEGAGFVSVVVGSFAKNLVLGFYSGEIEIGSDDSLKPRWMNLLSDDKCRELLADCIERFTSSAVSVYIDKTVGVNTYDQIFAGLTNPKHRDSARDVLVSVCNGALETFMRTSHDVFTSSGEKTDSSLRKSENRENGWAEALSTTLAVPSNRKFMFDVTGRVTLETMRSILEFVILKTSQSFKRSLDVIHEEVTERGRQVVGYVGAKSSVIITVCLAVYFHIFNRFVRGPPVCLSQQF

SEQ ID NO: 42687 - DNA, 1305 bp, Arabidopsis thaliana
  misc_feature (1)..(1305): Ceres Seq. ID no. 12331210
  misc_feature (1)..(1305): Ortholog of  Ceres SEQ ID NO 13661504 as cited in SEQ ID NO 61294
  misc_feature (1)..(1305): Ortholog of  Ceres SEQ ID NO 12615311 as cited in SEQ ID NO 62517
  misc_feature (1)..(1305): Ortholog of  Ceres SEQ ID NO 12617197 as cited in SEQ ID NO 63406
  misc_feature (1)..(1305): Ortholog of  Ceres SEQ ID NO 13598565 as cited in SEQ ID NO 65250
  misc_feature (1)..(1305): Ortholog of  Ceres SEQ ID NO 13598597 as cited in SEQ ID NO 65496
  misc_feature (1)..(1305): Ortholog of  Ceres SEQ ID NO 13596227 as cited in SEQ ID NO 68750
  misc_feature (1)..(1305): Ortholog of  Ceres SEQ ID NO 15179068 as cited in SEQ ID NO 0
aacagaaaaatagttcacccaactttctcctattaatacttctctcttctctcttcctacttctaaccttctttttctccttcatcacacacatatacacacgctttcgtttaaactctctctgtttcaatcattaatcagaaagaagcaacacaaatatggatcacgacaagtctacttcttgttgctgcgttcttgatgcttccacttatgttggtttctggattctcaagaaattgcttagcagaggatactctgttcacgcagcgattcgtagaaacggggagagtgaaattgaggagatgatcagagagatggaaacaacagaagagagattagtggtgtacgatgtagatgtgttggattatcaaagcatacttgtctctctcaagacatgtaacgttgtcttctgttgcttagacagccctgaagggtacgatgagaaggaggtggatttggaagtgagaggagcgatcaatgtggtggaagcgtgtggaagaacagagagtatagagaagattgtgttttcttcttcattaacagcttcaatttggagagacaacattggaactcaaaaggatgttgatgagaagtgttggagtgaccaagacttctgtcgcagcaagaagttgtggcatgcactggcaaagatgttgtcggagaaagcagcttgggcattagccatggaccgtaggctcaacatggtctctatcaaccctggtcttgtcgtcggaccatctgtcgcacaacacaacgctaggcccaccatgtcataccttaaaggagctgcacaaatgtatgagaatggtgtgttagcttatgtagacgttaagtttctagcggacgttcatattagagcattcgaggatgtttcagcttgcggtcgatacttctgcttcaaccaaatcgtcaacacagaagaagaagctctcaagctagtggagagtttgtctcctttgattcctatgccaccgaggtatgagaatgagatgcacggaagtgaagtttacgaagaaagattaaggaacaacaaattaagcaagctggtagaagctggctctgcttgttaaagaaagatttcacaatttaaattgaaagagacgagattatacaaaaaaaagttgtaatttgtatattgatcttctcatagatgcatgtgttgcttgtgaactattaaaaagaaagaaaaaaaacccctttcatctcattttataactaatagtatatgagtagttttttttttttttggctgggggcacaatatgaatgttttctaatttttgttaaacatattaaatcttggtg

SEQ ID NO: 42688 - protein, 303 aa, Arabidopsis thaliana
  peptide (1)..(303): Ceres Seq. ID no. 12331211
MDHDKSTSCCCVLDASTYVGFWILKKLLSRGYSVHAAIRRNGESEIEEMIREMETTEERLVVYDVDVLDYQSILVSLKTCNVVFCCLDSPEGYDEKEVDLEVRGAINVVEACGRTESIEKIVFSSSLTASIWRDNIGTQKDVDEKCWSDQDFCRSKKLWHALAKMLSEKAAWALAMDRRLNMVSINPGLVVGPSVAQHNARPTMSYLKGAAQMYENGVLAYVDVKFLADVHIRAFEDVSACGRYFCFNQIVNTEEEALKLVESLSPLIPMPPRYENEMHGSEVYEERLRNNKLSKLVEAGSAC

SEQ ID NO: 42689 - protein, 255 aa, Arabidopsis thaliana
  peptide (1)..(255): Ceres Seq. ID no. 12331212
MIREMETTEERLVVYDVDVLDYQSILVSLKTCNVVFCCLDSPEGYDEKEVDLEVRGAINVVEACGRTESIEKIVFSSSLTASIWRDNIGTQKDVDEKCWSDQDFCRSKKLWHALAKMLSEKAAWALAMDRRLNMVSINPGLVVGPSVAQHNARPTMSYLKGAAQMYENGVLAYVDVKFLADVHIRAFEDVSACGRYFCFNQIVNTEEEALKLVESLSPLIPMPPRYENEMHGSEVYEERLRNNKLSKLVEAGSAC

SEQ ID NO: 42690 - protein, 251 aa, Arabidopsis thaliana
  peptide (1)..(251): Ceres Seq. ID no. 12331213
METTEERLVVYDVDVLDYQSILVSLKTCNVVFCCLDSPEGYDEKEVDLEVRGAINVVEACGRTESIEKIVFSSSLTASIWRDNIGTQKDVDEKCWSDQDFCRSKKLWHALAKMLSEKAAWALAMDRRLNMVSINPGLVVGPSVAQHNARPTMSYLKGAAQMYENGVLAYVDVKFLADVHIRAFEDVSACGRYFCFNQIVNTEEEALKLVESLSPLIPMPPRYENEMHGSEVYEERLRNNKLSKLVEAGSAC

SEQ ID NO: 42691 - DNA, 1125 bp, Arabidopsis thaliana
  misc_feature (1)..(1125): Ceres Seq. ID no. 12738333
  misc_feature (1)..(1125): Ortholog of  Ceres SEQ ID NO 14313292 as cited in SEQ ID NO 67393
ctctagggaagcttgtgtacgatgttgtagacgccaagaacattcttgagatccctcctgttaccgctcaggtgactaaattcaaatgtggagggtttgttctcggactctgtatgaatcactgtatgttcgatggaattggagctatggagtttgttaactcatggggtcaagtcgctagaggcttaccattaacaactcccccattctcagacagaaccattctcaatgctcgaaaccctccaaagatcgacaatctccaccaagaatttgaagagatcgaagataaatccaacatcaactctctttacaccaaagagccaactctctacagatccttctgctttgatccagagaaaatcaagaaacttaagctccaagcaacagagaacagtgagtctctcctcggtaactcatgcacaagttttgaggctttatctgcttttgtctggagagcaagaaccaagtcgttgaagacgttgagtgatcagaaaacgaagcttctcttcgccgttgatggtagagccaagttcgagcctcaactgccaaaagggtacttcggaaatggaattgttctcacagactccatctgtgaagctggggagcttatcgaaaaaccgttgagtttcgcggtgggattagtcagagaagccattaagatggtaactgatgggtacatgagatctgctattgattacttcgaagtcacgagagcaagaccttctctttcctcgactcttctgatcactacatggtcaagattgggtttccacacgacagatttcggttggggagaaccgattttatccggtccagtagctttgcctgagaaagaagtaactctgtttttgtctcatggagaacagaggagaagcatcaatgtgcttcttggacttcccgctacagccatggatgtgtttcaagaacagtttttacagatataatatgaacaacgacaaaatacaaatatctggcaattattgtcaaaacctattcgttttactctgtttttcttgcttccttttttttttatctttttgatttatgctgaattattattgttatcttcatcttaaacttgtctgtatcttgcatcaagtttcaaccataaatttatattattcc

SEQ ID NO: 42692 - protein, 313 aa, Arabidopsis thaliana
  peptide (1)..(313): Ceres Seq. ID no. 12738334
LGKLVYDVVDAKNILEIPPVTAQVTKFKCGGFVLGLCMNHCMFDGIGAMEFVNSWGQVARGLPLTTPPFSDRTILNARNPPKIDNLHQEFEEIEDKSNINSLYTKEPTLYRSFCFDPEKIKKLKLQATENSESLLGNSCTSFEALSAFVWRARTKSLKTLSDQKTKLLFAVDGRAKFEPQLPKGYFGNGIVLTDSICEAGELIEKPLSFAVGLVREAIKMVTDGYMRSAIDYFEVTRARPSLSSTLLITTWSRLGFHTTDFGWGEPILSGPVALPEKEVTLFLSHGEQRRSINVLLGLPATAMDVFQEQFLQI

SEQ ID NO: 42693 - protein, 276 aa, Arabidopsis thaliana
  peptide (1)..(276): Ceres Seq. ID no. 12738335
MNHCMFDGIGAMEFVNSWGQVARGLPLTTPPFSDRTILNARNPPKIDNLHQEFEEIEDKSNINSLYTKEPTLYRSFCFDPEKIKKLKLQATENSESLLGNSCTSFEALSAFVWRARTKSLKTLSDQKTKLLFAVDGRAKFEPQLPKGYFGNGIVLTDSICEAGELIEKPLSFAVGLVREAIKMVTDGYMRSAIDYFEVTRARPSLSSTLLITTWSRLGFHTTDFGWGEPILSGPVALPEKEVTLFLSHGEQRRSINVLLGLPATAMDVFQEQFLQI

SEQ ID NO: 42694 - protein, 272 aa, Arabidopsis thaliana
  peptide (1)..(272): Ceres Seq. ID no. 12738336
MFDGIGAMEFVNSWGQVARGLPLTTPPFSDRTILNARNPPKIDNLHQEFEEIEDKSNINSLYTKEPTLYRSFCFDPEKIKKLKLQATENSESLLGNSCTSFEALSAFVWRARTKSLKTLSDQKTKLLFAVDGRAKFEPQLPKGYFGNGIVLTDSICEAGELIEKPLSFAVGLVREAIKMVTDGYMRSAIDYFEVTRARPSLSSTLLITTWSRLGFHTTDFGWGEPILSGPVALPEKEVTLFLSHGEQRRSINVLLGLPATAMDVFQEQFLQI

SEQ ID NO: 42695 - DNA, 1648 bp, Arabidopsis thaliana
  misc_feature (1)..(1648): Ceres Seq. ID no. 12330837
  misc_feature (1)..(1648): Ortholog of  Ceres SEQ ID NO 14307273 as cited in SEQ ID NO 54302
  misc_feature (1)..(1648): Ortholog of  Ceres SEQ ID NO 14315317 as cited in SEQ ID NO 58242
  misc_feature (1)..(1648): Ortholog of  Ceres SEQ ID NO 13655375 as cited in SEQ ID NO 63347
  misc_feature (1)..(1648): Ortholog of  Ceres SEQ ID NO 12626166 as cited in SEQ ID NO 64505
  misc_feature (1)..(1648): Ortholog of  Ceres SEQ ID NO 14301599 as cited in SEQ ID NO 65699
aaaaaaagaatttataacaactccaaggaaagcatcaatggtgggagaagaagcttgcttgtgataatatattcagctacgtcgagtgaagaaccagtgaagcataagtagcagagacagagagagatacgtgagtgtgtgtctgtgtttttcgctttttggctttcttcgctgattccacgaacggcgtgaatcgacttttctccagatctcatctctttcagtgtttgattctgtcaaaatctgcaagcgaatcgagatttctcagatctcgttttcgcttgcacgagattcagatctgatagtgtcggtgttcaattttctcaaatccaaatggagaaaccggagagcgagaagaaatcggcggtgtctgatgtcggtgcatgggctatgaatgtaatcagctccgttggaatcatcatggctaataaacagctcatgtcttcctctggtttcggttttggctttgctacaacgttaacgggatttcactttgcattcactgctcttgttggtatggtgtcaaacgcaacgggactatcagcttctaagcatgttcctctttgggagcttctctggttctcaattgttgctaatatctctatcgctgctatgaactttagtcttatgctcaactctgttggcttctatcagatttcgaaattgagcatgattccggtggtatgcgtgttggaatggattctacatagcaagcattattgtaaagaagtgaaagcttctgtaatggttgtggttatcggtgttgggatttgtactgtgactgatgtcaaagttaatgccaaaggtttcatttgtgcatgcactgccgttttctccacttctctgcagcagatttctataggctctctgcagaagaagtactcagtaggatcctttgaattgctgagcaaaactgcaccaatccaagccatttcacttctcatctgtggcccctttgttgactatttgttgagcggcaaattcatatctacttaccagatgacttatggtgccatcttctgcattcttctctcctgtgcattagccgttttctgtaacataagccaatatctctgcatcggaagattctcagcgacatctttccaagttctaggccacatgaaaacagtatgcgtcctcacattaggatggcttctctttgattccgagatgacattcaagaacatcgccgggatggccatagccattgttggaatggtgatctatagttgggctgttgatatagagaaacagaggaacgcaaagtcaacgccacacggcaaacacagtatgaccgaagatgagattaagctactcaaagaaggagttgagcatatcgacttgaaagacgttgaactcggtgacactaaaccataagtgggtgcttataacccatttgaaattactcgtcgctactgattcgaattctttatacaaatatttcctttgtgtgccatttactttgttctttccacttcctatatatgtcttagaacattttgggcttttcagaaagcccataaatccttctttgcttgagaagaaggcccgtccttgaatagtaagtgtcctatatagtaaagtaaacagaaatgtcaactgaagcatgtgattttattcatttgattatatatgtctatgaactacc

SEQ ID NO: 42696 - protein, 347 aa, Arabidopsis thaliana
  peptide (1)..(347): Ceres Seq. ID no. 12330838
MEKPESEKKSAVSDVGAWAMNVISSVGIIMANKQLMSSSGFGFGFATTLTGFHFAFTALVGMVSNATGLSASKHVPLWELLWFSIVANISIAAMNFSLMLNSVGFYQISKLSMIPVVCVLEWILHSKHYCKEVKASVMVVVIGVGICTVTDVKVNAKGFICACTAVFSTSLQQISIGSLQKKYSVGSFELLSKTAPIQAISLLICGPFVDYLLSGKFISTYQMTYGAIFCILLSCALAVFCNISQYLCIGRFSATSFQVLGHMKTVCVLTLGWLLFDSEMTFKNIAGMAIAIVGMVIYSWAVDIEKQRNAKSTPHGKHSMTEDEIKLLKEGVEHIDLKDVELGDTKP

SEQ ID NO: 42697 - protein, 328 aa, Arabidopsis thaliana
  peptide (1)..(328): Ceres Seq. ID no. 12330839
MNVISSVGIIMANKQLMSSSGFGFGFATTLTGFHFAFTALVGMVSNATGLSASKHVPLWELLWFSIVANISIAAMNFSLMLNSVGFYQISKLSMIPVVCVLEWILHSKHYCKEVKASVMVVVIGVGICTVTDVKVNAKGFICACTAVFSTSLQQISIGSLQKKYSVGSFELLSKTAPIQAISLLICGPFVDYLLSGKFISTYQMTYGAIFCILLSCALAVFCNISQYLCIGRFSATSFQVLGHMKTVCVLTLGWLLFDSEMTFKNIAGMAIAIVGMVIYSWAVDIEKQRNAKSTPHGKHSMTEDEIKLLKEGVEHIDLKDVELGDTKP

SEQ ID NO: 42698 - protein, 318 aa, Arabidopsis thaliana
  peptide (1)..(318): Ceres Seq. ID no. 12330840
MANKQLMSSSGFGFGFATTLTGFHFAFTALVGMVSNATGLSASKHVPLWELLWFSIVANISIAAMNFSLMLNSVGFYQISKLSMIPVVCVLEWILHSKHYCKEVKASVMVVVIGVGICTVTDVKVNAKGFICACTAVFSTSLQQISIGSLQKKYSVGSFELLSKTAPIQAISLLICGPFVDYLLSGKFISTYQMTYGAIFCILLSCALAVFCNISQYLCIGRFSATSFQVLGHMKTVCVLTLGWLLFDSEMTFKNIAGMAIAIVGMVIYSWAVDIEKQRNAKSTPHGKHSMTEDEIKLLKEGVEHIDLKDVELGDTKP

SEQ ID NO: 42699 - DNA, 1680 bp, Arabidopsis thaliana
  misc_feature (1)..(1680): Ceres Seq. ID no. 12421772
  misc_feature (1)..(1680): Ortholog of  Ceres SEQ ID NO 13600310 as cited in SEQ ID NO 5086
agatttcgagtttcttctttcccgcccgtaagagaaaccctactctgactctccactccatttgagagactgagctcgttccgataaggagaggagatgtctaacgtaaccgtctgtgcgcgattcaggccgcgaagctctaaagagatgcgcgatcccagcagagatggtgtctgtgctcgacccatcgacgctgaaaccttcgttttccaagatgacaaggaagatgaatttacatttagcctcgatagagttttttatgaggactctacccaagctgcggtttatgagtttctggctctccccatcatgagagacgctgtaaatggtataaacggaacaatcatcacttatggacagacaggggctgggaagacttattccatggagggaccaggcatccaggactgtgatgagcacaataaaggacttcttccaagagtggtccatgggatgtttgagcaaatcagctcttccaatgatattgcaagatacactgttaaattgtctatggttgagatctacatggagaaagtcagggacctgttggacttatcaaaagcaaacatacagatcaaggagaacaaaacacaaggaatactcttgtcaggcgttacagaggctagcttcattgtgcctgtatcagattcggtggaggcattacaacatctatgcaccggtttagctaaccgcgcagttggggaaacccaaatgaatatgtccagcagtagaagccactgcgcctacttgttcacagtccaggaggattcagttaaagataaaagggtaaaaacaggaaaactgattcttgtcgacctggctggctcagagaaagcagacaaaactggagcagaaggtagggttcttgaagaagcgaagacgatcaataaatcgctctcagccttggggaacgtgataaacgctctcacaagtgggccatctagcaaagggaatcacataccatatcgtgactccaagcttactcgcatcttacaggatgccctgggtggaaattctcgaatggcgctgctttgctgttgctcaccaagcactttaaatgcatctgagacgctctcaactctcaggtttggcatgagggcaaaacacataaaagcatcaccacgtgctagtgaagtgaaatctgcgaaggcacaggaggaaccctcctcggttaccaaagatgaaaaatgtgggaggatcctagaaaagatgaaagagaggatgagcaacgaagacatcaaaatgctagaagatgtgtttatacaggaagggatcattttcagcctagattcgatggctgaagtggaaaccgtatacgaagatattgtatcaaaaactatacaatccttacagcaggctgttgatgaactccaacagaaagtcaaaaagttagaagcagaaaacataggtattcaggaacaagcattgcgcaatcacgaacctggttcggtcggaaagatgtcaaggttcatcagttcttggtatgcaccgttctttacgtcctaaagatgataaaatgaatatactatcttggtaatttagaagatgtggacaagtagatggtaaagagataagtttctctttttaggtcgtgagagcaaaacagatattaacattcaaaggtatgtaatgaaatagtagataaaaaatggatgggaggaggaataaaagctaattaag

SEQ ID NO: 42700 - protein, 469 aa, Arabidopsis thaliana
  peptide (1)..(469): Ceres Seq. ID no. 12421773
MSNVTVCARFRPRSSKEMRDPSRDGVCARPIDAETFVFQDDKEDEFTFSLDRVFYEDSTQAAVYEFLALPIMRDAVNGINGTIITYGQTGAGKTYSMEGPGIQDCDEHNKGLLPRVVHGMFEQISSSNDIARYTVKLSMVEIYMEKVRDLLDLSKANIQIKENKTQGILLSGVTEASFIVPVSDSVEALQHLCTGLANRAVGETQMNMSSSRSHCAYLFTVQEDSVKDKRVKTGKLILVDLAGSEKADKTGAEGRVLEEAKTINKSLSALGNVINALTSGPSSKGNHIPYRDSKLTRILQDALGGNSRMALLCCCSPSTLNASETLSTLRFGMRAKHIKASPRASEVKSAKAQEEPSSVTKDEKCGRILEKMKERMSNEDIKMLEDVFIQEGIIFSLDSMAEVETVYEDIVSKTIQSLQQAVDELQQKVKKLEAENIGIQEQALRNHEPGSVGKMSRFISSWYAPFFTS

SEQ ID NO: 42701 - protein, 452 aa, Arabidopsis thaliana
  peptide (1)..(452): Ceres Seq. ID no. 12421774
MRDPSRDGVCARPIDAETFVFQDDKEDEFTFSLDRVFYEDSTQAAVYEFLALPIMRDAVNGINGTIITYGQTGAGKTYSMEGPGIQDCDEHNKGLLPRVVHGMFEQISSSNDIARYTVKLSMVEIYMEKVRDLLDLSKANIQIKENKTQGILLSGVTEASFIVPVSDSVEALQHLCTGLANRAVGETQMNMSSSRSHCAYLFTVQEDSVKDKRVKTGKLILVDLAGSEKADKTGAEGRVLEEAKTINKSLSALGNVINALTSGPSSKGNHIPYRDSKLTRILQDALGGNSRMALLCCCSPSTLNASETLSTLRFGMRAKHIKASPRASEVKSAKAQEEPSSVTKDEKCGRILEKMKERMSNEDIKMLEDVFIQEGIIFSLDSMAEVETVYEDIVSKTIQSLQQAVDELQQKVKKLEAENIGIQEQALRNHEPGSVGKMSRFISSWYAPFFTS

SEQ ID NO: 42702 - protein, 398 aa, Arabidopsis thaliana
  peptide (1)..(398): Ceres Seq. ID no. 12421775
MRDAVNGINGTIITYGQTGAGKTYSMEGPGIQDCDEHNKGLLPRVVHGMFEQISSSNDIARYTVKLSMVEIYMEKVRDLLDLSKANIQIKENKTQGILLSGVTEASFIVPVSDSVEALQHLCTGLANRAVGETQMNMSSSRSHCAYLFTVQEDSVKDKRVKTGKLILVDLAGSEKADKTGAEGRVLEEAKTINKSLSALGNVINALTSGPSSKGNHIPYRDSKLTRILQDALGGNSRMALLCCCSPSTLNASETLSTLRFGMRAKHIKASPRASEVKSAKAQEEPSSVTKDEKCGRILEKMKERMSNEDIKMLEDVFIQEGIIFSLDSMAEVETVYEDIVSKTIQSLQQAVDELQQKVKKLEAENIGIQEQALRNHEPGSVGKMSRFISSWYAPFFTS

SEQ ID NO: 42703 - DNA, 1804 bp, Arabidopsis thaliana
  misc_feature (1)..(1804): Ceres Seq. ID no. 12562762
  misc_feature (1)..(1804): Ortholog of  Ceres SEQ ID NO 14309715 as cited in SEQ ID NO 55353
  misc_feature (1)..(1804): Ortholog of  Ceres SEQ ID NO 13595521 as cited in SEQ ID NO 59840
aaaaacccatttctaaaatcatctcctcttccttcaaaaactctatctctcactcccacttcttggttctaagaagaatagttaaatttcttttgcgaagaatagttcaggatgcagctgcgactttcgaaaagcttgaagcatatataatggtgtaaagactaaagagtaaagataattaagcatgaagacgatgtggtggagagatatgagaagtctacttatagttccaatgttcaagtgtttggtggctatatgtttggtcatctcactattagttttcgtagaaagtttatatatgaacattgtagtaatctacgtcaagttgtgtaaacgcaaacccgagaagatttacaaatgggaggcaatgcaagaggacttggagctcggaaatcaaaactttcccatggttcttgtccaaatcccaatgtacaacgaacgaggaggtgtttagttatccattggtgctgcttgcagactcatatggccattggatcgactcatcgttcaagttttagatgattccactgatcccaccatcatggaaatggtgagcatagagtgtggaaaatgggcaaccaaaggtattaacataaaatgtgagaggagagacaatagaaatggctataaggctggagctcttaaacaaggtatgaggcatagttacgtcaaaacatgcacctacattgcaatcttcgatgctgatttccagccagagcccgactacctcgaacgcactgtcccatttcttatccacaatcccgaactcgctcttgttcaagctcgatggaaatttgtgaacgcaaagaagtgcttgatgactaggatgcaggagatgtccctcaattaccatttcacggcagagcaagaatctggatccactagacatgccttctttggctttaatgggactgcgggtgtatggagactggcggcgatggaagaagctggtggttggaaagaccggaccaccgtagaggacatggacttggccgttcgtgtaggtctacacggctggaaatttgtctttgtcaacgatgtttcggtgaaaagtgagctaccaagccaatttaaggcattcagattccagcaacatcgatggtcatgcggtccagctaatctcttcagaaaaatgactatggaaattattcgcaataagagagtgacgatttggaagaaattgtatgtgatctatagtttctttttcgtaaggaagatcatagtccatttcttcactttnntcttctattgttgtcattctccctacgagcgtattctttcccgaagtcaacattcccacttggtcaactgtttactttccttttatgatcactctattcaatgccattgccacaccaagatctttctacctcgtgattttttgggtcttgttcgagaatgtaatggctatgcatcggaccaaaggcactttcatcggtttacttgaaggagggagagttaacgaatgggtcgtcaccgagaaattaggtgatgctcttgagactaagttacttccccaagtaagaaaacctcgcaacggggttctcgagaggataaactcaaaagagatgatggtggggatatacatattgtgctgtgcatcatataaccttgtctttgggaagacagtgttatatatctatctttacatgcaggctcttgcttttattattgccggaattggttttataggaacttgataagtgtaattagtaatttatatatccgttagtattctcgttcttttctttttcagatttcagaataagtaggtgaattattttatttaatacaattcttattc

SEQ ID NO: 42704 - protein, 301 aa, Arabidopsis thaliana
  peptide (1)..(301): Ceres Seq. ID no. 12562763
  misc_feature (233)..(233): Xaa is any aa, unknown or other
  misc_feature (234)..(234): Xaa is any aa, unknown or other
MEMVSIECGKWATKGINIKCERRDNRNGYKAGALKQGMRHSYVKTCTYIAIFDADFQPEPDYLERTVPFLIHNPELALVQARWKFVNAKKCLMTRMQEMSLNYHFTAEQESGSTRHAFFGFNGTAGVWRLAAMEEAGGWKDRTTVEDMDLAVRVGLHGWKFVFVNDVSVKSELPSQFKAFRFQQHRWSCGPANLFRKMTMEIIRNKRVTIWKKLYVIYSFFFVRKIIVHFFTXXFYCCHSPYERILSRSQHSHLVNCLLSFYDHSIQCHCHTKIFLPRDFLGLVRECNGYASDQRHFHRFT

SEQ ID NO: 42705 - protein, 299 aa, Arabidopsis thaliana
  peptide (1)..(299): Ceres Seq. ID no. 12562764
  misc_feature (231)..(231): Xaa is any aa, unknown or other
  misc_feature (232)..(232): Xaa is any aa, unknown or other
MVSIECGKWATKGINIKCERRDNRNGYKAGALKQGMRHSYVKTCTYIAIFDADFQPEPDYLERTVPFLIHNPELALVQARWKFVNAKKCLMTRMQEMSLNYHFTAEQESGSTRHAFFGFNGTAGVWRLAAMEEAGGWKDRTTVEDMDLAVRVGLHGWKFVFVNDVSVKSELPSQFKAFRFQQHRWSCGPANLFRKMTMEIIRNKRVTIWKKLYVIYSFFFVRKIIVHFFTXXFYCCHSPYERILSRSQHSHLVNCLLSFYDHSIQCHCHTKIFLPRDFLGLVRECNGYASDQRHFHRFT

SEQ ID NO: 42706 - protein, 264 aa, Arabidopsis thaliana
  peptide (1)..(264): Ceres Seq. ID no. 12562765
  misc_feature (196)..(196): Xaa is any aa, unknown or other
  misc_feature (197)..(197): Xaa is any aa, unknown or other
MRHSYVKTCTYIAIFDADFQPEPDYLERTVPFLIHNPELALVQARWKFVNAKKCLMTRMQEMSLNYHFTAEQESGSTRHAFFGFNGTAGVWRLAAMEEAGGWKDRTTVEDMDLAVRVGLHGWKFVFVNDVSVKSELPSQFKAFRFQQHRWSCGPANLFRKMTMEIIRNKRVTIWKKLYVIYSFFFVRKIIVHFFTXXFYCCHSPYERILSRSQHSHLVNCLLSFYDHSIQCHCHTKIFLPRDFLGLVRECNGYASDQRHFHRFT

SEQ ID NO: 42707 - DNA, 1186 bp, Arabidopsis thaliana
  misc_feature (1)..(1186): Ceres Seq. ID no. 12370296
  misc_feature (1)..(1186): Ortholog of  Ceres SEQ ID NO 12612333 as cited in SEQ ID NO 56421
accatccactctactcaacatggactcctccaaactctcatctctctctctttgcctcttcctcatttgcattatctatctcccccaacattctctcgcatgcggctcttgcaacccacggaagggcggaaagcactcccctaagctaccagttcctccggtgaccgtccctaagctaccagttcctccggtgaccgtccctaagctaccagtccctccggtgaccgtccctaagctacccgttcctcctgtgaccatccctaagctacccgttccaccagtgactgtacctaagctacccgttcctcctgtgaccgtccccaagctacccgttcctccagtgaccgtccccaagctacccgttcctccagtgacagtccctaagctacccgttcccccggtaactgtacctaagctacccgttcctccagtgaccgtccctaagctaccccttcctccgatttcagggctacccatacctccagtggtaggtcccaatctgccattgccacctttgccaattgtaggtcctattcttccaccgggaacaaccccaccagccacaggagggaaggactgtcctccaccgccagggagcgtaaagccaccatcagggggcgggaaggcgacatgtccaatagacacgctgaagttaggtgcttgcgtcgacttgttgggaggtttagtaaagatagggcttggggatccagcagttaacaaatgttgtccgttacttaaaggcctcgttgaaatcgaagccgcggcttgtctctgcactaccctcaagctcaaagctcttgacctcaatctttatgtccctgatgctcttcagcttctccttacctgtggcaaaaatccacctccgggctacacttgttccatatgataaactcactccacttataaaggatgctttggagaaaaaagtgagaagagaatggcagagctccaatctttcctgtcttggtttaccaaatacatcatatcaaatcctatccctttgattctttcctctatcgttcccttatgcttgtatcattaattaatgtgtgctttttagattaatgattcttctcttgtattaaagtatgatttgaaatcctttttttttctctatctctttttattgaattgattgaactgcgttcatgatactgtcaaaaagagagaaaaagagtacaatttt

SEQ ID NO: 42708 - protein, 294 aa, Arabidopsis thaliana
  peptide (1)..(294): Ceres Seq. ID no. 12370297
PSTLLNMDSSKLSSLSLCLFLICIIYLPQHSLACGSCNPRKGGKHSPKLPVPPVTVPKLPVPPVTVPKLPVPPVTVPKLPVPPVTIPKLPVPPVTVPKLPVPPVTVPKLPVPPVTVPKLPVPPVTVPKLPVPPVTVPKLPVPPVTVPKLPLPPISGLPIPPVVGPNLPLPPLPIVGPILPPGTTPPATGGKDCPPPPGSVKPPSGGGKATCPIDTLKLGACVDLLGGLVKIGLGDPAVNKCCPLLKGLVEIEAAACLCTTLKLKALDLNLYVPDALQLLLTCGKNPPPGYTCSI

SEQ ID NO: 42709 - protein, 288 aa, Arabidopsis thaliana
  peptide (1)..(288): Ceres Seq. ID no. 12370298
MDSSKLSSLSLCLFLICIIYLPQHSLACGSCNPRKGGKHSPKLPVPPVTVPKLPVPPVTVPKLPVPPVTVPKLPVPPVTIPKLPVPPVTVPKLPVPPVTVPKLPVPPVTVPKLPVPPVTVPKLPVPPVTVPKLPVPPVTVPKLPLPPISGLPIPPVVGPNLPLPPLPIVGPILPPGTTPPATGGKDCPPPPGSVKPPSGGGKATCPIDTLKLGACVDLLGGLVKIGLGDPAVNKCCPLLKGLVEIEAAACLCTTLKLKALDLNLYVPDALQLLLTCGKNPPPGYTCSI

SEQ ID NO: 42710 - DNA, 1911 bp, Arabidopsis thaliana
  misc_feature (1)..(1911): Ceres Seq. ID no. 12421765
  misc_feature (1)..(1911): Ortholog of  Ceres SEQ ID NO 15171476 as cited in SEQ ID NO 55569
  misc_feature (1)..(1911): Ortholog of  Ceres SEQ ID NO 14312069 as cited in SEQ ID NO 59191
cacaaagcagcttctgcaacctattcgttggttggttaatagaagctctctttctctgtctgtctttctctctcagagaaatggctcttcttctagtttcttcttcctcctcctatgccctcagagtcaccattttcttgtctttcttcttctttctctgcaatggcttctcttaccctactacttcttctcttttcaacacccatcaccatcgtcaccacttggccaagcacaactacaaagatgctctcactaaatcaatcctcttctttgaaggccaaaggtcagggaaacttccttctaaccagagaatgagttggagaagagactctggtctctctgatggctctgctcttcatgtggatttggttggagggtactatgatgcaggagacaatatcaaatttggtttcccaatggcattcacaaccacaatgctttcatggagtgtaattgaattcggtggactcatgaaatctgaattacaaaacgctaaaatagcgattcgttgggctactgattatctcctcaaagccacttcacaacctgacacaatctatgttcaagttggtgatgctaataaagaccattcttgttgggaaagacctgaagacatggatactgtaagaagtgtgtttaaagttgacaagaacattcctggttctgatgtcgccgctgaaaccgccgctgctctagccgccgccgccattgtattcagaaaatctgatccttcttactccaaagtcctcctcaaacgagccatcagtgtttttgcatttgcggacaaatacagaggaacttatagtgcaggattaaaacctgatgtttgtccattttattgctcttactctggttatcaggatgaattgttgtggggagctgcttggttacaaaaagcgacaaagaatataaaatatttgaattacataaaaatcaatggacaaatccttggagctgctgaatatgataacacttttggttgggataacaagcacgctggtgccagaatccttcttactaaggcatttttggttcagaatgtgaagacacttcatgaatacaaaggtcatgctgataatttcatctgctctgttattcctggagctcctttctcttctactcagtatacaccaggtggattattgtttaaaatggcagacgccaacatgcaatacgtgacgtcaacatcgttcttgctcttaacctatgccaaatacttaacctccgccaaaaccgtcgtccattgcggtggctccgtctacactcccggtcgtcttcgctccatcgccaaaagacaggtggattatcttcttggagacaacccattaagaatgtcttacatggttggttacggtccaaaattcccacggagaatccaccaccgtggctcctcattaccttgtgttgcaagccacccggccaagatccaatgccaccaaggatttgcaatcatgaactctcaatctccaaaccctaacttccttgttggtgcagtcgttggtggtccggaccagcatgatcgcttcccagacgaacggtctgattacgagcagtccgagccggctacttacatcaattcaccactcgttggagctcttgcctacttcgcccacgcctatggtcaactctagtttagtaacgagtgtgttagtttaagtaaaaataaaaatgaaggaagttttatctttgtttttacttttatttgttagtaatgtagtggaccgaaaatcggatcacaagtggacattggtccgagggatggtttatttggttcgttataatataacgtcaagtgtaatcttattgtggttattaatgttatcatcctattaattactatatccatgtcgttaatttttgatatgtttatatgatttttcatatttttgtgaaaaaaaaaaaaaacaaaaa

SEQ ID NO: 42711 - protein, 542 aa, Arabidopsis thaliana
  peptide (1)..(542): Ceres Seq. ID no. 12421766
QSSFCNLFVGWLIEALFLCLSFSLREMALLLVSSSSSYALRVTIFLSFFFFLCNGFSYPTTSSLFNTHHHRHHLAKHNYKDALTKSILFFEGQRSGKLPSNQRMSWRRDSGLSDGSALHVDLVGGYYDAGDNIKFGFPMAFTTTMLSWSVIEFGGLMKSELQNAKIAIRWATDYLLKATSQPDTIYVQVGDANKDHSCWERPEDMDTVRSVFKVDKNIPGSDVAAETAAALAAAAIVFRKSDPSYSKVLLKRAISVFAFADKYRGTYSAGLKPDVCPFYCSYSGYQDELLWGAAWLQKATKNIKYLNYIKINGQILGAAEYDNTFGWDNKHAGARILLTKAFLVQNVKTLHEYKGHADNFICSVIPGAPFSSTQYTPGGLLFKMADANMQYVTSTSFLLLTYAKYLTSAKTVVHCGGSVYTPGRLRSIAKRQVDYLLGDNPLRMSYMVGYGPKFPRRIHHRGSSLPCVASHPAKIQCHQGFAIMNSQSPNPNFLVGAVVGGPDQHDRFPDERSDYEQSEPATYINSPLVGALAYFAHAYGQL

SEQ ID NO: 42712 - protein, 516 aa, Arabidopsis thaliana
  peptide (1)..(516): Ceres Seq. ID no. 12421767
MALLLVSSSSSYALRVTIFLSFFFFLCNGFSYPTTSSLFNTHHHRHHLAKHNYKDALTKSILFFEGQRSGKLPSNQRMSWRRDSGLSDGSALHVDLVGGYYDAGDNIKFGFPMAFTTTMLSWSVIEFGGLMKSELQNAKIAIRWATDYLLKATSQPDTIYVQVGDANKDHSCWERPEDMDTVRSVFKVDKNIPGSDVAAETAAALAAAAIVFRKSDPSYSKVLLKRAISVFAFADKYRGTYSAGLKPDVCPFYCSYSGYQDELLWGAAWLQKATKNIKYLNYIKINGQILGAAEYDNTFGWDNKHAGARILLTKAFLVQNVKTLHEYKGHADNFICSVIPGAPFSSTQYTPGGLLFKMADANMQYVTSTSFLLLTYAKYLTSAKTVVHCGGSVYTPGRLRSIAKRQVDYLLGDNPLRMSYMVGYGPKFPRRIHHRGSSLPCVASHPAKIQCHQGFAIMNSQSPNPNFLVGAVVGGPDQHDRFPDERSDYEQSEPATYINSPLVGALAYFAHAYGQL

SEQ ID NO: 42713 - protein, 439 aa, Arabidopsis thaliana
  peptide (1)..(439): Ceres Seq. ID no. 12421768
MSWRRDSGLSDGSALHVDLVGGYYDAGDNIKFGFPMAFTTTMLSWSVIEFGGLMKSELQNAKIAIRWATDYLLKATSQPDTIYVQVGDANKDHSCWERPEDMDTVRSVFKVDKNIPGSDVAAETAAALAAAAIVFRKSDPSYSKVLLKRAISVFAFADKYRGTYSAGLKPDVCPFYCSYSGYQDELLWGAAWLQKATKNIKYLNYIKINGQILGAAEYDNTFGWDNKHAGARILLTKAFLVQNVKTLHEYKGHADNFICSVIPGAPFSSTQYTPGGLLFKMADANMQYVTSTSFLLLTYAKYLTSAKTVVHCGGSVYTPGRLRSIAKRQVDYLLGDNPLRMSYMVGYGPKFPRRIHHRGSSLPCVASHPAKIQCHQGFAIMNSQSPNPNFLVGAVVGGPDQHDRFPDERSDYEQSEPATYINSPLVGALAYFAHAYGQL

SEQ ID NO: 42714 - DNA, 640 bp, Arabidopsis thaliana; identical to SEQ ID NO: 38920
  misc_feature (1)..(640): Ceres Seq. ID no. 12652846
  misc_feature (1)..(640): Ortholog of  Ceres SEQ ID NO 15174406 as cited in SEQ ID NO 0

SEQ ID NO: 42715 - protein, 118 aa, Arabidopsis thaliana; identical to SEQ ID NO: 38921
  peptide (1)..(118): Ceres Seq. ID no. 12652847

SEQ ID NO: 42716 - protein, 114 aa, Arabidopsis thaliana; identical to SEQ ID NO: 38922
  peptide (1)..(114): Ceres Seq. ID no. 12652848

SEQ ID NO: 42717 - protein, 104 aa, Arabidopsis thaliana; identical to SEQ ID NO: 38923
  peptide (1)..(104): Ceres Seq. ID no. 12652849

SEQ ID NO: 42718 - DNA, 1981 bp, Arabidopsis thaliana
  misc_feature (1)..(1981): Ceres Seq. ID no. 12326771
  misc_feature (1)..(1981): Ortholog of  Ceres SEQ ID NO 14314536 as cited in SEQ ID NO 52436
aatgatcgatcagatatctcaatttcaggaacccagaaagagggacttgtcttttacctccaaagggttcctgccgtttcttttctacaatttttctcctgctaattatcaaatttttcttctgattttcattgtttgttagagattcttcttctcctctgcttttctattctctgggagctcgatgatggatgataaagctcgcaaagaagaagaacatcatgtgtctcaccaacataatcattctcctctgcaaagggatggaaattctgctgagattgcacaaggacaagagctatcatcaccgggccgagacctatggaggcgaggtcttgtgttagatttaccatcaacaacacctgaagatactacaagagatgatctttttagacgaaatgcatctttaacttcaagtcctgttgccaaaagagtcaacttttctccaatgtccagccctagagtcggacaacgtggtgcatccttgagtccttcttcttctacttcttcttcttcaagaaacaaacctaatagcctgaagaatctaatccccaagttaagctttaagaaccggaacagcaataacgataatgtggatatcgagaaagccgcggatttgggctttgtgtcctccccttcttcaggaaatggcagggacaggtctacatggactctcactaatattttaactccaagattgaagaaaactgagtctcttcctgtaacccctatagctcactcaaatcctgagtccactcacgggagatttgccgttgatctagttacttccacgaaaaaagggcctccactgcctatccaccgttcacgctctgtcccagcattcaacaaagatggaagtcaaaggcaattaggtgttttccgggtgattccaactccaaacatgtctccaaccagaaatactattaaacttaacgacgcgaatgttgatggagctgaagatgttcctgaagaagaagctgtgtgtagaatctgccttgtagaattgggagaagattcagaagccttcaagatggaatgtttgtgtagaggggaactagctcttgcccacaaagaatgtacaatcaaatggttcaccattaaaggaaacagaacatgtgatgtgtgcaagcaagaggttcagaatctccctgtgacccttcttcgcatgcagaattctcggggtagtattggagctccagacgccgaggctgcacactacagtttatggcaggatgttccaattcttgtgattgtaagcatgcttgcatacttctgttttctcgagcagcttctgcttacaaaaatgcaatctggcgccattgcagtttctttaccattctcgtgcgttcttggtctttttgcttcgatgacggcaacaacaatggtgccgaagagatatgtctggatttacgctacaactcagttcggtcttgttgtttttttctctcacattttcttcacattggttcgcatgcagccggttgtggccattctcttagccactatcgttgggtttggactcaccatgagcggtacaacaggtatagtcgagttttcgaaatggaggagaagcaataggacagctgaacttccaagcagtagtcaagtggatcaaccactggttgagacaacagatcagaacatttctggatcaagaaactgaaagccagaggtccgtcaatactaatcatatgttccagtagtggtctatgatctcgatggagatccatctatttagagatgtgagaacagattggtcatgtgagttaagtagtggtagttgacgagattaaggctcgatttttgggggtctcttttgtgtgtgaatgtgagtgtgagtgtgagtgtatgtatatcatctgttgttttcttaaagaaaaacaaaaagaagaagttttgtatcttttagtatattaaactattgggcttttataaagtcttgcaaattcgctacggcccataaagcccaacaagttttaaaatt

SEQ ID NO: 42719 - protein, 491 aa, Arabidopsis thaliana
  peptide (1)..(491): Ceres Seq. ID no. 12326772
MMDDKARKEEEHHVSHQHNHSPLQRDGNSAEIAQGQELSSPGRDLWRRGLVLDLPSTTPEDTTRDDLFRRNASLTSSPVAKRVNFSPMSSPRVGQRGASLSPSSSTSSSSRNKPNSLKNLIPKLSFKNRNSNNDNVDIEKAADLGFVSSPSSGNGRDRSTWTLTNILTPRLKKTESLPVTPIAHSNPESTHGRFAVDLVTSTKKGPPLPIHRSRSVPAFNKDGSQRQLGVFRVIPTPNMSPTRNTIKLNDANVDGAEDVPEEEAVCRICLVELGEDSEAFKMECLCRGELALAHKECTIKWFTIKGNRTCDVCKQEVQNLPVTLLRMQNSRGSIGAPDAEAAHYSLWQDVPILVIVSMLAYFCFLEQLLLTKMQSGAIAVSLPFSCVLGLFASMTATTMVPKRYVWIYATTQFGLVVFFSHIFFTLVRMQPVVAILLATIVGFGLTMSGTTGIVEFSKWRRSNRTAELPSSSQVDQPLVETTDQNISGSRN

SEQ ID NO: 42720 - protein, 490 aa, Arabidopsis thaliana
  peptide (1)..(490): Ceres Seq. ID no. 12326773
MDDKARKEEEHHVSHQHNHSPLQRDGNSAEIAQGQELSSPGRDLWRRGLVLDLPSTTPEDTTRDDLFRRNASLTSSPVAKRVNFSPMSSPRVGQRGASLSPSSSTSSSSRNKPNSLKNLIPKLSFKNRNSNNDNVDIEKAADLGFVSSPSSGNGRDRSTWTLTNILTPRLKKTESLPVTPIAHSNPESTHGRFAVDLVTSTKKGPPLPIHRSRSVPAFNKDGSQRQLGVFRVIPTPNMSPTRNTIKLNDANVDGAEDVPEEEAVCRICLVELGEDSEAFKMECLCRGELALAHKECTIKWFTIKGNRTCDVCKQEVQNLPVTLLRMQNSRGSIGAPDAEAAHYSLWQDVPILVIVSMLAYFCFLEQLLLTKMQSGAIAVSLPFSCVLGLFASMTATTMVPKRYVWIYATTQFGLVVFFSHIFFTLVRMQPVVAILLATIVGFGLTMSGTTGIVEFSKWRRSNRTAELPSSSQVDQPLVETTDQNISGSRN

SEQ ID NO: 42721 - protein, 404 aa, Arabidopsis thaliana
  peptide (1)..(404): Ceres Seq. ID no. 12326774
MSSPRVGQRGASLSPSSSTSSSSRNKPNSLKNLIPKLSFKNRNSNNDNVDIEKAADLGFVSSPSSGNGRDRSTWTLTNILTPRLKKTESLPVTPIAHSNPESTHGRFAVDLVTSTKKGPPLPIHRSRSVPAFNKDGSQRQLGVFRVIPTPNMSPTRNTIKLNDANVDGAEDVPEEEAVCRICLVELGEDSEAFKMECLCRGELALAHKECTIKWFTIKGNRTCDVCKQEVQNLPVTLLRMQNSRGSIGAPDAEAAHYSLWQDVPILVIVSMLAYFCFLEQLLLTKMQSGAIAVSLPFSCVLGLFASMTATTMVPKRYVWIYATTQFGLVVFFSHIFFTLVRMQPVVAILLATIVGFGLTMSGTTGIVEFSKWRRSNRTAELPSSSQVDQPLVETTDQNISGSRN

SEQ ID NO: 42722 - DNA, 1165 bp, Arabidopsis thaliana
  misc_feature (1)..(1165): Ceres Seq. ID no. 12385032
  misc_feature (1)..(1165): Ortholog of  Ceres SEQ ID NO 13599328 as cited in SEQ ID NO 1002
  misc_feature (1)..(1165): Ortholog of  Ceres SEQ ID NO 14302544 as cited in SEQ ID NO 56628
  misc_feature (1)..(1165): Ortholog of  Ceres SEQ ID NO 14302529 as cited in SEQ ID NO 59789
  misc_feature (1)..(1165): Ortholog of  Ceres SEQ ID NO 13584819 as cited in SEQ ID NO 64536
  misc_feature (1)..(1165): Ortholog of  Ceres SEQ ID NO 13663748 as cited in SEQ ID NO 67516
  misc_feature (1)..(1165): Ortholog of  Ceres SEQ ID NO 12635897 as cited in SEQ ID NO 0
acagctcaggatatactcttttaggtttcaacagcagcttagtctctctgatctctctacctccctcacaccctaaaactcagcaacaatggccgttaccttttcagatctacacacagaggagggtgtcaaatccgtggaggagcacctcgccggaaaaacctacatctccggagatcaattgtctgtggatgatgtcaaggtttacgctgccgctccagtgaaacccagcgatgccttccccaatgctagcaagtggtacgagtccgtggcttcccaacttgctaaaagtttccctggaaaggccgttggagtacaattcggtggctctgctgctgctgctccagctgttgaagctgaggtatctttacttgaatgctttattctttattaccatagtcgtagaccttagaaaaagggtaatgaatgtagtttggaactatgatttgaaaggtgatatttccaatcttgtattagggatcacgagctatgtttggtaggggaattgattggagtttggtttggatgttgtgtgtgtgtgtgtgtgtgtttacgctatcttgcataattgtcaacaggcacctgctgcagctgatgatgatgatgacatggatctctttggtgacgagaccgaagaagaaaagaaagctgcagaggagagggaggctgctaagaaggacaccaagaagcctaatgagagtggaaagtcttctgtgctcatggatgttaagccatgggatgatgaaaccgacatgaagaaactggaagaggctgttcgtggtgttgagatgcctggtcttttctggggagcctcaaaacttgtaccagttggttatgggatcaagaaactcacaattatgttcacgattgttgatgacctcgtgtccccggacaacctcattgaagacttcctcacctcagagcctaacaacgagtacatccagagttgtgacattgtcgctttcaacaagatttagagacttcaaatttctccttaccgaaacatatcagaatttcaagttttgttttcgtttgtgttgtttaccgaaatgtttctttcctagttgcaagaccgctttcatgttacaataacactaaattttcaatggttactattccgttgcatcattgttaagaaacatttagatactttgacaaattctcc

SEQ ID NO: 42723 - protein, 122 aa, Arabidopsis thaliana
  peptide (1)..(122): Ceres Seq. ID no. 12385033
MDLFGDETEEEKKAAEEREAAKKDTKKPNESGKSSVLMDVKPWDDETDMKKLEEAVRGVEMPGLFWGASKLVPVGYGIKKLTIMFTIVDDLVSPDNLIEDFLTSEPNNEYIQSCDIVAFNKI

SEQ ID NO: 42724 - protein, 107 aa, Arabidopsis thaliana
  peptide (1)..(107): Ceres Seq. ID no. 12385034
MAVTFSDLHTEEGVKSVEEHLAGKTYISGDQLSVDDVKVYAAAPVKPSDAFPNASKWYESVASQLAKSFPGKAVGVQFGGSAAAAPAVEAEVSLLECFILYYHSRRP

SEQ ID NO: 42725 - protein, 88 aa, Arabidopsis thaliana
  peptide (1)..(88): Ceres Seq. ID no. 12385035
MPSPMLASGTSPWLPNLLKVSLERPLEYNSVALLLLLQLLKLRYLYLNALFFITIVVDLRKRVMNVVWNYDLKGDISNLVLGITSYVW

SEQ ID NO: 42726 - DNA, 1810 bp, Arabidopsis thaliana
  misc_feature (1)..(1810): Ceres Seq. ID no. 13491742
  misc_feature (1)..(1810): Ortholog of  Ceres SEQ ID NO 14313228 as cited in SEQ ID NO 67057
aattctctttgtagagggaagtctgaaaacgccgagaagaagacgaagaagaagaagaagaagaaagcttgagactttctctctgtgtgcaatttcgaaatcgataaagacttcaactttcggttctaacaatgacaatttccgtatagtttgattttgtccacctctttcaccgattacctgatttcatcgctggcgttagtcatcaaatgggagctcgttgctcaaagttctcattctgcttgttcccttctcacttcaaatccgcttcagttctcgagtctcctgatatcgagaatggaggaaaagtgtggccgacttttaaggaattcaaattggagcagctgaaatctgcgaccggaggtttctcttcagacaacattgtatcagaacacggcgagaaagctccaaacgttgtctacagaggaaggcttgatgatggtcgtttgattgctgtcaaacgattcaatcgccttgcttgggctgatcatcgacagttcctggatgaagctaaagctgttgggagcttgaggagtgatagattagcgaatctgattggatgttgctttgaaggagaagagagattactagttgctgagtttatgcctcatgaaacgcttgcaaagcatcttttccactgggagaataatccgatgaaatgggcgatgagattaagagttgcattgtgtttagcacaagcattggaatattgtagtaataaagggagagctttgtatcatgatctcaatgcttacagggttttgtttgacaaggatgggaatcccaggttgtcttgttttggactcatgaaaaatagcagagatgggaagagttatagcacaaacttggcatttactcctccagagtatttgcgaacgggtagagttacaccagagagtgttgtattcagttttggaaccgttttgctcgatctcatgagtggaaaacatattccaccgagtcatgcgcttgacctaatcagaggcaagaactgtgcaatgttaatggattctgctctcgagggtcatttctcaaacgaagacggaactgagctagtacgcttagccacacgttgtctgcagtatgaagctcgagaaagaccaaatgtgaaatctctcgtgacttcacttgtcacactccagaaggaatctgatgtagcttcctacgttcttatgggtataccccatgaaaccgaggctgaagaagagtctccgctttctttgacaccctttggtgatgcatgcttaagagtggatcttacagccatacaggaaatactcagtaagattggatacaaggatgatgaaggaattgccaatgagctctcgtttcaaatgtggaccaatcagatgcaggaatctctcaattcgaagaagcaaggcgacttagctttccgttccaaagattttacaaccgcggtcgattgctacactcagttcatagatgggggaacaatggtgtcaccaacagtacacgcacggcggtgcttgtcatatctgatgaacgacaacgcacaagaggctctgacagatgcattgcaggcacaggttgtgtctccggattggccaaccgccttgtatctgcaagcggcttgcttgttcaagctgggtatggaagccgatgctcagcaagctcttaaggatgggactacattggaagctaagaagagtaacaagcgctgataaaatagcgttttcaaaagcttttgtatatgctttattttgtttcctttctctctatttccatctatatgcgcatacatacacatatgcgggtgtatttattatatatgtgcatatacttttgatgc

SEQ ID NO: 42727 - protein, 490 aa, Arabidopsis thaliana
  peptide (1)..(490): Ceres Seq. ID no. 13491743
MGARCSKFSFCLFPSHFKSASVLESPDIENGGKVWPTFKEFKLEQLKSATGGFSSDNIVSEHGEKAPNVVYRGRLDDGRLIAVKRFNRLAWADHRQFLDEAKAVGSLRSDRLANLIGCCFEGEERLLVAEFMPHETLAKHLFHWENNPMKWAMRLRVALCLAQALEYCSNKGRALYHDLNAYRVLFDKDGNPRLSCFGLMKNSRDGKSYSTNLAFTPPEYLRTGRVTPESVVFSFGTVLLDLMSGKHIPPSHALDLIRGKNCAMLMDSALEGHFSNEDGTELVRLATRCLQYEARERPNVKSLVTSLVTLQKESDVASYVLMGIPHETEAEEESPLSLTPFGDACLRVDLTAIQEILSKIGYKDDEGIANELSFQMWTNQMQESLNSKKQGDLAFRSKDFTTAVDCYTQFIDGGTMVSPTVHARRCLSYLMNDNAQEALTDALQAQVVSPDWPTALYLQAACLFKLGMEADAQQALKDGTTLEAKKSNKR

SEQ ID NO: 42728 - protein, 359 aa, Arabidopsis thaliana
  peptide (1)..(359): Ceres Seq. ID no. 13491744
MPHETLAKHLFHWENNPMKWAMRLRVALCLAQALEYCSNKGRALYHDLNAYRVLFDKDGNPRLSCFGLMKNSRDGKSYSTNLAFTPPEYLRTGRVTPESVVFSFGTVLLDLMSGKHIPPSHALDLIRGKNCAMLMDSALEGHFSNEDGTELVRLATRCLQYEARERPNVKSLVTSLVTLQKESDVASYVLMGIPHETEAEEESPLSLTPFGDACLRVDLTAIQEILSKIGYKDDEGIANELSFQMWTNQMQESLNSKKQGDLAFRSKDFTTAVDCYTQFIDGGTMVSPTVHARRCLSYLMNDNAQEALTDALQAQVVSPDWPTALYLQAACLFKLGMEADAQQALKDGTTLEAKKSNKR

SEQ ID NO: 42729 - protein, 342 aa, Arabidopsis thaliana
  peptide (1)..(342): Ceres Seq. ID no. 13491745
MKWAMRLRVALCLAQALEYCSNKGRALYHDLNAYRVLFDKDGNPRLSCFGLMKNSRDGKSYSTNLAFTPPEYLRTGRVTPESVVFSFGTVLLDLMSGKHIPPSHALDLIRGKNCAMLMDSALEGHFSNEDGTELVRLATRCLQYEARERPNVKSLVTSLVTLQKESDVASYVLMGIPHETEAEEESPLSLTPFGDACLRVDLTAIQEILSKIGYKDDEGIANELSFQMWTNQMQESLNSKKQGDLAFRSKDFTTAVDCYTQFIDGGTMVSPTVHARRCLSYLMNDNAQEALTDALQAQVVSPDWPTALYLQAACLFKLGMEADAQQALKDGTTLEAKKSNKR

SEQ ID NO: 42730 - DNA, 1226 bp, Arabidopsis thaliana
  misc_feature (1)..(1226): Ceres Seq. ID no. 13499672
  misc_feature (1)..(1226): Ortholog of  Ceres SEQ ID NO 13598417 as cited in SEQ ID NO 62576
gacccacgcgtccgaattcatcaaaggagaagagatcgacaatggcaccttcgtcatcaagcggtttaaccttcaagctacatcctttggtaatcgtcaacatatcggatcactacactagggtcaaaactcagctcaatcctcctgcttcaatctgcgcaagcggccatggctcaaacaacggcgaagcaatgttccagcaaaaccctagggtttacggatgtgtgatcggtgtccagagaggtcgtactgttgagatattcaacagtttcgagcttttatatgatccttctactcaaacccttgatagatctttcctcgagaagaagcaagagctctataagaaggtgttccctgatttctatattctgggatggtactctacgggaagtgatgctgaggaatctgatatgcatatccataaagctttgatggatatcaatgaatctcctgtttatgtgcttttaaaccctgctatcaatcacacacagaaggatcttccagtgactatttatgaaagtgaattgcatgtcattgatggaatcccgcagctaattttcgctcatacaagctacacaatcgagacagttgaagctgaacggatatcagttgatcatgttgcacatcttaaaccatctgacggaggctcagcagcaacccagttggctgctcatcttactggtatacatagtgccatcaagatgcttaatagcagaatcagagtgctttaccaaaatcttgctgcaatgcagaaaggtgataaatcttgtgacaactcagttctgagacaagtatctagcctgctaagaagattgcctgccatggaatcagagagatttcaagataatttcttgatggagtacaacgacaaattactaataacttacctagcgatgattacaaattgttccagcaacatgaacgagatggtcgacaaattcaacaccgcatatgacagaaacactcgaagaggtggaagaactgcattcatgtaaaagatcctttccagcgattctagttctaaagatcttctcttggttcctgaaaccatttttaacattgcctctgtgagaatctataactcagacggcaagactttatcctcttcattgtttctatatctataagaacatctgcttatctatcaaagctcttgtttgatcttgaacaagtttctattgttagtaaaaagattttaaggtttgattctatcagtctctctagtt

SEQ ID NO: 42731 - protein, 330 aa, Arabidopsis thaliana
  peptide (1)..(330): Ceres Seq. ID no. 13499673
PTRPNSSKEKRSTMAPSSSSGLTFKLHPLVIVNISDHYTRVKTQLNPPASICASGHGSNNGEAMFQQNPRVYGCVIGVQRGRTVEIFNSFELLYDPSTQTLDRSFLEKKQELYKKVFPDFYILGWYSTGSDAEESDMHIHKALMDINESPVYVLLNPAINHTQKDLPVTIYESELHVIDGIPQLIFAHTSYTIETVEAERISVDHVAHLKPSDGGSAATQLAAHLTGIHSAIKMLNSRIRVLYQNLAAMQKGDKSCDNSVLRQVSSLLRRLPAMESERFQDNFLMEYNDKLLITYLAMITNCSSNMNEMVDKFNTAYDRNTRRGGRTAFM

SEQ ID NO: 42732 - protein, 317 aa, Arabidopsis thaliana
  peptide (1)..(317): Ceres Seq. ID no. 13499674
MAPSSSSGLTFKLHPLVIVNISDHYTRVKTQLNPPASICASGHGSNNGEAMFQQNPRVYGCVIGVQRGRTVEIFNSFELLYDPSTQTLDRSFLEKKQELYKKVFPDFYILGWYSTGSDAEESDMHIHKALMDINESPVYVLLNPAINHTQKDLPVTIYESELHVIDGIPQLIFAHTSYTIETVEAERISVDHVAHLKPSDGGSAATQLAAHLTGIHSAIKMLNSRIRVLYQNLAAMQKGDKSCDNSVLRQVSSLLRRLPAMESERFQDNFLMEYNDKLLITYLAMITNCSSNMNEMVDKFNTAYDRNTRRGGRTAFM

SEQ ID NO: 42733 - protein, 267 aa, Arabidopsis thaliana
  peptide (1)..(267): Ceres Seq. ID no. 13499675
MFQQNPRVYGCVIGVQRGRTVEIFNSFELLYDPSTQTLDRSFLEKKQELYKKVFPDFYILGWYSTGSDAEESDMHIHKALMDINESPVYVLLNPAINHTQKDLPVTIYESELHVIDGIPQLIFAHTSYTIETVEAERISVDHVAHLKPSDGGSAATQLAAHLTGIHSAIKMLNSRIRVLYQNLAAMQKGDKSCDNSVLRQVSSLLRRLPAMESERFQDNFLMEYNDKLLITYLAMITNCSSNMNEMVDKFNTAYDRNTRRGGRTAFM

SEQ ID NO: 42734 - DNA, 1524 bp, Arabidopsis thaliana
  misc_feature (1)..(1524): Ceres Seq. ID no. 13488327
  misc_feature (1)..(1524): Ortholog of  Ceres SEQ ID NO 13582619 as cited in SEQ ID NO 56520
  misc_feature (1)..(1524): Ortholog of  Ceres SEQ ID NO 13660872 as cited in SEQ ID NO 60830
  misc_feature (1)..(1524): Ortholog of  Ceres SEQ ID NO 12616221 as cited in SEQ ID NO 63291
acttttatttctctgctttaactgcccaaaagattctctcccagctagctttctcaattcatttttctttcttcatcttcttcttgtgtgatctctctttccaaataagcttatcattcttacaaaaatatttctgggtttctgatattgttcttgttctcttgaatctttattacttgaaaaacatataaagtgatggcggttgtggttgaagaaggtgtggtgttgaatcatggaggtgaagagcttgtggatttgccacctggtttcaggtttcatccaacagacgaagagatcataacatgttaccttaaggagaaggttttaaacagccgattcacggctgtggccatgggagaagctgatctcaacaagtgtgagccttgggatttgccaaagagggcaaagatgggggagaaagagttctacttcttctgtcaaagggacaggaagtatccgactgggatgaggacgaaccgtgcgacggagtcaggatactggaaagccaccgggaaggataaggagatcttcaaaggcaaaggttgtctcgttgggatgaagaaaacacttgtgttttatagaggaagagctccaaaaggtgaaaagactaattgggtcatgcatgaatatcgtcttgaaggcaaatattcgtattacaatctcccaaaatctgcaagggacgaatgggtcgtgtgtagggtttttcacaagaacaatccttctaccacaacccaaccaatgacgagaatacccgttgaagatttcacaaggatggattctctagagaacattgatcatctcctagacttctcatctcttcctcctctcatagacccgagtttcatgagtcaaaccgaacaaccaaacttcaaacccatcaaccctccaacttacgatatctcatcaccaatccaaccccatcatttcaattcttaccaatcaatctttaaccaccaggtttttggttctgcttcgggctctacgtacaacaacaacaacgagatgatcaagatggagcaatcacttgttagtgtatctcaagaaacatgcctaagctcagatgtgaacgcgaacatgactacaaccacggaggtatcttcgggtcctgtaatgaaacaagaaatggggatgatgggaatggtgaatggtagcaagtcgtatgaagatctatgtgacttgaggggggacttgtgggacttctaattaatcatttgacttggtgaaagagtatatttgttgggatttaaatcatgttagttaatacatatacatataggatttactagaggcttaatcctagttaactattttcacttcattgatattatttaattagttgattgtttaattagtttatactttatagtgtggttaaaaaagaaaagaaaggattgtgataatttgggattttagtgcataagttatatctcaatgtaaactgtatttgtatacatataattagtcttctcatagagttttaattattaagatttacgatatatatatatatattctaacgttgtt

SEQ ID NO: 42735 - protein, 335 aa, Arabidopsis thaliana
  peptide (1)..(335): Ceres Seq. ID no. 13488328
MAVVVEEGVVLNHGGEELVDLPPGFRFHPTDEEIITCYLKEKVLNSRFTAVAMGEADLNKCEPWDLPKRAKMGEKEFYFFCQRDRKYPTGMRTNRATESGYWKATGKDKEIFKGKGCLVGMKKTLVFYRGRAPKGEKTNWVMHEYRLEGKYSYYNLPKSARDEWVVCRVFHKNNPSTTTQPMTRIPVEDFTRMDSLENIDHLLDFSSLPPLIDPSFMSQTEQPNFKPINPPTYDISSPIQPHHFNSYQSIFNHQVFGSASGSTYNNNNEMIKMEQSLVSVSQETCLSSDVNANMTTTTEVSSGPVMKQEMGMMGMVNGSKSYEDLCDLRGDLWDF

SEQ ID NO: 42736 - protein, 283 aa, Arabidopsis thaliana
  peptide (1)..(283): Ceres Seq. ID no. 13488329
MGEADLNKCEPWDLPKRAKMGEKEFYFFCQRDRKYPTGMRTNRATESGYWKATGKDKEIFKGKGCLVGMKKTLVFYRGRAPKGEKTNWVMHEYRLEGKYSYYNLPKSARDEWVVCRVFHKNNPSTTTQPMTRIPVEDFTRMDSLENIDHLLDFSSLPPLIDPSFMSQTEQPNFKPINPPTYDISSPIQPHHFNSYQSIFNHQVFGSASGSTYNNNNEMIKMEQSLVSVSQETCLSSDVNANMTTTTEVSSGPVMKQEMGMMGMVNGSKSYEDLCDLRGDLWDF

SEQ ID NO: 42737 - protein, 264 aa, Arabidopsis thaliana
  peptide (1)..(264): Ceres Seq. ID no. 13488330
MGEKEFYFFCQRDRKYPTGMRTNRATESGYWKATGKDKEIFKGKGCLVGMKKTLVFYRGRAPKGEKTNWVMHEYRLEGKYSYYNLPKSARDEWVVCRVFHKNNPSTTTQPMTRIPVEDFTRMDSLENIDHLLDFSSLPPLIDPSFMSQTEQPNFKPINPPTYDISSPIQPHHFNSYQSIFNHQVFGSASGSTYNNNNEMIKMEQSLVSVSQETCLSSDVNANMTTTTEVSSGPVMKQEMGMMGMVNGSKSYEDLCDLRGDLWDF

SEQ ID NO: 42738 - DNA, 1170 bp, Arabidopsis thaliana
  misc_feature (1)..(1170): Ceres Seq. ID no. 12336260
  misc_feature (1)..(1170): Ortholog of  Ceres SEQ ID NO 13582619 as cited in SEQ ID NO 56520
  misc_feature (1)..(1170): Ortholog of  Ceres SEQ ID NO 13660872 as cited in SEQ ID NO 60830
  misc_feature (1)..(1170): Ortholog of  Ceres SEQ ID NO 12616221 as cited in SEQ ID NO 63291
atcttgtttcttactcatttctctaacaattttccaaattaaatacgtttataggatcattgtggatggataatataatgcaatcgtcaatgccaccgggattccgatttcatccgacagaggaagagcttgtgggttattacctagataggaagatcaattcaatgaagagtgctttagatgtcattgtagagattgatctctacaaaatggagccatgggatatacaagcgaggtgtaaactagggtatgaagagcaaaacgagtggtacttctttagtcataaggacaggaagtaccctaccgggactaggaccaaccgagccaccgcggctgggttctggaaagccacgggtagagacaaggcggtactatcaaagaacagtgtcatcggaatgcggaagacacttgtctactacaagggtcgagctcctaatggaagaaagtccgattggatcatgcacgaataccgtctccaaaactccgagcttgccccggttcaggaggaaggctgggtggtgtgtcgagcatttaggaagccaattccaaaccagaggccattagggtacgagccatggcagaaccagctctaccacgtcgaaagtagtaacaactactcatcttcagtgacaatgaacacgagtcatcatatcggtgcatcttcatcaagtcataaccttaatcaaatgctcatgagcaataaccactacaatcctaataatacatcctcatcgatgcatcaatatggcaacattgagctcccgcagttggacagcccgagcttgtcgcctagtttagggacgaataaagatcagaacgagagtttcgagcaagaagaagagaagagctttaactgtgtggattggagaacactagataccttgcttgaaacacaagtcatacatccacataaccctaatattcttatgttcgaaacgcagtcgtataatccggcgccaagcttcccttccatgcatcaaagctataatgaggtcgaagctaatattcatcattctcttggatgcttccctgactcgtaattaaaaaaaaaacacttcatctatatattgatttgtattctatgatttaattgttccatctggaaaataacatttataactgtctatttgtaaaagaagtttgtgtttattacgtagaaatttgttgttg

SEQ ID NO: 42739 - protein, 324 aa, Arabidopsis thaliana
  peptide (1)..(324): Ceres Seq. ID no. 12336261
MDNIMQSSMPPGFRFHPTEEELVGYYLDRKINSMKSALDVIVEIDLYKMEPWDIQARCKLGYEEQNEWYFFSHKDRKYPTGTRTNRATAAGFWKATGRDKAVLSKNSVIGMRKTLVYYKGRAPNGRKSDWIMHEYRLQNSELAPVQEEGWVVCRAFRKPIPNQRPLGYEPWQNQLYHVESSNNYSSSVTMNTSHHIGASSSSHNLNQMLMSNNHYNPNNTSSSMHQYGNIELPQLDSPSLSPSLGTNKDQNESFEQEEEKSFNCVDWRTLDTLLETQVIHPHNPNILMFETQSYNPAPSFPSMHQSYNEVEANIHHSLGCFPDS

SEQ ID NO: 42740 - protein, 320 aa, Arabidopsis thaliana
  peptide (1)..(320): Ceres Seq. ID no. 12336262
MQSSMPPGFRFHPTEEELVGYYLDRKINSMKSALDVIVEIDLYKMEPWDIQARCKLGYEEQNEWYFFSHKDRKYPTGTRTNRATAAGFWKATGRDKAVLSKNSVIGMRKTLVYYKGRAPNGRKSDWIMHEYRLQNSELAPVQEEGWVVCRAFRKPIPNQRPLGYEPWQNQLYHVESSNNYSSSVTMNTSHHIGASSSSHNLNQMLMSNNHYNPNNTSSSMHQYGNIELPQLDSPSLSPSLGTNKDQNESFEQEEEKSFNCVDWRTLDTLLETQVIHPHNPNILMFETQSYNPAPSFPSMHQSYNEVEANIHHSLGCFPDS

SEQ ID NO: 42741 - protein, 316 aa, Arabidopsis thaliana
  peptide (1)..(316): Ceres Seq. ID no. 12336263
MPPGFRFHPTEEELVGYYLDRKINSMKSALDVIVEIDLYKMEPWDIQARCKLGYEEQNEWYFFSHKDRKYPTGTRTNRATAAGFWKATGRDKAVLSKNSVIGMRKTLVYYKGRAPNGRKSDWIMHEYRLQNSELAPVQEEGWVVCRAFRKPIPNQRPLGYEPWQNQLYHVESSNNYSSSVTMNTSHHIGASSSSHNLNQMLMSNNHYNPNNTSSSMHQYGNIELPQLDSPSLSPSLGTNKDQNESFEQEEEKSFNCVDWRTLDTLLETQVIHPHNPNILMFETQSYNPAPSFPSMHQSYNEVEANIHHSLGCFPDS

SEQ ID NO: 42742 - DNA, 1346 bp, Arabidopsis thaliana
  misc_feature (1)..(1346): Ceres Seq. ID no. 13648951
  misc_feature (1)..(1346): Ortholog of  Ceres SEQ ID NO 15177328 as cited in SEQ ID NO 52523
  misc_feature (1)..(1346): Ortholog of  Ceres SEQ ID NO 13655881 as cited in SEQ ID NO 64426
aaaaggtttgatgagagtcttttcctaccaaaccccctctccttgtgatgatgattagcttcacctgccattttctcaatgactgtacccacaggttatataaatggcttctcacatttcgagctccattcctcaccagaccccttttgcaagattagtaagttattgttgacgttttgagaaagctggatatagctcaagaaggtcaaaacatcgatgagccggttgttattggagaggaaaaaggttctgtaagattgactactcttaaccgccctcgtcagctgaatgtcatctctccggaagtggtctttaagcttgcagaatatcttgaattgtgggagaaggatgaccaaacaaagcttatattgatcaagggtacaggtagagctttctccgccggtggtgatctaaaggtgttttatcacggacaggaatcaaaggattcttgccttgaggttgtttaccggatgtactggctgtgttatcatatccacacatacaagaagacgcaggtgtctctggttaatggaatatcgatgggtggaggtgcagcattgatggtccctatgaagttttcagttgtgacagagaaaactgtttttgcgactccagaagcaagtttcgggtttcacactgattgcgggttctcctacatccattcacgtcttcctggtcatttaggagagttcttggctttaactggggcaagattgaacggcaaagaacttgtagcaattggaatggcaacacattttgtaccttctggtaaattgatggatctggaggcacggcttgtgagtttagactcaggagatgcggatgtagtccaatccacaattgaagagttctccgagaaagtcaaccttgacaaagacagcatccttaacaagcagtcggtaatcaatgagtgtttctcaaaagaaagtgtgaagcagatcatacaagcatttgaagctgaagcaagcaaagacgggaatgaatggataactccagtcatcaaaggtctaaagcgatcgtcacccacagggttgaagatagtactacaatcgatccgtgaaggtagaaaacaaacgctgagtgattgcctgaagaaagagtttcggctcaccttgaatatcttgaggaaaaccatatcccctgatatgtatgagggtataagggctctgaccatagacaaagacaattctccaaagtggaatccagcgacattagatgaggtggatgatgagaaaatcaactcggtgtttaagctctttgaggatgatgatattgaactacaaatccctgaaacagaagaaaacaggtggggaggcaaatacgagacttcaggctacgcatctgta

SEQ ID NO: 42743 - protein, 292 aa, Arabidopsis thaliana
  peptide (1)..(292): Ceres Seq. ID no. 13648952
MYWLCYHIHTYKKTQVSLVNGISMGGGAALMVPMKFSVVTEKTVFATPEASFGFHTDCGFSYIHSRLPGHLGEFLALTGARLNGKELVAIGMATHFVPSGKLMDLEARLVSLDSGDADVVQSTIEEFSEKVNLDKDSILNKQSVINECFSKESVKQIIQAFEAEASKDGNEWITPVIKGLKRSSPTGLKIVLQSIREGRKQTLSDCLKKEFRLTLNILRKTISPDMYEGIRALTIDKDNSPKWNPATLDEVDDEKINSVFKLFEDDDIELQIPETEENRWGGKYETSGYASV

SEQ ID NO: 42744 - protein, 269 aa, Arabidopsis thaliana
  peptide (1)..(269): Ceres Seq. ID no. 13648953
MGGGAALMVPMKFSVVTEKTVFATPEASFGFHTDCGFSYIHSRLPGHLGEFLALTGARLNGKELVAIGMATHFVPSGKLMDLEARLVSLDSGDADVVQSTIEEFSEKVNLDKDSILNKQSVINECFSKESVKQIIQAFEAEASKDGNEWITPVIKGLKRSSPTGLKIVLQSIREGRKQTLSDCLKKEFRLTLNILRKTISPDMYEGIRALTIDKDNSPKWNPATLDEVDDEKINSVFKLFEDDDIELQIPETEENRWGGKYETSGYASV

SEQ ID NO: 42745 - protein, 262 aa, Arabidopsis thaliana
  peptide (1)..(262): Ceres Seq. ID no. 13648954
MVPMKFSVVTEKTVFATPEASFGFHTDCGFSYIHSRLPGHLGEFLALTGARLNGKELVAIGMATHFVPSGKLMDLEARLVSLDSGDADVVQSTIEEFSEKVNLDKDSILNKQSVINECFSKESVKQIIQAFEAEASKDGNEWITPVIKGLKRSSPTGLKIVLQSIREGRKQTLSDCLKKEFRLTLNILRKTISPDMYEGIRALTIDKDNSPKWNPATLDEVDDEKINSVFKLFEDDDIELQIPETEENRWGGKYETSGYASV

SEQ ID NO: 42746 - DNA, 1499 bp, Arabidopsis thaliana
  misc_feature (1)..(1499): Ceres Seq. ID no. 12330770
  misc_feature (1)..(1499): Ortholog of  Ceres SEQ ID NO 13661082 as cited in SEQ ID NO 60959
atcaatggaggtttttgattcgccccaagctctcgcgattcctgatgttcttcagtaatttcttgcaatccttataaacaaagagcgtggagaatcgtttcagaggaaagaaaactaaaaatggcgactcttttcaacaaatttcagcaggctgttggagttcttgccaagagtaccacatttgctaagaacccaaggcaactgcagtttgaagcagacgttaacaaactctttatgtatacaagctataaccggttgggacgagaagctgaggagactgatgcagaggagatcattgagatggctggtaaagccactttatctgagcagcagaagcaagttcaagagaacattcactaccaagttgaaaaattctgctctttgatggatggaatccttcttcctgatgttaggaggaacgagtcggggtcacaatcaacaagccctcgtcctcctcgtagaagtggtcttactttcgccattggtagtaataatgcttttccacatgcagatcagccccttgttcccgagacaaagcctttgaaactcaatgacgtctcacagagattaatggatcaaatgggttacaccctcgagaccaaaccgtctgtaatacctcacaaagacgctggtcaaggttgttttatcaaaggcgaggcagatgttggaaccgtcttagccttttaccctggagttatttactctcctgctttctacaagtacatacccgggtacccgaaggttgattcacagaactcatatctcatcaccaggtatgatgggactgtaataaatgctcaaccttggggtcttgggggagaatcaagggaagcatggaacgggtcctacacacctgcggtcaaagcaaacaccaaaaccgcagaaaacgggtcagacaggttatggaaagcgttgagcaagcctctcgaaggttcgggtaaaggaaaagaggttcttgagaggagaaatccgttggcttttggtcacttagctaaccacccagcgaaagagatgactccaaacgttatgatatgtccttatgacttccctttgatggcgaaagatctgcggccttacattccgaatatatcttttggggattctggagaaataaagatgaaaagatttggaagtttctggtttaagacagggagtaaaaacgggttagaagctccggttctgaagacactggtcttggtggcaacgaggtcgttgtgtaatgaggaacttttgctgaattacaggctgagcaactctaagagacgaccagattggtatactccggttaacgaggaggaagataggagaagatggagctaaatttctcttttatgttttaatgaaacttgaaaggctctgtttcaaaacatgctcctcggttttctttggactattagtgcgacgtcgttttctgagtgtttcactattttggtttttcgattatttttggaagacattttattctaatcttttaaagacatttatgttgttcggttgtc

SEQ ID NO: 42747 - protein, 399 aa, Arabidopsis thaliana
  peptide (1)..(399): Ceres Seq. ID no. 12330771
MATLFNKFQQAVGVLAKSTTFAKNPRQLQFEADVNKLFMYTSYNRLGREAEETDAEEIIEMAGKATLSEQQKQVQENIHYQVEKFCSLMDGILLPDVRRNESGSQSTSPRPPRRSGLTFAIGSNNAFPHADQPLVPETKPLKLNDVSQRLMDQMGYTLETKPSVIPHKDAGQGCFIKGEADVGTVLAFYPGVIYSPAFYKYIPGYPKVDSQNSYLITRYDGTVINAQPWGLGGESREAWNGSYTPAVKANTKTAENGSDRLWKALSKPLEGSGKGKEVLERRNPLAFGHLANHPAKEMTPNVMICPYDFPLMAKDLRPYIPNISFGDSGEIKMKRFGSFWFKTGSKNGLEAPVLKTLVLVATRSLCNEELLLNYRLSNSKRRPDWYTPVNEEEDRRRWS

SEQ ID NO: 42748 - protein, 361 aa, Arabidopsis thaliana
  peptide (1)..(361): Ceres Seq. ID no. 12330772
MYTSYNRLGREAEETDAEEIIEMAGKATLSEQQKQVQENIHYQVEKFCSLMDGILLPDVRRNESGSQSTSPRPPRRSGLTFAIGSNNAFPHADQPLVPETKPLKLNDVSQRLMDQMGYTLETKPSVIPHKDAGQGCFIKGEADVGTVLAFYPGVIYSPAFYKYIPGYPKVDSQNSYLITRYDGTVINAQPWGLGGESREAWNGSYTPAVKANTKTAENGSDRLWKALSKPLEGSGKGKEVLERRNPLAFGHLANHPAKEMTPNVMICPYDFPLMAKDLRPYIPNISFGDSGEIKMKRFGSFWFKTGSKNGLEAPVLKTLVLVATRSLCNEELLLNYRLSNSKRRPDWYTPVNEEEDRRRWS

SEQ ID NO: 42749 - protein, 339 aa, Arabidopsis thaliana
  peptide (1)..(339): Ceres Seq. ID no. 12330773
MAGKATLSEQQKQVQENIHYQVEKFCSLMDGILLPDVRRNESGSQSTSPRPPRRSGLTFAIGSNNAFPHADQPLVPETKPLKLNDVSQRLMDQMGYTLETKPSVIPHKDAGQGCFIKGEADVGTVLAFYPGVIYSPAFYKYIPGYPKVDSQNSYLITRYDGTVINAQPWGLGGESREAWNGSYTPAVKANTKTAENGSDRLWKALSKPLEGSGKGKEVLERRNPLAFGHLANHPAKEMTPNVMICPYDFPLMAKDLRPYIPNISFGDSGEIKMKRFGSFWFKTGSKNGLEAPVLKTLVLVATRSLCNEELLLNYRLSNSKRRPDWYTPVNEEEDRRRWS

SEQ ID NO: 42750 - DNA, 1241 bp, Arabidopsis thaliana
  misc_feature (1)..(1241): Ceres Seq. ID no. 13645942
  misc_feature (1)..(1241): Ortholog of  Ceres SEQ ID NO 15224803 as cited in SEQ ID NO 56572
  misc_feature (1)..(1241): Ortholog of  Ceres SEQ ID NO 13502952 as cited in SEQ ID NO 62271
  misc_feature (1)..(1241): Ortholog of  Ceres SEQ ID NO 13502973 as cited in SEQ ID NO 68052
  misc_feature (1)..(1241): Ortholog of  Ceres SEQ ID NO 13596000 as cited in SEQ ID NO 68188
actatctcttcttcttcttcctcttctctcagtgaacaaatttggctatggctttttctgcaccatcactttccaaattctctcttttggttgccatttcagcatcagctctcctctgttgtgcttttgcccgtgatttctccattgttggatacacgccggagcatttgacaaacactgacaagcttctagagctcttcgagtcatggatgtcagaacacagcaaggcttacaaaagcgtggaggagaaggtgcacaggtttgaggttttcagagagaatctgatgcatatagaccagaggaacaatgagatcaacagttactggctcggtttgaacgagtttgcggatttgacccatgaagagttcaaaggaagatatctaggacttgcaaagccacaattctctagaaagagacagccctcagctaacttcaggtacagagatatcacggacttgcctaaatccgtagactggagaaagaaaggcgctgtggctcctgtcaaggaccagggtcaatgtggtagctgttgggcattttcaacagttgcagctgtcgaggggatcaaccagatcacaacagggaatctgagttcgctttcagagcaagaactcatagactgtgacacaactttcaacagtggctgcaatggaggtctcatggactacgcattccagtacataatttcgaccggtggtctccacaaagaagatgattacccttatctcatggaggaaggaatttgtcaagagcagaaagaggatgtggaacgtgtgacaatcagcggctacgaagatgtccctgaaaatgatgacgaaagcctggtgaaggctttagctcatcagccagtcagtgtggctattgaggcttcaggaagagacttccagttctacaaagggggagtgtttaatggtaaatgtggaacagacctagaccacggtgtggcagcggttggatatggttcatcaaagggatctgactatgttattgtcaagaactcatggggaccaagatggggagagaaagggtttattaggatgaagagaaacactggtaaaccagagggactctgtggaatcaacaagatggcctcatatcctaccaagaccaagtgatagatatacctttgttcctgcatcctacctttttttctttctttcaatgcatttctattgcacattatattgtattgatgaatgtgagattttaaaataacatggtaagagttctcttaccatttt

SEQ ID NO: 42751 - protein, 355 aa, Arabidopsis thaliana
  peptide (1)..(355): Ceres Seq. ID no. 13645943
MAFSAPSLSKFSLLVAISASALLCCAFARDFSIVGYTPEHLTNTDKLLELFESWMSEHSKAYKSVEEKVHRFEVFRENLMHIDQRNNEINSYWLGLNEFADLTHEEFKGRYLGLAKPQFSRKRQPSANFRYRDITDLPKSVDWRKKGAVAPVKDQGQCGSCWAFSTVAAVEGINQITTGNLSSLSEQELIDCDTTFNSGCNGGLMDYAFQYIISTGGLHKEDDYPYLMEEGICQEQKEDVERVTISGYEDVPENDDESLVKALAHQPVSVAIEASGRDFQFYKGGVFNGKCGTDLDHGVAAVGYGSSKGSDYVIVKNSWGPRWGEKGFIRMKRNTGKPEGLCGINKMASYPTKTK

SEQ ID NO: 42752 - protein, 301 aa, Arabidopsis thaliana
  peptide (1)..(301): Ceres Seq. ID no. 13645944
MSEHSKAYKSVEEKVHRFEVFRENLMHIDQRNNEINSYWLGLNEFADLTHEEFKGRYLGLAKPQFSRKRQPSANFRYRDITDLPKSVDWRKKGAVAPVKDQGQCGSCWAFSTVAAVEGINQITTGNLSSLSEQELIDCDTTFNSGCNGGLMDYAFQYIISTGGLHKEDDYPYLMEEGICQEQKEDVERVTISGYEDVPENDDESLVKALAHQPVSVAIEASGRDFQFYKGGVFNGKCGTDLDHGVAAVGYGSSKGSDYVIVKNSWGPRWGEKGFIRMKRNTGKPEGLCGINKMASYPTKTK

SEQ ID NO: 42753 - protein, 276 aa, Arabidopsis thaliana
  peptide (1)..(276): Ceres Seq. ID no. 13645945
MHIDQRNNEINSYWLGLNEFADLTHEEFKGRYLGLAKPQFSRKRQPSANFRYRDITDLPKSVDWRKKGAVAPVKDQGQCGSCWAFSTVAAVEGINQITTGNLSSLSEQELIDCDTTFNSGCNGGLMDYAFQYIISTGGLHKEDDYPYLMEEGICQEQKEDVERVTISGYEDVPENDDESLVKALAHQPVSVAIEASGRDFQFYKGGVFNGKCGTDLDHGVAAVGYGSSKGSDYVIVKNSWGPRWGEKGFIRMKRNTGKPEGLCGINKMASYPTKTK

SEQ ID NO: 42754 - DNA, 1908 bp, Arabidopsis thaliana
  misc_feature (1)..(1908): Ceres Seq. ID no. 13490997
  misc_feature (1)..(1908): Ortholog of  Ceres SEQ ID NO 14309715 as cited in SEQ ID NO 55353
  misc_feature (1)..(1908): Ortholog of  Ceres SEQ ID NO 13595521 as cited in SEQ ID NO 59840
ttcgcggttcaaaaaattaagtgatcatcacttctcctcctttatcgagagcttcagttttagagcaacaatgtctctatttctgaagcccttcctcttcctatacgacaccactcttagtcttctcttacttctgttcaatggatggagtcttgaggatacagcagcagcccaaaagaggcgtgaagcagacaaaaatgctgcagaaactgaatggatccaactccaatacttgtggaccaaaacaaggagtgttgtactacttcccgttttcaagggtttggtggttatgtgtttggttctatccattatagtgttcttcgagagtttttacatgaactttgtgatactcttcgtcaagttatttaaacgtaaaccccataaagtgtacaaatgggaggccatgcaagaagatgttgaggttggacccgataactacccaatggttcttatccaaataccaatgtacaatgaaaaagaggtctttcaattatctatagcagcaatatgtagtttggtctggccatcgagccgtctagtagttcaagttgtagatgattctacggatccggccgtaagggaaggtgtggacgtagagattgcaaaatggcaaagccaaggcataaacataaggtgtgaaaggagagataacaggaacggctacaaagccggagctatgaaagaagctcttacgcagagctacgtcaagcaatgcgacttcgtagcagtcttcgatgctgatttccaacccgagcccgattatctcatccgcgctgtccctttccttgtccacaaccctgacgttgctctagttcaagcccgatggatatttgttaacgcgaacaaatgcttgatgacgaggatgcaagagatgtctctcaactatcatttcaaagtggaacaagaatcagggtcgactagacatgctttcttcgggtttaatggaaccgcgggtgtatggagaatatcggcaatggaagcagcaggaggatggaaatcaaggaccacagtagaggacatggacttggctgttcgtgttggtcttcatggctggaaatttgtctaccttaacgacctcacggtgagaaacgagcttccaagcaaatttaaggcctacagattccagcaacataggtggtcctgtggaccggcgaatctatttagaaaaatgacgatggagatcattttcaataagagagtatcaatttggaagaagttttatgtgatctacagctttttcttcgtaaggaaagtggcggtacacttcttgacattcttcttctactgtataattgtgccaacaagtgtcttcttccctgaaatccacatcccatcttggtctaccatttacgttccctctttgatcagtatcttccacaccctggcaactccaagatccttctacctcgtgatattttgggtcttgttcgagaatgtaatggctatgcatcgaaccaaaggtacgtgcattggcctacttgaaggaggaagagtaaacgaatgggttgtgaccgaaaaactaggagatgctttgaagagtaagctactctctcgggtagtccaaagaaaatcttgttatcaaagagtgaattccaaggaagtgatggtgggggtatacatattaggatgtgcactctatggcctgatctatgggcacacatggttacatttctatctttttcttcaggccacagcctttttcgtctccggttttggttttgtcggaacggcctaagaaccttcccggcccattatttttagtcaccaaataaattctccatgttttagttcttatttacacttttatttattttgacaccattgtacggtttggaccccatatcatcatgttgtataagtataacgaataatgattttttgtttgtttgaatgtatgcgtcactcggt

SEQ ID NO: 42755 - protein, 577 aa, Arabidopsis thaliana
  peptide (1)..(577): Ceres Seq. ID no. 13490998
SRFKKLSDHHFSSFIESFSFRATMSLFLKPFLFLYDTTLSLLLLLFNGWSLEDTAAAQKRREADKNAAETEWIQLQYLWTKTRSVVLLPVFKGLVVMCLVLSIIVFFESFYMNFVILFVKLFKRKPHKVYKWEAMQEDVEVGPDNYPMVLIQIPMYNEKEVFQLSIAAICSLVWPSSRLVVQVVDDSTDPAVREGVDVEIAKWQSQGINIRCERRDNRNGYKAGAMKEALTQSYVKQCDFVAVFDADFQPEPDYLIRAVPFLVHNPDVALVQARWIFVNANKCLMTRMQEMSLNYHFKVEQESGSTRHAFFGFNGTAGVWRISAMEAAGGWKSRTTVEDMDLAVRVGLHGWKFVYLNDLTVRNELPSKFKAYRFQQHRWSCGPANLFRKMTMEIIFNKRVSIWKKFYVIYSFFFVRKVAVHFLTFFFYCIIVPTSVFFPEIHIPSWSTIYVPSLISIFHTLATPRSFYLVIFWVLFENVMAMHRTKGTCIGLLEGGRVNEWVVTEKLGDALKSKLLSRVVQRKSCYQRVNSKEVMVGVYILGCALYGLIYGHTWLHFYLFLQATAFFVSGFGFVGTA

SEQ ID NO: 42756 - protein, 554 aa, Arabidopsis thaliana
  peptide (1)..(554): Ceres Seq. ID no. 13490999
MSLFLKPFLFLYDTTLSLLLLLFNGWSLEDTAAAQKRREADKNAAETEWIQLQYLWTKTRSVVLLPVFKGLVVMCLVLSIIVFFESFYMNFVILFVKLFKRKPHKVYKWEAMQEDVEVGPDNYPMVLIQIPMYNEKEVFQLSIAAICSLVWPSSRLVVQVVDDSTDPAVREGVDVEIAKWQSQGINIRCERRDNRNGYKAGAMKEALTQSYVKQCDFVAVFDADFQPEPDYLIRAVPFLVHNPDVALVQARWIFVNANKCLMTRMQEMSLNYHFKVEQESGSTRHAFFGFNGTAGVWRISAMEAAGGWKSRTTVEDMDLAVRVGLHGWKFVYLNDLTVRNELPSKFKAYRFQQHRWSCGPANLFRKMTMEIIFNKRVSIWKKFYVIYSFFFVRKVAVHFLTFFFYCIIVPTSVFFPEIHIPSWSTIYVPSLISIFHTLATPRSFYLVIFWVLFENVMAMHRTKGTCIGLLEGGRVNEWVVTEKLGDALKSKLLSRVVQRKSCYQRVNSKEVMVGVYILGCALYGLIYGHTWLHFYLFLQATAFFVSGFGFVGTA

SEQ ID NO: 42757 - protein, 481 aa, Arabidopsis thaliana
  peptide (1)..(481): Ceres Seq. ID no. 13491000
MCLVLSIIVFFESFYMNFVILFVKLFKRKPHKVYKWEAMQEDVEVGPDNYPMVLIQIPMYNEKEVFQLSIAAICSLVWPSSRLVVQVVDDSTDPAVREGVDVEIAKWQSQGINIRCERRDNRNGYKAGAMKEALTQSYVKQCDFVAVFDADFQPEPDYLIRAVPFLVHNPDVALVQARWIFVNANKCLMTRMQEMSLNYHFKVEQESGSTRHAFFGFNGTAGVWRISAMEAAGGWKSRTTVEDMDLAVRVGLHGWKFVYLNDLTVRNELPSKFKAYRFQQHRWSCGPANLFRKMTMEIIFNKRVSIWKKFYVIYSFFFVRKVAVHFLTFFFYCIIVPTSVFFPEIHIPSWSTIYVPSLISIFHTLATPRSFYLVIFWVLFENVMAMHRTKGTCIGLLEGGRVNEWVVTEKLGDALKSKLLSRVVQRKSCYQRVNSKEVMVGVYILGCALYGLIYGHTWLHFYLFLQATAFFVSGFGFVGTA

SEQ ID NO: 42758 - DNA, 1455 bp, Arabidopsis thaliana
  misc_feature (1)..(1455): Ceres Seq. ID no. 13647045
  misc_feature (1)..(1455): Ortholog of  Ceres SEQ ID NO 13659033 as cited in SEQ ID NO 66372
  misc_feature (1)..(1455): Ortholog of  Ceres SEQ ID NO 13655724 as cited in SEQ ID NO 68973
  misc_feature (1)..(1455): Ortholog of  Ceres SEQ ID NO 12625899 as cited in SEQ ID NO 69079
accaaacaacaaaataacttcaagaaggctggagttaaaaggcaagtaagagaaagacacatcaatataacccaaaacaaaacatcataacagcaacaataacagacacataaccaatggcaaagcgacaactgttgatgctgggtattagaactagctttcatactatcgccgccgtgcttgtggccggattaatattcactgccgtgtttttgtccagaaacagtttgccaaaggaaaatcctcaaagccacggtgttacggatcgcggaggggacagtggcagagaatgtaatttgttcgaagggaaatgggtatttgataacgtatcataccctctttataaagaagaagattgcaagttcatgtctgaccagttggcttgtgagaagtttgggaggaaagatctgagttacaaattctggaggtggcaacctcacacgtgtgatcttcccaggtttaatggaacgaagttgctggagaggctaagaaataagaggatggtgtacgtaggagactctctgaacagaggccaatgggtatcaatggtgtgtatggttagttcggtaattacaaacccaaaggcgatgtatatgcacaacaatggctctaacctcatcacgttcaaagctctcgaatacaatgctacaatagactactattgggctcctttgctggtggaatccaactcggacgacccgacaaaccatagattccccgatcggatagttcggatccaatcaatagaaaaacatgcaaggcattggacgaactctgatatcattgttttcaactcttacttatggtggagaatgcctcatatcaagtcactgtggggatcgtttgagaaattagatggaatatacaaggaagtggagatggtgagagtttatgaaatggctttgcaaacactgtctcagtggttggaggttcacgttaaccccaatattaccaaacttttcttcatgtccatgtctcccacccatgaaagggctgaagaatggggaggaatacttaatcagaactgttatggagaagctagtctaatagataaagaaggatatactggaagagggtcagatccaaagatgatgagagtcttagaaaatgtgcttgacgggctaaaaaatcgaggattaaacatgcagatgataaacattacgcaactatcagagtatcgaaaagaaggtcatccttcgatctacagaaaacaatggggaacagtgaaggaaaatgaaatctcgaatccaagtagtaacgcagattgtatacattggtgtttgcctggagttcctgatgtttggaatgaactcctttatgcttatattcttgaccatcattctagttgaaaactactattatatcttttgtttttttacctattccacttcaattgtacagttgatttccttactctcacttcttttctatcaaaaaaattaacatgtttttctt

SEQ ID NO: 42759 - protein, 410 aa, Arabidopsis thaliana
  peptide (1)..(410): Ceres Seq. ID no. 13647046
MAKRQLLMLGIRTSFHTIAAVLVAGLIFTAVFLSRNSLPKENPQSHGVTDRGGDSGRECNLFEGKWVFDNVSYPLYKEEDCKFMSDQLACEKFGRKDLSYKFWRWQPHTCDLPRFNGTKLLERLRNKRMVYVGDSLNRGQWVSMVCMVSSVITNPKAMYMHNNGSNLITFKALEYNATIDYYWAPLLVESNSDDPTNHRFPDRIVRIQSIEKHARHWTNSDIIVFNSYLWWRMPHIKSLWGSFEKLDGIYKEVEMVRVYEMALQTLSQWLEVHVNPNITKLFFMSMSPTHERAEEWGGILNQNCYGEASLIDKEGYTGRGSDPKMMRVLENVLDGLKNRGLNMQMINITQLSEYRKEGHPSIYRKQWGTVKENEISNPSSNADCIHWCLPGVPDVWNELLYAYILDHHSS

SEQ ID NO: 42760 - protein, 403 aa, Arabidopsis thaliana
  peptide (1)..(403): Ceres Seq. ID no. 13647047
MLGIRTSFHTIAAVLVAGLIFTAVFLSRNSLPKENPQSHGVTDRGGDSGRECNLFEGKWVFDNVSYPLYKEEDCKFMSDQLACEKFGRKDLSYKFWRWQPHTCDLPRFNGTKLLERLRNKRMVYVGDSLNRGQWVSMVCMVSSVITNPKAMYMHNNGSNLITFKALEYNATIDYYWAPLLVESNSDDPTNHRFPDRIVRIQSIEKHARHWTNSDIIVFNSYLWWRMPHIKSLWGSFEKLDGIYKEVEMVRVYEMALQTLSQWLEVHVNPNITKLFFMSMSPTHERAEEWGGILNQNCYGEASLIDKEGYTGRGSDPKMMRVLENVLDGLKNRGLNMQMINITQLSEYRKEGHPSIYRKQWGTVKENEISNPSSNADCIHWCLPGVPDVWNELLYAYILDHHSS

SEQ ID NO: 42761 - protein, 327 aa, Arabidopsis thaliana
  peptide (1)..(327): Ceres Seq. ID no. 13647048
MSDQLACEKFGRKDLSYKFWRWQPHTCDLPRFNGTKLLERLRNKRMVYVGDSLNRGQWVSMVCMVSSVITNPKAMYMHNNGSNLITFKALEYNATIDYYWAPLLVESNSDDPTNHRFPDRIVRIQSIEKHARHWTNSDIIVFNSYLWWRMPHIKSLWGSFEKLDGIYKEVEMVRVYEMALQTLSQWLEVHVNPNITKLFFMSMSPTHERAEEWGGILNQNCYGEASLIDKEGYTGRGSDPKMMRVLENVLDGLKNRGLNMQMINITQLSEYRKEGHPSIYRKQWGTVKENEISNPSSNADCIHWCLPGVPDVWNELLYAYILDHHSS

SEQ ID NO: 42762 - DNA, 2054 bp, Arabidopsis thaliana
  misc_feature (1)..(2054): Ceres Seq. ID no. 12330813
  misc_feature (1)..(2054): Ortholog of  Ceres SEQ ID NO 15169092 as cited in SEQ ID NO 60430
  misc_feature (1)..(2054): Ortholog of  Ceres SEQ ID NO 14303680 as cited in SEQ ID NO 66019
  misc_feature (1)..(2054): Ortholog of  Ceres SEQ ID NO 15224940 as cited in SEQ ID NO 0
ctgtttcctatgctctctctctctcttactctcacagtgactattcgtcgcttcagatctaaaagagaggaagataaaccatttggattcaatatcgattaaggaaaccttttgacttcacaagaatggcagtgacagaagcagaaaatcctcttcttggtgaaatcacttgtggcaccttactacagaagttgcaggaaatctgggatgaggttggggagagtgatgaagaacgagacaaactgcttctacagattgaggaagagtgtctgaatgtttacaaaaagaaagttgagctagccgcaaaatctcgtgcagagcttcttcagactttgtcagatgccactgttgaactttccaatctcacaactgctctcggggaaaaaagctatatcgacattcctgataagacttcaggaacgatcaaagaacaactttctgcaatagcacctgcgcttgaacaactttggcaacagaaagaggaaagggtccgggcattttctgatgtacaatcacagattcagaagatatgtgaggagatcgctggcggattgaacaatggacctcatgtggttgatgagactgacttgtctctaaagagattagatgacttccagaggaaactccaagagctccagaaagagaagagtgataggttacagaaggtgctcgagtttgtgagcacggtgcatgatctatgtgccgtccttcgtttagatttcttaagcactgtcaccgaagttcatccgagcttagatgaggcaaatggtgttcaaaccaagagcattagcaatgaaacacttgcaaggttggctaagactgtcttgactcttaaagaagataaaatgcaaagacttaagaagcttcaagaactagctactcagctaactgatctatggaatctgatggatacttctgatgaggaaagggagctttttgaccatgttacctctaacatttcagcttcagttcatgaagtgactgcctctggtgctctcgcacttgatcttatcgaacaggctgaggtggaagtggataggcttgatcaactgaaatctagcagaatgaaggaaattgcattcaaaaagcaatcagagcttgaggagatatatgctcgtgctcacatagaaataaaaccagaggttgttcgtgagaggatcatgtcgttgattgatgctgggaatactgaacctactgagttactggctgacatggatagccagatcgcaaaggccaaggaggaagcctttagtagaaaagaaattttagaccgtgtagagaaatggatgtcagcttgtgaggaagagagctggctcgaagattacaatcgagatcagaacaggtatagtgcaagccgaggtgcgcatttgaatctcaagagagctgagaaagctcggattctggtcagcaagattactgctatggttgacacgttgattgctaaaacccgggcatgggaagaggagaacagtatgtcctttgagtacgatggagttcctttactcgccatgctagatgaatacactatgcttaggcaagaacgagaagatgagaagcggaggctgaaagaacagaagaagcagcaagaacagccacacacagatcaagaatccgcctttgggtctaaaccaagccctgcaagacccgttagtgccaagaaaccggtgggaacacgagtcaatggaggagggctcaacgaaactcctatgaggcgtttgtctatgaactcaaaccagaacggaagcaagtccaagagagacagtctgaacaagatagcttcaccttcgaacattgtagccaacacaaaagatgatgctgcatctccagtctctcgtgctgacccagtgatggcttcaccgtgacaatatcaaaagaaagagagttataatgcttacttacacttttgttagttgctaatagtgctgtttaagaaacaaacacttagaaacaaagacaatgagagtagaatgttacttagatgtttctgtttctgtattcattcactcaaatttgtttggtacttgttagcatgactaatgtgaagtgaccggttt

SEQ ID NO: 42763 - protein, 578 aa, Arabidopsis thaliana
  peptide (1)..(578): Ceres Seq. ID no. 12330814
MAVTEAENPLLGEITCGTLLQKLQEIWDEVGESDEERDKLLLQIEEECLNVYKKKVELAAKSRAELLQTLSDATVELSNLTTALGEKSYIDIPDKTSGTIKEQLSAIAPALEQLWQQKEERVRAFSDVQSQIQKICEEIAGGLNNGPHVVDETDLSLKRLDDFQRKLQELQKEKSDRLQKVLEFVSTVHDLCAVLRLDFLSTVTEVHPSLDEANGVQTKSISNETLARLAKTVLTLKEDKMQRLKKLQELATQLTDLWNLMDTSDEERELFDHVTSNISASVHEVTASGALALDLIEQAEVEVDRLDQLKSSRMKEIAFKKQSELEEIYARAHIEIKPEVVRERIMSLIDAGNTEPTELLADMDSQIAKAKEEAFSRKEILDRVEKWMSACEEESWLEDYNRDQNRYSASRGAHLNLKRAEKARILVSKITAMVDTLIAKTRAWEEENSMSFEYDGVPLLAMLDEYTMLRQEREDEKRRLKEQKKQQEQPHTDQESAFGSKPSPARPVSAKKPVGTRVNGGGLNETPMRRLSMNSNQNGSKSKRDSLNKIASPSNIVANTKDDAASPVSRADPVMASP

SEQ ID NO: 42764 - protein, 338 aa, Arabidopsis thaliana
  peptide (1)..(338): Ceres Seq. ID no. 12330815
MQRLKKLQELATQLTDLWNLMDTSDEERELFDHVTSNISASVHEVTASGALALDLIEQAEVEVDRLDQLKSSRMKEIAFKKQSELEEIYARAHIEIKPEVVRERIMSLIDAGNTEPTELLADMDSQIAKAKEEAFSRKEILDRVEKWMSACEEESWLEDYNRDQNRYSASRGAHLNLKRAEKARILVSKITAMVDTLIAKTRAWEEENSMSFEYDGVPLLAMLDEYTMLRQEREDEKRRLKEQKKQQEQPHTDQESAFGSKPSPARPVSAKKPVGTRVNGGGLNETPMRRLSMNSNQNGSKSKRDSLNKIASPSNIVANTKDDAASPVSRADPVMASP

SEQ ID NO: 42765 - protein, 318 aa, Arabidopsis thaliana
  peptide (1)..(318): Ceres Seq. ID no. 12330816
MDTSDEERELFDHVTSNISASVHEVTASGALALDLIEQAEVEVDRLDQLKSSRMKEIAFKKQSELEEIYARAHIEIKPEVVRERIMSLIDAGNTEPTELLADMDSQIAKAKEEAFSRKEILDRVEKWMSACEEESWLEDYNRDQNRYSASRGAHLNLKRAEKARILVSKITAMVDTLIAKTRAWEEENSMSFEYDGVPLLAMLDEYTMLRQEREDEKRRLKEQKKQQEQPHTDQESAFGSKPSPARPVSAKKPVGTRVNGGGLNETPMRRLSMNSNQNGSKSKRDSLNKIASPSNIVANTKDDAASPVSRADPVMASP

SEQ ID NO: 42766 - DNA, 1714 bp, Arabidopsis thaliana
  misc_feature (1)..(1714): Ceres Seq. ID no. 12338696
  misc_feature (1)..(1714): Ortholog of  Ceres SEQ ID NO 13646595 as cited in SEQ ID NO 20561
  misc_feature (1)..(1714): Ortholog of  Ceres SEQ ID NO 14314636 as cited in SEQ ID NO 56924
  misc_feature (1)..(1714): Ortholog of  Ceres SEQ ID NO 15171614 as cited in SEQ ID NO 60106
  misc_feature (1)..(1714): Ortholog of  Ceres SEQ ID NO 13597574 as cited in SEQ ID NO 64677
  misc_feature (1)..(1714): Ortholog of  Ceres SEQ ID NO 13597843 as cited in SEQ ID NO 64850
  misc_feature (1)..(1714): Ortholog of  Ceres SEQ ID NO 13597678 as cited in SEQ ID NO 65375
  misc_feature (1)..(1714): Ortholog of  Ceres SEQ ID NO 12779098 as cited in SEQ ID NO 67698
  misc_feature (1)..(1714): Ortholog of  Ceres SEQ ID NO 13596180 as cited in SEQ ID NO 67941
  misc_feature (1)..(1714): Ortholog of  Ceres SEQ ID NO 13591190 as cited in SEQ ID NO 68044
  misc_feature (1)..(1714): Ortholog of  Ceres SEQ ID NO 13595961 as cited in SEQ ID NO 68223
atagaaacacatcattaacaaaacaaagcctctctaaataaaaacaaaaagctaactgaataagaagaagtagtgatgcatatcacaaaaccacacgccgccatgttttccagtcccggaatgggccatgtcatcccggtgatcgagcttggaaagcgtctctccgctaacaacggcttccacgtcaccgtcttcgtcctcgaaaccgacgcagcctccgctcaatccaagttcctaaactcaaccggcgtcgacatcgtcaaacttccatcgccggacatttatggtttagtggaccccgacgaccatgtagtgaccaagatcggagtcattatgcgtgcagcagttccagccctccgatccaagatcgctgccatgcatcaaaagccaacggctctgatcgttgacttgtttggcacagatgcgttatgtctcgcaaaggaatttaacatgttgagttatgtgtttatccctaccaacgcacgttttctcggagtttcgatttattatccaaatttggacaaagatatcaaggaagagcacacagtgcaaagaaacccactcgctataccggggtgtgaaccggttaggttcgaagatactctggatgcatatctggttcccgacgaaccggtgtaccgggattttgttcgtcatggtctggcttacccaaaagccgatggaattttggtaaatacatgggaagagatggagcccaaatcattgaagtcccttctaaacccaaagctcttgggccgggttgctcgtgtaccggtctatccaatcggtcccttatgcagaccgatacaatcatccgaaaccgatcacccggttttggattggttaaacgaacaaccgaacgagtcggttctctatatctccttcgggagtggtggttgtctatcggcgaaacagttaactgaattggcgtggggactcgagcagagccagcaacggttcgtatgggtggttcgaccaccggtcgacggttcgtgttgtagcgagtatgtctcggctaacggtggtggaaccgaagacaacacgccagagtatctaccggaagggttcgtgagtcgtactagtgatagaggtttcgtggtcccctcatgggccccacaagctgaaatcctgtcccatcgggccgttggtgggtttttgacccattgcggttggagctcgacgttggaaagcgtcgttggcggcgttccgatgatcgcatggccactttttgccgagcagaatatgaatgcggcgttgctcagcgacgaactgggaatcgcagtcagattggatgatccaaaggaggatatttctaggtggaagattgaggcgttggtgaggaaggttatgactgagaaggaaggtgaagcgatgagaaggaaagtgaagaagttgagagactcggcggagatgtcactgagcattgacggtggtggtttggcgcacgagtcgctttgcagagtcaccaaggagtgtcaacggtttttggaacgtgtcgtggacttgtcacgtggtgcttagaaattgttaccgttttctagctcttttattattagtggttgaattatacgtgtcgttcctctgttagtgtataatataataatcgatttactctttgtaatataatgatgtttttgatatttttcaactaattttccattgtaatattgaataatcgggtgttgttgtaattaataatgagaaacaatttgtt

SEQ ID NO: 42767 - protein, 481 aa, Arabidopsis thaliana
  peptide (1)..(481): Ceres Seq. ID no. 12338697
MHITKPHAAMFSSPGMGHVIPVIELGKRLSANNGFHVTVFVLETDAASAQSKFLNSTGVDIVKLPSPDIYGLVDPDDHVVTKIGVIMRAAVPALRSKIAAMHQKPTALIVDLFGTDALCLAKEFNMLSYVFIPTNARFLGVSIYYPNLDKDIKEEHTVQRNPLAIPGCEPVRFEDTLDAYLVPDEPVYRDFVRHGLAYPKADGILVNTWEEMEPKSLKSLLNPKLLGRVARVPVYPIGPLCRPIQSSETDHPVLDWLNEQPNESVLYISFGSGGCLSAKQLTELAWGLEQSQQRFVWVVRPPVDGSCCSEYVSANGGGTEDNTPEYLPEGFVSRTSDRGFVVPSWAPQAEILSHRAVGGFLTHCGWSSTLESVVGGVPMIAWPLFAEQNMNAALLSDELGIAVRLDDPKEDISRWKIEALVRKVMTEKEGEAMRRKVKKLRDSAEMSLSIDGGGLAHESLCRVTKECQRFLERVVDLSRGA

SEQ ID NO: 42768 - protein, 472 aa, Arabidopsis thaliana
  peptide (1)..(472): Ceres Seq. ID no. 12338698
MFSSPGMGHVIPVIELGKRLSANNGFHVTVFVLETDAASAQSKFLNSTGVDIVKLPSPDIYGLVDPDDHVVTKIGVIMRAAVPALRSKIAAMHQKPTALIVDLFGTDALCLAKEFNMLSYVFIPTNARFLGVSIYYPNLDKDIKEEHTVQRNPLAIPGCEPVRFEDTLDAYLVPDEPVYRDFVRHGLAYPKADGILVNTWEEMEPKSLKSLLNPKLLGRVARVPVYPIGPLCRPIQSSETDHPVLDWLNEQPNESVLYISFGSGGCLSAKQLTELAWGLEQSQQRFVWVVRPPVDGSCCSEYVSANGGGTEDNTPEYLPEGFVSRTSDRGFVVPSWAPQAEILSHRAVGGFLTHCGWSSTLESVVGGVPMIAWPLFAEQNMNAALLSDELGIAVRLDDPKEDISRWKIEALVRKVMTEKEGEAMRRKVKKLRDSAEMSLSIDGGGLAHESLCRVTKECQRFLERVVDLSRGA

SEQ ID NO: 42769 - protein, 466 aa, Arabidopsis thaliana
  peptide (1)..(466): Ceres Seq. ID no. 12338699
MGHVIPVIELGKRLSANNGFHVTVFVLETDAASAQSKFLNSTGVDIVKLPSPDIYGLVDPDDHVVTKIGVIMRAAVPALRSKIAAMHQKPTALIVDLFGTDALCLAKEFNMLSYVFIPTNARFLGVSIYYPNLDKDIKEEHTVQRNPLAIPGCEPVRFEDTLDAYLVPDEPVYRDFVRHGLAYPKADGILVNTWEEMEPKSLKSLLNPKLLGRVARVPVYPIGPLCRPIQSSETDHPVLDWLNEQPNESVLYISFGSGGCLSAKQLTELAWGLEQSQQRFVWVVRPPVDGSCCSEYVSANGGGTEDNTPEYLPEGFVSRTSDRGFVVPSWAPQAEILSHRAVGGFLTHCGWSSTLESVVGGVPMIAWPLFAEQNMNAALLSDELGIAVRLDDPKEDISRWKIEALVRKVMTEKEGEAMRRKVKKLRDSAEMSLSIDGGGLAHESLCRVTKECQRFLERVVDLSRGA

SEQ ID NO: 42770 - DNA, 1819 bp, Arabidopsis thaliana
  misc_feature (1)..(1819): Ceres Seq. ID no. 12489090
  misc_feature (1)..(1819): Ortholog of  Ceres SEQ ID NO 15169264 as cited in SEQ ID NO 55026
  misc_feature (1)..(1819): Ortholog of  Ceres SEQ ID NO 15224709 as cited in SEQ ID NO 68627
atatccattctcaccttccaaatctccccactctctctctctctctctctctctctctctctctctctctctctatctctctctatctctctctatcttctcttttctcctctctccaacttcttcactaatgggagctcaggagaaacggcgccgtttcgagcagatatcaaagtgcgatgttaaggaccggtccaaccataccgtggccgctgatctagacggaacactactaatctctcgtagcgccttcccttactatttcctcgtagccctcgaggcagggagcttgctccgagcgttgatcctacttgtgtccgtaccattcgtttatcttacgtacttgaccatctccgagactttagccatcaacgtatttgtcttcatcacgttcgcgggtctcaagatccgagacgttgagctagtggtccgttccgtcctcccgaggttctatgcggaggacgtgaggcccgatacctggcgtatcttcaacacgttcgggaaacggtacataataactgcgagccctcgaattatggtcgagccattcgtgaaaacattcctaggagttgataaagttcttggaacagagctagaggtctccaaatcgggtcgggcaaccgggttcaccagaaaaccaggtattctcgtcggtcagtacaaacgtgacgtcgttttgagagagtttggtggcctagcgtctgatttacctgatttggggctcggcgatagcaagacggaccacgacttcatgtccatctgcaaggaaggttacatggtgccacgtacgaaatgcgaaccattaccaagaaacaaactcttaagccccataatattccacgagggcagattagtccaacgcccaacgccgttagttgctctgttaactttcctctggcttcccgtcggtttcgtcctctctatcatccgcgtctacacgaatattccgttaccggaacgtatcgcccgttacaactacaagcttactggcatcaagctagtcgtcaacggccaccctcctccgccgccaaaacctggccagccaggccatcttttggtctgcaaccaccgcaccgttctcgatcctgtggtcacagctgtcgcactcggccggaaaatcagctgcgtcacttacagcatcagcaagttctctgagctaatctcaccaatcaaagccgttgcgttgactcgtcaacgtgagaaagacgcagcgaacatcaagcgtcttttggaggaaggcgatctcgtgatatgtcccgagggaaccacgtgccgtgagcctttccttctccggtttagtgctcttttcgctgagctcacggaccggatcgttcccgtggcgatcaacacaaagcagagcatgttcaatggtaccaccacacgtggatacaagcttcttgatccttactttgcgttcatgaacccgaggccgacgtatgagatcacgttcctcaaacagattccagctgagctgacgtgtaaaggaggcaaatctccgatagaggttgcgaattacatacagagggttttgggaggaaccttaggttttgagtgcaccaatttcacaagaaaggataagtacgcaatgcttgctggtactgacggtagggttccggtgaagaaggagaagacgtgattattgatcggaggatggagaaaacaaagaaataatacaaagattggaatctttttcatttggatggttaattatcaatacttaaggggcaaagaattgataagtttgtttttgttgttacctttatcttctctgcttcggtgaatgtttcttcaagttttacatttagtacaataacggttt

SEQ ID NO: 42771 - protein, 544 aa, Arabidopsis thaliana
  peptide (1)..(544): Ceres Seq. ID no. 12489091
YPFSPSKSPHSLSLSLSLSLSLSLYLSLSLSIFSFLLSPTSSLMGAQEKRRRFEQISKCDVKDRSNHTVAADLDGTLLISRSAFPYYFLVALEAGSLLRALILLVSVPFVYLTYLTISETLAINVFVFITFAGLKIRDVELVVRSVLPRFYAEDVRPDTWRIFNTFGKRYIITASPRIMVEPFVKTFLGVDKVLGTELEVSKSGRATGFTRKPGILVGQYKRDVVLREFGGLASDLPDLGLGDSKTDHDFMSICKEGYMVPRTKCEPLPRNKLLSPIIFHEGRLVQRPTPLVALLTFLWLPVGFVLSIIRVYTNIPLPERIARYNYKLTGIKLVVNGHPPPPPKPGQPGHLLVCNHRTVLDPVVTAVALGRKISCVTYSISKFSELISPIKAVALTRQREKDAANIKRLLEEGDLVICPEGTTCREPFLLRFSALFAELTDRIVPVAINTKQSMFNGTTTRGYKLLDPYFAFMNPRPTYEITFLKQIPAELTCKGGKSPIEVANYIQRVLGGTLGFECTNFTRKDKYAMLAGTDGRVPVKKEKT

SEQ ID NO: 42772 - protein, 501 aa, Arabidopsis thaliana [sequence omitted]

SEQ ID NO: 42773 - protein, 366 aa, Arabidopsis thaliana
  peptide (1)..(366): Ceres Seq. ID no. 12489093
MVEPFVKTFLGVDKVLGTELEVSKSGRATGFTRKPGILVGQYKRDVVLREFGGLASDLPDLGLGDSKTDHDFMSICKEGYMVPRTKCEPLPRNKLLSPIIFHEGRLVQRPTPLVALLTFLWLPVGFVLSIIRVYTNIPLPERIARYNYKLTGIKLVVNGHPPPPPKPGQPGHLLVCNHRTVLDPVVTAVALGRKISCVTYSISKFSELISPIKAVALTRQREKDAANIKRLLEEGDLVICPEGTTCREPFLLRFSALFAELTDRIVPVAINTKQSMFNGTTTRGYKLLDPYFAFMNPRPTYEITFLKQIPAELTCKGGKSPIEVANYIQRVLGGTLGFECTNFTRKDKYAMLAGTDGRVPVKKEKT

SEQ ID NO: 42774 - DNA, 1368 bp, Arabidopsis thaliana; identical to SEQ ID NO: 39317
  misc_feature (1)..(1368): Ceres Seq. ID no. 12558338
  misc_feature (1)..(1368): Ortholog of  Ceres SEQ ID NO 15224520 as cited in SEQ ID NO 58188
  misc_feature (1)..(1368): Ortholog of  Ceres SEQ ID NO 12777206 as cited in SEQ ID NO 60246

SEQ ID NO: 42775 - protein, 321 aa, Arabidopsis thaliana; identical to SEQ ID NO: 39318
  peptide (1)..(321): Ceres Seq. ID no. 12558339

SEQ ID NO: 42776 - protein, 182 aa, Arabidopsis thaliana; identical to SEQ ID NO: 39319
  peptide (1)..(182): Ceres Seq. ID no. 12558340

SEQ ID NO: 42777 - protein, 169 aa, Arabidopsis thaliana; identical to SEQ ID NO: 39320
  peptide (1)..(169): Ceres Seq. ID no. 12558341

SEQ ID NO: 42778 - DNA, 1356 bp, Arabidopsis thaliana
  misc_feature (1)..(1356): Ceres Seq. ID no. 12339492
  misc_feature (1)..(1356): Ortholog of  Ceres SEQ ID NO 13595861 as cited in SEQ ID NO 58153
  misc_feature (1)..(1356): Ortholog of  Ceres SEQ ID NO 13584292 as cited in SEQ ID NO 63687
aactttcaatctcagctaatatcaagtaacgtggaaaggatttgttccgtcaaaggttggtgattatacagagactgagttcctgataagttggattgagcttgttttcaattgcggatctttgagaaaaaagtttgcaactttatggctctggaacaacaacatgtttgtgaaaagcggcttcaagccaagaccttttctacccaagagtttcagttgactctcaattgggatgatttaacttgtcccatttgtttggatttccctcacaatggtgtgcttctccagtgttcttcttacggaaacggttgccgtgcttttgtctgcaatactgatcaccttcactctaactgtttggatcgtttcattagcgcctgtggtactgaatcacctcctgctcctgatgagcctcgctctaaggttttagaagagagttgcaaacctgtgtgtccactgtgtagaggagaagttactggctggcttgttgtagaagaagctcgtcttcgtcttgatgagaaaaaacgttgctgtgaggaagaacgatgcaggtttatgggtacttacttggagcttcgcaaacatgctcagtcagagcatccggattctcgtccttcagaaattgatccagcacggaagcttgactgggagaatttccagcagtcgtctgaaataatcgacgtgttgagcacaattcactcagaagttccaagaggagtggttttaggggactatgtgatcgaatatggagatgatgacacaggagatgaatttgaggatgttcccaacaatgaaggaaactggtggacatcttgtattctctatcaaatgtttgacaatataaggaatgccaggaatcgaagaagatcaagaatgagtgagagtaggagagggagtcgccgctctagctatgagaattccaactctgatgacagctcagtagcatccatagagtttccggagtatagagtagatgagatcgatgacgagttcatcagcacaagtggagctaacagaagtagctctatgcaccaaagttcaagaaggcgtcgaacccgcttctatgaaaattagtcagctggaaaatgaagcgaagcaaatgatgcagaccagcctatttgtagccagtgttcttggttttggacctctttcttctttttgtttttgtttctacacataaattttattttaggtttgtcttgtgacattactcgcagcagtcgcagcctttgtacaaaaactaaacaaaaagcctttttgggatattgtagtacccttttgtcgttgtctcttctttgttttacatgcatctctggacaatgtagatattgagagtaaatcagaagtcaacgttcgtgt

SEQ ID NO: 42779 - protein, 308 aa, Arabidopsis thaliana
  peptide (1)..(308): Ceres Seq. ID no. 12339493
MALEQQHVCEKRLQAKTFSTQEFQLTLNWDDLTCPICLDFPHNGVLLQCSSYGNGCRAFVCNTDHLHSNCLDRFISACGTESPPAPDEPRSKVLEESCKPVCPLCRGEVTGWLVVEEARLRLDEKKRCCEEERCRFMGTYLELRKHAQSEHPDSRPSEIDPARKLDWENFQQSSEIIDVLSTIHSEVPRGVVLGDYVIEYGDDDTGDEFEDVPNNEGNWWTSCILYQMFDNIRNARNRRRSRMSESRRGSRRSSYENSNSDDSSVASIEFPEYRVDEIDDEFISTSGANRSSSMHQSSRRRRTRFYEN

SEQ ID NO: 42780 - protein, 172 aa, Arabidopsis thaliana
  peptide (1)..(172): Ceres Seq. ID no. 12339495
MGTYLELRKHAQSEHPDSRPSEIDPARKLDWENFQQSSEIIDVLSTIHSEVPRGVVLGDYVIEYGDDDTGDEFEDVPNNEGNWWTSCILYQMFDNIRNARNRRRSRMSESRRGSRRSSYENSNSDDSSVASIEFPEYRVDEIDDEFISTSGANRSSSMHQSSRRRRTRFYEN

SEQ ID NO: 42781 - DNA, 1258 bp, Arabidopsis thaliana
  misc_feature (1)..(1258): Ceres Seq. ID no. 13645975
  misc_feature (1)..(1258): Ortholog of  Ceres SEQ ID NO 13582332 as cited in SEQ ID NO 59890
  misc_feature (1)..(1258): Ortholog of  Ceres SEQ ID NO 13598278 as cited in SEQ ID NO 68456
gaaatatcatcaaaaaggccaaaacagaggacaacaaaaacagcaagcagcaagaagaagatgaagaatggtttgataatcataaactgtattatcctcactataggaacatgtggaggtcctttgttaactcgtctctacttcaccaatggcggaaaacgaatctggttcatgagcttcctatcaaccgctggttttccaatcatcctcatccctctcttggtctccttcctcagccgtcgccgcagcaaccgcaaccctaacaacgcggaaaacaagcggaaaacaaagctcttcctcatggaaactcctctgtttatcgcctccattgtcatagggttgctcacaggacttgacaactacttatattcttacggattagcatatctgccagtttcaacttcatcgctcataatcggaactcaactagctttcaacgctctcttcgctttcttgttagtcaagcaaaagttcactccgttctccataaacgccgtcgttttgttgacggttggtatcgggatccttgcgttacacagtgatggagacaaaccggctaaggagagcaagaaagagtatgtggttgggttcttgatgactgtggttgcagctcttctctatgcttttatattaccgctcgttgagctaacttacaagaaagctcgtcaagaaatcactttcccacttgtgcttgagattcagatggtcatgtgccttgctgctacttttttctgtgtcattggcatgttcatcgttggagattttaaggtgatagcaagagaagcaagagagttcaagattggaggatcagtgttttactatgcattgatagtgatcacaggaataatatggcaaggtttcttcttaggagccatagggattgtgttttgtgcatcatcactagcttctggtgttctgataagtgttctgcttccggtgactgaagttttcgccgtcgtttgtttccgggagaagtttcaggcagagaaaggtgtctctctacttctttctctttggggatttgtctcttacttctacggcgagtttaaatccggcaagaaagttgttgataaacctcaaccgccggagacagaactgcctattcttcctgttagtgattatgttgcttaatttctataactctataggattataacagagcattactgttatgttttgttcctaatattatgtgtgattgtgtgttttgttattgttcttgtgtataagtatgaataaatttgaaagatattgagct

SEQ ID NO: 42782 - protein, 376 aa, Arabidopsis thaliana
  peptide (1)..(376): Ceres Seq. ID no. 13645976
EISSKRPKQRTTKTASSKKKMKNGLIIINCIILTIGTCGGPLLTRLYFTNGGKRIWFMSFLSTAGFPIILIPLLVSFLSRRRSNRNPNNAENKRKTKLFLMETPLFIASIVIGLLTGLDNYLYSYGLAYLPVSTSSLIIGTQLAFNALFAFLLVKQKFTPFSINAVVLLTVGIGILALHSDGDKPAKESKKEYVVGFLMTVVAALLYAFILPLVELTYKKARQEITFPLVLEIQMVMCLAATFFCVIGMFIVGDFKVIAREAREFKIGGSVFYYALIVITGIIWQGFFLGAIGIVFCASSLASGVLISVLLPVTEVFAVVCFREKFQAEKGVSLLLSLWGFVSYFYGEFKSGKKVVDKPQPPETELPILPVSDYVA

SEQ ID NO: 42783 - protein, 356 aa, Arabidopsis thaliana
  peptide (1)..(356): Ceres Seq. ID no. 13645977
MKNGLIIINCIILTIGTCGGPLLTRLYFTNGGKRIWFMSFLSTAGFPIILIPLLVSFLSRRRSNRNPNNAENKRKTKLFLMETPLFIASIVIGLLTGLDNYLYSYGLAYLPVSTSSLIIGTQLAFNALFAFLLVKQKFTPFSINAVVLLTVGIGILALHSDGDKPAKESKKEYVVGFLMTVVAALLYAFILPLVELTYKKARQEITFPLVLEIQMVMCLAATFFCVIGMFIVGDFKVIAREAREFKIGGSVFYYALIVITGIIWQGFFLGAIGIVFCASSLASGVLISVLLPVTEVFAVVCFREKFQAEKGVSLLLSLWGFVSYFYGEFKSGKKVVDKPQPPETELPILPVSDYVA

SEQ ID NO: 42784 - protein, 319 aa, Arabidopsis thaliana
  peptide (1)..(319): Ceres Seq. ID no. 13645978
MSFLSTAGFPIILIPLLVSFLSRRRSNRNPNNAENKRKTKLFLMETPLFIASIVIGLLTGLDNYLYSYGLAYLPVSTSSLIIGTQLAFNALFAFLLVKQKFTPFSINAVVLLTVGIGILALHSDGDKPAKESKKEYVVGFLMTVVAALLYAFILPLVELTYKKARQEITFPLVLEIQMVMCLAATFFCVIGMFIVGDFKVIAREAREFKIGGSVFYYALIVITGIIWQGFFLGAIGIVFCASSLASGVLISVLLPVTEVFAVVCFREKFQAEKGVSLLLSLWGFVSYFYGEFKSGKKVVDKPQPPETELPILPVSDYVA

SEQ ID NO: 42785 - DNA, 1307 bp, Arabidopsis thaliana
  misc_feature (1)..(1307): Ceres Seq. ID no. 13497235
  misc_feature (1)..(1307): Ortholog of  Ceres SEQ ID NO 13648081 as cited in SEQ ID NO 165
  misc_feature (1)..(1307): Ortholog of  Ceres SEQ ID NO 15224803 as cited in SEQ ID NO 56572
  misc_feature (1)..(1307): Ortholog of  Ceres SEQ ID NO 13502952 as cited in SEQ ID NO 62271
  misc_feature (1)..(1307): Ortholog of  Ceres SEQ ID NO 13502973 as cited in SEQ ID NO 68052
  misc_feature (1)..(1307): Ortholog of  Ceres SEQ ID NO 13596000 as cited in SEQ ID NO 68188
gaagaagaagaatccaaagacatgaaacttttctttattgttctcatctcttttctttccctcctccaagcatcaaaaggattcgatttcgacgaaaaagaattagaaaccgaagagaacgtatggaagctctatgagaggtggagaggccaccactctgtatccagagcctcccacgaggcaataaagcggttcaacgtttttagacacaatgtccttcatgtccacaggactaacaaaaagaacaagccttacaaactcaagatcaatagattcgccgacataacgcaccacgagtttagaagctcctacgctggctctaatgttaagcatcaccgaatgcttcgtggaccgaagcgcggatctggtggtttcatgtatgagaatgtgaccagagttccgagttctgttgattggcgagagaaaggagctgtcactgaggtcaagaatcaacaagattgtggaagttgctgggcgttttcgacggttgcagcagtggaagggataaacaagatcagaacaaacaaactggtttcattgtctgaacaagagcttgtggattgtgacactgaagagaatcaaggttgtgcaggaggtctcatggaacctgcgtttgaatttataaagaacaatggtggcatcaaaaccgaagagacttatccttacgattccagtgacgttcaattctgtagagctaatagtattggtggagaaactgtaaccatcgatggacacgaacacgtccctgagaatgatgaggaagaacttctcaaagctgttgctcaccagcctgtctctgtagctattgatgctgggagctcagatttccagctttactctgagggtgtgtttatcggagaatgcgggactcagttgaaccacggggtggtgattgttgggtatggagagaccaaaaatggaacaaaatattggatagtaaggaactcatggggacctgaatggggagaaggaggctatgttcggatagaaagaggaatatcggagaatgaaggacgttgcggtatagccatggaggcttcttatcccaccaagctctcttcgactccttctactcatgagtcagtagttcgtgatgatgttaaagacgagctctagagactttaagtcattgaaaactgaatttcgaaccattcttctagtgagcttacactgagtttattattttatggattgaggttcatgggtttcagtttacacatttatcgtgtattcatcttaaattgagacgatttttatctccttgtaatattggccagcatttgctttgcggaaaaatggcgttaaat

SEQ ID NO: 42786 - protein, 371 aa, Arabidopsis thaliana
  peptide (1)..(371): Ceres Seq. ID no. 13497236
EEEESKDMKLFFIVLISFLSLLQASKGFDFDEKELETEENVWKLYERWRGHHSVSRASHEAIKRFNVFRHNVLHVHRTNKKNKPYKLKINRFADITHHEFRSSYAGSNVKHHRMLRGPKRGSGGFMYENVTRVPSSVDWREKGAVTEVKNQQDCGSCWAFSTVAAVEGINKIRTNKLVSLSEQELVDCDTEENQGCAGGLMEPAFEFIKNNGGIKTEETYPYDSSDVQFCRANSIGGETVTIDGHEHVPENDEEELLKAVAHQPVSVAIDAGSSDFQLYSEGVFIGECGTQLNHGVVIVGYGETKNGTKYWIVRNSWGPEWGEGGYVRIERGISENEGRCGIAMEASYPTKLSSTPSTHESVVRDDVKDEL

SEQ ID NO: 42787 - protein, 364 aa, Arabidopsis thaliana
  peptide (1)..(364): Ceres Seq. ID no. 13497237
MKLFFIVLISFLSLLQASKGFDFDEKELETEENVWKLYERWRGHHSVSRASHEAIKRFNVFRHNVLHVHRTNKKNKPYKLKINRFADITHHEFRSSYAGSNVKHHRMLRGPKRGSGGFMYENVTRVPSSVDWREKGAVTEVKNQQDCGSCWAFSTVAAVEGINKIRTNKLVSLSEQELVDCDTEENQGCAGGLMEPAFEFIKNNGGIKTEETYPYDSSDVQFCRANSIGGETVTIDGHEHVPENDEEELLKAVAHQPVSVAIDAGSSDFQLYSEGVFIGECGTQLNHGVVIVGYGETKNGTKYWIVRNSWGPEWGEGGYVRIERGISENEGRCGIAMEASYPTKLSSTPSTHESVVRDDVKDEL

SEQ ID NO: 42788 - protein, 258 aa, Arabidopsis thaliana
  peptide (1)..(258): Ceres Seq. ID no. 13497238
MLRGPKRGSGGFMYENVTRVPSSVDWREKGAVTEVKNQQDCGSCWAFSTVAAVEGINKIRTNKLVSLSEQELVDCDTEENQGCAGGLMEPAFEFIKNNGGIKTEETYPYDSSDVQFCRANSIGGETVTIDGHEHVPENDEEELLKAVAHQPVSVAIDAGSSDFQLYSEGVFIGECGTQLNHGVVIVGYGETKNGTKYWIVRNSWGPEWGEGGYVRIERGISENEGRCGIAMEASYPTKLSSTPSTHESVVRDDVKDEL

SEQ ID NO: 42789 - DNA, 1276 bp, Arabidopsis thaliana
  misc_feature (1)..(1276): Ceres Seq. ID no. 12603046
  misc_feature (1)..(1276): Ortholog of  Ceres SEQ ID NO 15177718 as cited in SEQ ID NO 0
aatttaagataaagaagagaagaatcaagcaaaagttgtgtttctcataaagatctcaaagatattcctactacacatgggttctcttgacttgccttacgcttcatcgttcaagggaggaagtgaaacctttctccagaatgtatttgaaagtatactgaaaacgtatttgaggaagaacccgatggcgaagacgatatgggaactagttaagtcggtggacaacgaaaagatctcttacgaccacttctttttcaggacatttaaggtcgatggttatggaattgattccctggcgagttttttcatggattatggatataaagttggaggcagacttgattttccaaagaagaaagtacaagttctctggctttctcctccggatgttcacttccccgataatggttacggtattggcaatggccctttgccaagacttgttatagctgagcttcttgtggaggaactaagccctgagtcacaggagataataaggaagtatttgaaaccggaaggtggtaagcaagctgttctttcaagtactttggggtctttaatttgggagaagccaacatcaaccgatttcaatcaacttgccaaagaaagcgaatttgccgcatggacgcttgtctacggctacacaatgaaccatcttgctttcgcggttcatcgtcttaaacacagtttcagcgacatcaaatgcgtcaaagagtattttgaagaaaagggtttcgaactcaacaaggatggaggagttctcaaagtgagtcaagacggtctactgttacaagtgtcggctatgtcggagaaacttgtggttgaatttgcagacggagtaactcaaatcgtcccggcttcatacattgagttcgttgaacgtctagttcttccacagttcaaagatatgccgtgtgatgagatcaaagagtttcatagacgcgagggcttggagcaagctagcgcctaccacataatggaaagcacccgtttcacagcgtaaatatagaaccagcttgttttgttccgctcaatatgtcaagtatgtgtacgtactattaaaatgttttgtatcttatttggacaatttgtgtgtgagatatttctgttcttgtgttgtgaagtgacggtataacttaatattacccgttaccgacgaataatggaaaacaaagtgtcatggtggggtgtggtatttgtggtgtttttgcatgtaatatcttttgatagtaacgtgacacttgattttggtgactcgtaacacctcttggggttg

SEQ ID NO: 42790 - protein, 308 aa, Arabidopsis thaliana
  peptide (1)..(308): Ceres Seq. ID no. 12603047
MGSLDLPYASSFKGGSETFLQNVFESILKTYLRKNPMAKTIWELVKSVDNEKISYDHFFFRTFKVDGYGIDSLASFFMDYGYKVGGRLDFPKKKVQVLWLSPPDVHFPDNGYGIGNGPLPRLVIAELLVEELSPESQEIIRKYLKPEGGKQAVLSSTLGSLIWEKPTSTDFNQLAKESEFAAWTLVYGYTMNHLAFAVHRLKHSFSDIKCVKEYFEEKGFELNKDGGVLKVSQDGLLLQVSAMSEKLVVEFADGVTQIVPASYIEFVERLVLPQFKDMPCDEIKEFHRREGLEQASAYHIMESTRFTA

SEQ ID NO: 42791 - protein, 272 aa, Arabidopsis thaliana
  peptide (1)..(272): Ceres Seq. ID no. 12603048
MAKTIWELVKSVDNEKISYDHFFFRTFKVDGYGIDSLASFFMDYGYKVGGRLDFPKKKVQVLWLSPPDVHFPDNGYGIGNGPLPRLVIAELLVEELSPESQEIIRKYLKPEGGKQAVLSSTLGSLIWEKPTSTDFNQLAKESEFAAWTLVYGYTMNHLAFAVHRLKHSFSDIKCVKEYFEEKGFELNKDGGVLKVSQDGLLLQVSAMSEKLVVEFADGVTQIVPASYIEFVERLVLPQFKDMPCDEIKEFHRREGLEQASAYHIMESTRFTA

SEQ ID NO: 42792 - protein, 231 aa, Arabidopsis thaliana
  peptide (1)..(231): Ceres Seq. ID no. 12603049
MDYGYKVGGRLDFPKKKVQVLWLSPPDVHFPDNGYGIGNGPLPRLVIAELLVEELSPESQEIIRKYLKPEGGKQAVLSSTLGSLIWEKPTSTDFNQLAKESEFAAWTLVYGYTMNHLAFAVHRLKHSFSDIKCVKEYFEEKGFELNKDGGVLKVSQDGLLLQVSAMSEKLVVEFADGVTQIVPASYIEFVERLVLPQFKDMPCDEIKEFHRREGLEQASAYHIMESTRFTA

SEQ ID NO: 42793 - DNA, 1300 bp, Arabidopsis thaliana
  misc_feature (1)..(1300): Ceres Seq. ID no. 12604792
  misc_feature (1)..(1300): Ortholog of  Ceres SEQ ID NO 13598527 as cited in SEQ ID NO 64914
gggctgctccgtttggcctttagaaatcctaagggacaatttttaatgtgtatttatacaaatgagataaccatttatggtaatatatcatcgcaaagtagtctttacgtacgtaagagcaaagcgtttctatcatttccttaatattgaaatggtgacagacttcaaatccctactaccagttatcgacatcagtcctttactggccaaatgtgatgatttcgacatggctgaggatgcgggggttgtggaagtagtcggaaaactggacagggcatgtcgggacgtcggattcttctacgtgattggtcatggaatatcggatgatcttataaataaggtgaaagagatgacgcatcagttcttcgagcttccttacgaggagaaacttaagatcaagattactccaactgctggatacagaggataccaaagaattggagtaaattttacgagtgggaaacaagatatgcacgaagccattgattgttacagagagttcaagcaagggaaacatggggacatcggaaaggtcttggaagggccaaaccagtggccaggaaatcctcaagagtacaaagatttaatggaggagtatattaagctgtgcacagatctttctagaaatatcttaaggggaatctcattagcccttggtggatcaccttatgagtttgagggaaagatgcttagagaccctttttgggtaatgcgtttcattggttatccaggtgtaaaccaagaaaatgttattggatgtggagctcacactgactatggcttgttgacgcttataaatcaagatgatgataaaactgctcttcaggtgaaaaacgtggacggtgattggataccagctattccgatccctggatcatttatctgcaacatcggtgacatgttaacgatactatcaaacggagtttaccaatccacactacataaagtaatcaataactctcctaaataccgtgtatgtgttgcatttttctacgagactaacttcgaggcggaggtagagccacttgatatctttaaagagaagcatccacgaaaagaaacatctcaagttgccaaaagagtcgtctatggacagcatctgattaacaaagtcctgacaacctttgcaaatttagtggaaaacagttaatatggttgatgggctttggatggtaattgttttacctaagcatggatttcgagttttagtaaaataaaagaagttctaggcgacaataaaaataaatgaagaagaaattgtaatttggtttctaatattaataaaactacaggtttgttt

SEQ ID NO: 42794 - protein, 357 aa, Arabidopsis thaliana
  peptide (1)..(357): Ceres Seq. ID no. 12604793
MVIYHRKVVFTYVRAKRFYHFLNIEMVTDFKSLLPVIDISPLLAKCDDFDMAEDAGVVEVVGKLDRACRDVGFFYVIGHGISDDLINKVKEMTHQFFELPYEEKLKIKITPTAGYRGYQRIGVNFTSGKQDMHEAIDCYREFKQGKHGDIGKVLEGPNQWPGNPQEYKDLMEEYIKLCTDLSRNILRGISLALGGSPYEFEGKMLRDPFWVMRFIGYPGVNQENVIGCGAHTDYGLLTLINQDDDKTALQVKNVDGDWIPAIPIPGSFICNIGDMLTILSNGVYQSTLHKVINNSPKYRVCVAFFYETNFEAEVEPLDIFKEKHPRKETSQVAKRVVYGQHLINKVLTTFANLVENS

SEQ ID NO: 42795 - protein, 332 aa, Arabidopsis thaliana
  peptide (1)..(332): Ceres Seq. ID no. 12604794
MVTDFKSLLPVIDISPLLAKCDDFDMAEDAGVVEVVGKLDRACRDVGFFYVIGHGISDDLINKVKEMTHQFFELPYEEKLKIKITPTAGYRGYQRIGVNFTSGKQDMHEAIDCYREFKQGKHGDIGKVLEGPNQWPGNPQEYKDLMEEYIKLCTDLSRNILRGISLALGGSPYEFEGKMLRDPFWVMRFIGYPGVNQENVIGCGAHTDYGLLTLINQDDDKTALQVKNVDGDWIPAIPIPGSFICNIGDMLTILSNGVYQSTLHKVINNSPKYRVCVAFFYETNFEAEVEPLDIFKEKHPRKETSQVAKRVVYGQHLINKVLTTFANLVENS

SEQ ID NO: 42796 - protein, 307 aa, Arabidopsis thaliana
  peptide (1)..(307): Ceres Seq. ID no. 12604795
MAEDAGVVEVVGKLDRACRDVGFFYVIGHGISDDLINKVKEMTHQFFELPYEEKLKIKITPTAGYRGYQRIGVNFTSGKQDMHEAIDCYREFKQGKHGDIGKVLEGPNQWPGNPQEYKDLMEEYIKLCTDLSRNILRGISLALGGSPYEFEGKMLRDPFWVMRFIGYPGVNQENVIGCGAHTDYGLLTLINQDDDKTALQVKNVDGDWIPAIPIPGSFICNIGDMLTILSNGVYQSTLHKVINNSPKYRVCVAFFYETNFEAEVEPLDIFKEKHPRKETSQVAKRVVYGQHLINKVLTTFANLVENS

SEQ ID NO: 42797 - DNA, 1251 bp, Arabidopsis thaliana
  misc_feature (1)..(1251): Ceres Seq. ID no. 12338485
  misc_feature (1)..(1251): Ortholog of  Ceres SEQ ID NO 13598741 as cited in SEQ ID NO 62749
  misc_feature (1)..(1251): Ortholog of  Ceres SEQ ID NO 12587535 as cited in SEQ ID NO 64020
  misc_feature (1)..(1251): Ortholog of  Ceres SEQ ID NO 15176854 as cited in SEQ ID NO 64525
  misc_feature (1)..(1251): Ortholog of  Ceres SEQ ID NO 12586366 as cited in SEQ ID NO 68983
  misc_feature (1)..(1251): Ortholog of  Ceres SEQ ID NO 15178891 as cited in SEQ ID NO 0
aattacattttacactcatctcgttctctcttccgtcaatatggaaggcgtcaccgtcgtgtctttcttccttcttttcatcgccaccgccatggccgccaagtccaccgtctccttccgtgacggcatgttaccaaacggagacttcgagctaggaccaaaaccatcagacatgaaaggaacagaaatactaaacaaactagcaataccaaactgggaagtcacaggattcgtcgaatacattaaatcaggacataaacaaggagacatgcttctcgttgttcccgccggtaaattcgcttgctgctagaacttgtgcacaagacgagagacttaacatatctgtagcacctgactccggtgtgattccgattcagacggtttatagtagtagtggttgggatttatatgcttgggcgtttcaagctgagagtgatgttgctgaagttgtgattcataatcctggtgttgaggaagatccagcttgtggtccacttattgatggtgttgctatgagatctctttaccctcctagaccaactaataagaacattttgaaaaacggaggatttgaagaaggtccattagtattacccggctcgacaactggagttttgatcccaccgtttatagaagacgaccactctcctttacctggatggatggtggagtctctcaaagctgtcaagtacgtagacgttgaacatttctcagtcccacagggtcgcagagctattgagcttgtagcgggtaaagagagtgccatcgctcaagtggttcggactgtcattgggaagacttacgtgctgtcttttgcggttggagacgccaacaatgcttgcaaaggatcaatggtggttgaggcttttgcaggaaaagatacacttaaggtcccttacgagtcgaaaggcacaggagggtttaaacgagtttctattcgatttgtggcggtttcgacccgatcaagaattatgttctacagcactttctatgccatgaggagcgatgatttctcgtcattgtgtgggcctgtgatcgatgatgtcaagcttataagcgttcgtaaaccatagatgaatcaccaatcctattacaagaaaatgcatcgtgtggtcttcttttattttccttaaactgtctttggtgtgtgttggattttattgaaacgagaaggtgaaaaaaacatagttttatttacgaggttagggttttatataggcaaataggcctttgcttatattgtattttcct

SEQ ID NO: 42798 - protein, 186 aa, Arabidopsis thaliana
  peptide (1)..(186): Ceres Seq. ID no. 12338486
MRSLYPPRPTNKNILKNGGFEEGPLVLPGSTTGVLIPPFIEDDHSPLPGWMVESLKAVKYVDVEHFSVPQGRRAIELVAGKESAIAQVVRTVIGKTYVLSFAVGDANNACKGSMVVEAFAGKDTLKVPYESKGTGGFKRVSIRFVAVSTRSRIMFYSTFYAMRSDDFSSLCGPVIDDVKLISVRKP

SEQ ID NO: 42799 - protein, 136 aa, Arabidopsis thaliana
  peptide (1)..(136): Ceres Seq. ID no. 12338488
MVESLKAVKYVDVEHFSVPQGRRAIELVAGKESAIAQVVRTVIGKTYVLSFAVGDANNACKGSMVVEAFAGKDTLKVPYESKGTGGFKRVSIRFVAVSTRSRIMFYSTFYAMRSDDFSSLCGPVIDDVKLISVRKP

SEQ ID NO: 42800 - protein, 102 aa, Arabidopsis thaliana
  peptide (1)..(102): Ceres Seq. ID no. 12338489
ITFYTHLVLSSVNMEGVTVVSFFLLFIATAMAAKSTVSFRDGMLPNGDFELGPKPSDMKGTEILNKLAIPNWEVTGFVEYIKSGHKQGDMLLVVPAGKFACC

SEQ ID NO: 42801 - DNA, 1099 bp, Arabidopsis thaliana
  misc_feature (1)..(1099): Ceres Seq. ID no. 12330378
  misc_feature (1)..(1099): Ortholog of  Ceres SEQ ID NO 14304457 as cited in SEQ ID NO 53555
cttacaatggctgcatcgttagcctctctttcctccttagctaaagccggagcaccacggtcactgttcaaccgccatggcagccaccgccttcctcctccacaaatcatacctcttgcttcctctatcaagaaacatatcacgacgagcttctataggagaggaagttctctgaagaacatttatgccctcgagacctctgacggcgccattaacgtggaggtcgatgatgatgaggaagaagaagcgtgtgagcttgttaacggaacagaagtgtccgttgacggtgttgaaggttatcttttaacggcggtgaagaacaataacggaactggattgcttctactctctgatgtctttggctttcaagattcagctacacgcgatttcgcttaccgtgtggcttgcaatggctataacgttcttgtcccggacttgtttcgtggagatccatggtcgaaaaaccgaccaaagtccgaatacgaggaatggagaagaggacatgaccctaaccgtatcagacaagacactactaccttcacaaaatggatggttgaggaatttgcagcggctggaatctccaagaagctaggagtgatggggttctgttttggcggtggacgtgtggttgacgtgttagccacggatgagagcggttactttagcaccggtgtctcgttctacagtacgagaatagactcggcggtggcgggagatgtgaaagtgccagtcttgtttattgctggagatagagacccgctttgtgaagtgaagggtttgtatgaaattgaggagaagattggtgaaggttcaaaggttgttgtgtatgaaggaagaggtcacggctttgttcaccggcccgagacacccgaagatgatcgagacgctgaggaagcgtttgctctcatgagaaattggttacatcatcatttgatttgaagccaattgtttttctctactctttgtacatccaagttaaaataaaactcggattctagtaaatatccaaataaatgttacttaataatataactaatgaagaggaatgtcgagaaaaccatataaaagttcaatctctaatcaaatcatgttttccttc

SEQ ID NO: 42802 - protein, 312 aa, Arabidopsis thaliana
  peptide (1)..(312): Ceres Seq. ID no. 12330379
LTMAASLASLSSLAKAGAPRSLFNRHGSHRLPPPQIIPLASSIKKHITTSFYRRGSSLKNIYALETSDGAINVEVDDDEEEEACELVNGTEVSVDGVEGYLLTAVKNNNGTGLLLLSDVFGFQDSATRDFAYRVACNGYNVLVPDLFRGDPWSKNRPKSEYEEWRRGHDPNRIRQDTTTFTKWMVEEFAAAGISKKLGVMGFCFGGGRVVDVLATDESGYFSTGVSFYSTRIDSAVAGDVKVPVLFIAGDRDPLCEVKGLYEIEEKIGEGSKVVVYEGRGHGFVHRPETPEDDRDAEEAFALMRNWLHHHLI

SEQ ID NO: 42803 - protein, 310 aa, Arabidopsis thaliana
  peptide (1)..(310): Ceres Seq. ID no. 12330380
MAASLASLSSLAKAGAPRSLFNRHGSHRLPPPQIIPLASSIKKHITTSFYRRGSSLKNIYALETSDGAINVEVDDDEEEEACELVNGTEVSVDGVEGYLLTAVKNNNGTGLLLLSDVFGFQDSATRDFAYRVACNGYNVLVPDLFRGDPWSKNRPKSEYEEWRRGHDPNRIRQDTTTFTKWMVEEFAAAGISKKLGVMGFCFGGGRVVDVLATDESGYFSTGVSFYSTRIDSAVAGDVKVPVLFIAGDRDPLCEVKGLYEIEEKIGEGSKVVVYEGRGHGFVHRPETPEDDRDAEEAFALMRNWLHHHLI

SEQ ID NO: 42804 - DNA, 1947 bp, Arabidopsis thaliana
  misc_feature (1)..(1947): Ceres Seq. ID no. 12562508
  misc_feature (1)..(1947): Ortholog of  Ceres SEQ ID NO 15177678 as cited in SEQ ID NO 0
tatttgggttcgtctctgttaggttcgtgagggaggggttgatttagttgttgttgttaggatttggatcgattcttttcatggaagggtgtctcttattgatacccgtacgagaagattattctttagatttggattagagctaggttttttttgtttcaataggaaatgtctgttgctgatgttgctttaagcccgattcatagaggatcggcgtttgctgttggtggtttcggacaatcgacgacgacgcattactctgttaaatcggttttggtgttccttagtgtttctggttctacgatgcctatgctcatcttggagtctgattctattgctgaggttaaacttaggatccagacttgtaatggttttagggttagaagacagaaacttgttttcagtggtcgagagcttgccaggaatgcctcacgtgtgaaggactatggtgtgactggtggtagtgtgttgcatttggtgcttaagctctatgatcctttgcttgttactgtgattactacttgcggcaaggtctttcagtttcatgtggatcgtcgtagaaatgttgggtatttgaagaaacggatctctaaagagggtaaagggtttcctgaggttgatgatcaagagatcttgtttaaaggagagaagcttgatgacaacagaatcattgatgggatttgtaaagatggaaactctgtaatccatttgctggttaagaaatcggtggaagacacggtgaaaagagaagaagacactgctactggtaaagactccttgttagagccgttgttcttaaccccgatgtgaaattacctgaggttctcgaggatatgattgaccggacggttgatgggttgaacaaaggtagtccaccagtgagatcagctgaagggacaggagggacatatctgatgcaagattcttcaggtctcaactatgtatctgtgttcaagcctatggatgaagaaccaatggctgtgaacaatcctcagcagcttcctgtgtcatcagacggtcagggattgaagagaggaactagagtaggagaaggggcaacaagagaagttgcagcttacttgttagatcatccaaagagcggactaagatctgtgtctaaagaagttatgggttttgccggtgtgccaccaactgctatggtcagaagctcacacaaagtgtataactacccaaatgggttcagcatctgtgctacaaaagatgccaaagttggttctttgcaaatgttcatgaagaacaatggaagctgcgaagacatcggccctggagcgtttcctgttgaggaagtgcacaaaatctgtgtctttgacataagaatggcaaatgcagatcgacatgctggaaacatattgaccgggaaaagcgaagaaggaaaaactcttcttattcccatcgatcatggttattgtttgcccgagaattttgaagattgcacatttgagtggctctactggccgcaagcgaaactcccgttttctgcagacaccattgactacataaactctctagactccgaacaagacattgcgcttctgcaactccatggctggaatgttcctgaagctgtctcacgcaacctacgtatctccacgatgctgctgaagaaaggcgttgagagaaacctgacgccatatcaaataggaagcgtaatgtgcagagaaacggtgaacaaagactcagcgattgaagagatagtgagagaagctcataactcggtgttgcctgcgtcaagcgaggctacgtttcttgaagcagtatctgtggccatggatcgtcgtctggacgagctaactaagtaaccagtcttaagtacataataaagtttggttttatggtatgtatatgtatatgatgtaatgtatctattatgtttgttttcgttgagaaaaacgttgataggctcttcttggataattttttccttcc

SEQ ID NO: 42805 - protein, 328 aa, Arabidopsis thaliana
  peptide (1)..(328): Ceres Seq. ID no. 12562509
MIDRTVDGLNKGSPPVRSAEGTGGTYLMQDSSGLNYVSVFKPMDEEPMAVNNPQQLPVSSDGQGLKRGTRVGEGATREVAAYLLDHPKSGLRSVSKEVMGFAGVPPTAMVRSSHKVYNYPNGFSICATKDAKVGSLQMFMKNNGSCEDIGPGAFPVEEVHKICVFDIRMANADRHAGNILTGKSEEGKTLLIPIDHGYCLPENFEDCTFEWLYWPQAKLPFSADTIDYINSLDSEQDIALLQLHGWNVPEAVSRNLRISTMLLKKGVERNLTPYQIGSVMCRETVNKDSAIEEIVREAHNSVLPASSEATFLEAVSVAMDRRLDELTK

SEQ ID NO: 42806 - protein, 301 aa, Arabidopsis thaliana
  peptide (1)..(301): Ceres Seq. ID no. 12562510
MQDSSGLNYVSVFKPMDEEPMAVNNPQQLPVSSDGQGLKRGTRVGEGATREVAAYLLDHPKSGLRSVSKEVMGFAGVPPTAMVRSSHKVYNYPNGFSICATKDAKVGSLQMFMKNNGSCEDIGPGAFPVEEVHKICVFDIRMANADRHAGNILTGKSEEGKTLLIPIDHGYCLPENFEDCTFEWLYWPQAKLPFSADTIDYINSLDSEQDIALLQLHGWNVPEAVSRNLRISTMLLKKGVERNLTPYQIGSVMCRETVNKDSAIEEIVREAHNSVLPASSEATFLEAVSVAMDRRLDELTK

SEQ ID NO: 42807 - protein, 286 aa, Arabidopsis thaliana
  peptide (1)..(286): Ceres Seq. ID no. 12562511
MDEEPMAVNNPQQLPVSSDGQGLKRGTRVGEGATREVAAYLLDHPKSGLRSVSKEVMGFAGVPPTAMVRSSHKVYNYPNGFSICATKDAKVGSLQMFMKNNGSCEDIGPGAFPVEEVHKICVFDIRMANADRHAGNILTGKSEEGKTLLIPIDHGYCLPENFEDCTFEWLYWPQAKLPFSADTIDYINSLDSEQDIALLQLHGWNVPEAVSRNLRISTMLLKKGVERNLTPYQIGSVMCRETVNKDSAIEEIVREAHNSVLPASSEATFLEAVSVAMDRRLDELTK

SEQ ID NO: 42808 - DNA, 1328 bp, Arabidopsis thaliana
  misc_feature (1)..(1328): Ceres Seq. ID no. 12370857
  misc_feature (1)..(1328): Ortholog of  Ceres SEQ ID NO 13596554 as cited in SEQ ID NO 62818
aaaaaaaccgtaaactcttgcgcgtcgtataaaacaacaaacctgaactagaatcgagagatattgttgcccccatttacatttctgcacgatcatcatcatggtgaaagagactgaatactacgagatcttaggcgtcaaaactgatgcttcagatgctgagattaaaaaggcttactacttaaaagcaaggaaagttcatccagacaagaaccctggagaccctcaagctgctaaaaactttcaggttttaggtgaggcttatcaggttctaagcaatccggataagcgagcagcttatgacaaatatggcaaagaaggggtccaacaggatgcaatggttgatcctgcagctgtatttggtatgcttttcggaagcgaagtctttgaagaatacgttggccagcttgcacttgcttatttggcatctatcgaagctgacttagaatcacatgaccctgaaatcagaaagcaaatgcttcaagacaagatcaaagctcttcaaaaggagagggaagacaagctcgccgctacattgaaaaacaaacttgaaccctttgtggaaagacaaacagatgaatttatcgaatgggcaaacgaagaggcaaagcggctttcttctgccggttttggcgaggcaatgatgcatactattggttacatttacacaagaaaagctgctaaagaaatcgggaaagacaagcgatatatgaaagtaccattcttagctgaatgggtgcgtgacaaaggccaccatatgaaatctcaagtgatggctgcttctggtgcggtttcgttacttcagctgcaggatgaagtaaacaagttgaatgaacaccaaggagagaacaaagaggaacatattcagaaagctattgaagctaaaatggatgctttgcttcaatctctttggcaaatcaatgttctcgacatcgaatccacgctatctcgtgtttgccaatctgtgcttaaagatccaagtgtttcgaaggatgttcttcgagctcgtgccataggactgaagaaacttggaacgatcttccagggtgctaagaagccgtacacgagaggaagcagcttgcgtcgggaagccaccaccgtgaaaatggacaccggaggttcttcaaaggcgacgtcttgaaactccggaacttaaaatgctgtttcttttattggttgaagttggatttgtccttcgttttttactttccccagttttgtagagattgctttctatgttaacttttttctcgtgtagatgttacatttaaggtggtgcattactgcattctcattaaaatcttttcgtcacattattcaaatttctc

SEQ ID NO: 42809 - protein, 346 aa, Arabidopsis thaliana
  peptide (1)..(346): Ceres Seq. ID no. 12370858
MVKETEYYEILGVKTDASDAEIKKAYYLKARKVHPDKNPGDPQAAKNFQVLGEAYQVLSNPDKRAAYDKYGKEGVQQDAMVDPAAVFGMLFGSEVFEEYVGQLALAYLASIEADLESHDPEIRKQMLQDKIKALQKEREDKLAATLKNKLEPFVERQTDEFIEWANEEAKRLSSAGFGEAMMHTIGYIYTRKAAKEIGKDKRYMKVPFLAEWVRDKGHHMKSQVMAASGAVSLLQLQDEVNKLNEHQGENKEEHIQKAIEAKMDALLQSLWQINVLDIESTLSRVCQSVLKDPSVSKDVLRARAIGLKKLGTIFQGAKKPYTRGSSLRREATTVKMDTGGSSKATS

SEQ ID NO: 42810 - protein, 267 aa, Arabidopsis thaliana
  peptide (1)..(267): Ceres Seq. ID no. 12370859
MVDPAAVFGMLFGSEVFEEYVGQLALAYLASIEADLESHDPEIRKQMLQDKIKALQKEREDKLAATLKNKLEPFVERQTDEFIEWANEEAKRLSSAGFGEAMMHTIGYIYTRKAAKEIGKDKRYMKVPFLAEWVRDKGHHMKSQVMAASGAVSLLQLQDEVNKLNEHQGENKEEHIQKAIEAKMDALLQSLWQINVLDIESTLSRVCQSVLKDPSVSKDVLRARAIGLKKLGTIFQGAKKPYTRGSSLRREATTVKMDTGGSSKATS

SEQ ID NO: 42811 - protein, 258 aa, Arabidopsis thaliana
  peptide (1)..(258): Ceres Seq. ID no. 12370860
MLFGSEVFEEYVGQLALAYLASIEADLESHDPEIRKQMLQDKIKALQKEREDKLAATLKNKLEPFVERQTDEFIEWANEEAKRLSSAGFGEAMMHTIGYIYTRKAAKEIGKDKRYMKVPFLAEWVRDKGHHMKSQVMAASGAVSLLQLQDEVNKLNEHQGENKEEHIQKAIEAKMDALLQSLWQINVLDIESTLSRVCQSVLKDPSVSKDVLRARAIGLKKLGTIFQGAKKPYTRGSSLRREATTVKMDTGGSSKATS

SEQ ID NO: 42812 - DNA, 1183 bp, Arabidopsis thaliana; identical to SEQ ID NO: 36985
  misc_feature (1)..(1183): Ceres Seq. ID no. 12482638
  misc_feature (1)..(1183): Ortholog of  Ceres SEQ ID NO 13659033 as cited in SEQ ID NO 66372
  misc_feature (1)..(1183): Ortholog of  Ceres SEQ ID NO 13655724 as cited in SEQ ID NO 68973
  misc_feature (1)..(1183): Ortholog of  Ceres SEQ ID NO 12625899 as cited in SEQ ID NO 69079

SEQ ID NO: 42813 - protein, 329 aa, Arabidopsis thaliana; identical to SEQ ID NO: 36986
  peptide (1)..(329): Ceres Seq. ID no. 12482639

SEQ ID NO: 42814 - protein, 291 aa, Arabidopsis thaliana; identical to SEQ ID NO: 36987
  peptide (1)..(291): Ceres Seq. ID no. 12482640

SEQ ID NO: 42815 - protein, 274 aa, Arabidopsis thaliana; identical to SEQ ID NO: 36988
  peptide (1)..(274): Ceres Seq. ID no. 12482641

SEQ ID NO: 42816 - DNA, 746 bp, Arabidopsis thaliana
  misc_feature (1)..(746): Ceres Seq. ID no. 12326520
  misc_feature (1)..(746): Ortholog of  Ceres SEQ ID NO 14301998 as cited in SEQ ID NO 52093
  misc_feature (1)..(746): Ortholog of  Ceres SEQ ID NO 12619783 as cited in SEQ ID NO 69210
atttcctacacaaaattcccactcaccacacacaacaaaagaatagtgatcgaagctcatggcgtctcttgcaaccgtcgccgctgtgaaaccatccgccgccataaaaggactcggcggcagctcactcgccggagctaagctctccatcaagccttcccgcctgagctttaaacccaaatccatccgggctaatggtgtggtggctaagtatggagacaaaagtgtctactttgacttagaagatttgggtaacacaacaggtcaatgggacgtatacggctctgatgctccttctccttacaatcctcttcaggtttcttcatctcataacctaacttcacttttctacttcaatcaaacactattctgagaagagattctcttctactttggttacttgtagagcaagttctttgagacattcgctgccccattcacaaagagaggattgctcctcaagttcttgatccttggaggaggctctttgcttacttatgtcagcgctacctctaccggcgaagttcttcccatcaagagaggtcctcaggagccgcctaagctcggtcctcgcggcaagctctgatctatattcatgttacctttctcttcttccttctaaaactcatcaacatttctcaatactgcaaacccttttaagtaattttatgtatattatgtttatctgttacatttgaaacgttttttcttcccctaattttacaaaagaaatcttttttttttcc

SEQ ID NO: 42817 - protein, 104 aa, Arabidopsis thaliana
  peptide (1)..(104): Ceres Seq. ID no. 12326521
MASLATVAAVKPSAAIKGLGGSSLAGAKLSIKPSRLSFKPKSIRANGVVAKYGDKSVYFDLEDLGNTTGQWDVYGSDAPSPYNPLQVSSSHNLTSLFYFNQTLF

SEQ ID NO: 42818 - protein, 66 aa, Arabidopsis thaliana
  peptide (1)..(66): Ceres Seq. ID no. 12326522
MSALPLPAKFFPSREVLRSRLSSVLAASSDLYSCYLSLLPSKTHQHFSILQTLLSNFMYIMFICYI

SEQ ID NO: 42819 - DNA, 1168 bp, Arabidopsis thaliana
  misc_feature (1)..(1168): Ceres Seq. ID no. 13489552
  misc_feature (1)..(1168): Ortholog of  Ceres SEQ ID NO 13596208 as cited in SEQ ID NO 68507
caacgcggaagggaaaaaaaaaaaaggcgcaattgaaagaaaaaaattgataatcggtagatttgatgtcccggcgtccggtcgttttgatcaccgtgagaaatggattcttcgaattgttgttctgagtaaaactcactcaccgtcaccggagaagaaagtgtaaatggattccgaagaaacgacgtcgtcggtaacgactacaaagaagcaaaagagggttttctcttcgttagctttgcgattccgtacagtgatagttttctcgatcattagcttcgtcgtcttgtcgtttctattaggaatcttagtgattttcatcggtgaattgtgggtttattcttcttcatctgcttctgcttctcttcattctcgctgcaaaattgtttccagctctgttgatcttaggtcttctaaagtgtgtggcattggactattgaacgtcaaagcacaacatgtgttttacccttttgagagagataaattcagatgtcgttatgattactactgggcttctgtcttcaaggtagagtataaagataacttaatgggtcaaacacggttagcgttttcagaagcaccaaatgaagctcttcctcctgagtgcagacctaactttggtgctgcattacttaccaaagataacttcaaggttaatgagacttacgattgctggtacacattagggattccaaagataaagctttatcgggatagctttttcggttgccaagcagatgatctttctttcactgacattgctaagcaatactctattgtaatctctaaacttttacagtcatggcttaatggagaatcaacaccaaagtactggaaatatgatgtgatcgctggcattgtctctggcttcgcaacttccataatcacagtcttcatcataaggatcttaagacatgcaaaatcttggttccctcaagcttgttgttcagttaagagccagttttctaaggtgaatatattggtacaagtgaaacgtgcatgtttgcttcttgtttacttctcggttctcggatggatggctacacaatacttaaaaattctttttccaaatgcttaggaaaaaacattacttgagagtcagtgagtatgtaatgattcgtagacagttgtgtgatgtaatcttaaatcatttacagaaaaagaaagc

SEQ ID NO: 42820 - protein, 303 aa, Arabidopsis thaliana
  peptide (1)..(303): Ceres Seq. ID no. 13489553
MDSEETTSSVTTTKKQKRVFSSLALRFRTVIVFSIISFVVLSFLLGILVIFIGELWVYSSSSASASLHSRCKIVSSSVDLRSSKVCGIGLLNVKAQHVFYPFERDKFRCRYDYYWASVFKVEYKDNLMGQTRLAFSEAPNEALPPECRPNFGAALLTKDNFKVNETYDCWYTLGIPKIKLYRDSFFGCQADDLSFTDIAKQYSIVISKLLQSWLNGESTPKYWKYDVIAGIVSGFATSIITVFIIRILRHAKSWFPQACCSVKSQFSKVNILVQVKRACLLLVYFSVLGWMATQYLKILFPNA

SEQ ID NO: 42821 - protein, 176 aa, Arabidopsis thaliana
  peptide (1)..(176): Ceres Seq. ID no. 13489554
MGQTRLAFSEAPNEALPPECRPNFGAALLTKDNFKVNETYDCWYTLGIPKIKLYRDSFFGCQADDLSFTDIAKQYSIVISKLLQSWLNGESTPKYWKYDVIAGIVSGFATSIITVFIIRILRHAKSWFPQACCSVKSQFSKVNILVQVKRACLLLVYFSVLGWMATQYLKILFPNA

SEQ ID NO: 42822 - DNA, 663 bp, Arabidopsis thaliana
  misc_feature (1)..(663): Ceres Seq. ID no. 12395161
  misc_feature (1)..(663): Ortholog of  Ceres SEQ ID NO 13581682 as cited in SEQ ID NO 57913
  misc_feature (1)..(663): Ortholog of  Ceres SEQ ID NO 14304144 as cited in SEQ ID NO 59152
  misc_feature (1)..(663): Ortholog of  Ceres SEQ ID NO 13662050 as cited in SEQ ID NO 61580
aatccaaaactctctctctctctctctgtctcttgtcttattatttatctctctaacggcgaggcaatgggttttccggtgggatattctgagctacttctcccaaaaatctttttctacttgttatctttcttaggtttgatacgtaaactcatctccacaatgttcaagatcattggtctaccagatttcttagaacctgaaccgacggctgacgaattgtcgacatatatttcatcggggatgtttggaccgttggatgatgggttataatcagatgacgtgtccactttgtcgtacacagtttatacctgatcatcttcaactggagtttaatcaaaggctctggtctcaatcttctgctgtttcttctcaacttcttgatgaatcatcatcttaggacgtattaaatctttgtccaaacaaaaaaagaaagacatattaaatccttttttttggtactttcattgggaattgggtttggtgtgagatcgatgtaaatattaaaaaaaaaaaaaaaaaggtagtggttacaggttaatgaaaaaagaaagaagaagaaaatttgtacttatccatccctgaaagatgaaattacattttgagttattataaagttgtaaacttttttttttttgttaaggaaaaaaaaaatcatttgct

SEQ ID NO: 42823 - protein, 90 aa, Arabidopsis thaliana
  peptide (1)..(90): Ceres Seq. ID no. 12395162
NPKLSLSLSVSCLIIYLSNGEAMGFPVGYSELLLPKIFFYLLSFLGLIRKLISTMFKIIGLPDFLEPEPTADELSTYISSGMFGPLDDGL

SEQ ID NO: 42824 - protein, 68 aa, Arabidopsis thaliana
  peptide (1)..(68): Ceres Seq. ID no. 12395163
MGFPVGYSELLLPKIFFYLLSFLGLIRKLISTMFKIIGLPDFLEPEPTADELSTYISSGMFGPLDDGL

SEQ ID NO: 42825 - protein, 46 aa, Arabidopsis thaliana
  peptide (1)..(46): Ceres Seq. ID no. 12395164
MMGYNQMTCPLCRTQFIPDHLQLEFNQRLWSQSSAVSSQLLDESSS

SEQ ID NO: 42826 - DNA, 1913 bp, Arabidopsis thaliana
  misc_feature (1)..(1913): Ceres Seq. ID no. 13592068
  misc_feature (1)..(1913): Ortholog of  Ceres SEQ ID NO 13594037 as cited in SEQ ID NO 55666
  misc_feature (1)..(1913): Ortholog of  Ceres SEQ ID NO 13657707 as cited in SEQ ID NO 66407
atggcttcttcgaaactccatcatcatcctcaccgcagaaaatccccaatacgttgcttctgtctcttaatcataaccatgtcctccattctcatccttctcttctctctcttcctcttctcctctccctcctcctcctcccgtcaccaccaccaccacaattccggcgacacttctccggtcaatccttcgtcgtctctcgccgctcagatccgtctcgcttgtaacgcaactcgttacccagaccaatgcgtctcttccctatccgaacagggtcgggttcctccggatcctaaaccaatccagatcattcactcagcgatctcattctcattccaaaacctcaaaaccgcccaatcaaaaatcaagtctattgtagactcgtccgtagggaatctaaaccgtacaaacgccgcgaacacgtgtctccagcttctcacttactccgagcaccgcactcaatcgacggatcaagctttaacacgtggcaaaatcaaagacgctcgagcttggatgagcgctgctctagtgtaccagtacgattcatggtcagcgctcaagtacgtcaacgacacgagccaagtaggtgaaacgatgtcgtttctcgacggacttatccacgtcaccagcaacgcgcttagcatgatggtatcgtacgataacttcggagacaacgtcgcgtcgtggacttacccagcaacggaacgtgacgggttttgggaaaagactgggcctggtttgggcttagatccgagtacagggcttaatttgggttttccttccggtttaaaagaagacgtgacggtgtgtaaagacggaaaatgcggttacaagacggtgcaagacgccgttaacgctgcgccggaggataacggaatgcgtaagttcgttataaagattagcgaaggagtctacgaggagaacgttattgttccgtttgagaagaagaacgttgtgtttatcggtgacggtatgggcaaaacggtcattacaggttcgttaaacgccggtatgcctgggatcactacgtacaatactgcaactgtcggagtggtaggagatggattcatggctcgtgatctaacgttccagaacacggcgggaccagacgctcaccaagcggtggcgtttagatccgacagcgatttttctctgatcgagaattgcgagttccttgggaaccaagacactctctatgcccatggtcttcgtcagttctacaaaaactgtcgtatccaaggaaatgttgactttatctttgggaattcagctgctgtcttccaagactgtgaaatcctaatcgcaccgcgtcaaattaaccctgaaaagggcgagaaaaacgcagtcactgcccaaggaaggattgacccgtcccagtccacgggtttcgtgttcttgaactgtttgattaacggaacagaggagtacatgaagctgtttaaagctaaccctaaggtgcataagaacttcttggggaggccatggaaagattactcaaggactgtgtttataggttgtaatttagaggctttgattactcctgatggatggttaccttggagcggggatttcgcgctcaagacactttattacggtgaatctaagaacacgggtccgggatcagataggtcacaaagggtttcatggagcagtcagataccggacgagcatgttcatgtgtattcggtggctaactttattcaggctgatgagtgggcttcgatgtctgcttaaatcaatctttaagactataaggggtttaggaatgttttaaaagaagaaaaccatctcattgtaatttagttgataaactgttttaaacataaaagcaaacattgcattcatgttatatcaattgagagttcatagtcttaggactaattgaagtaaaacaataaagtttcaaaacttgg

SEQ ID NO: 42827 - protein, 577 aa, Arabidopsis thaliana
  peptide (1)..(577): Ceres Seq. ID no. 13592069
MASSKLHHHPHRRKSPIRCFCLLIITMSSILILLFSLFLFSSPSSSSRHHHHHNSGDTSPVNPSSSLAAQIRLACNATRYPDQCVSSLSEQGRVPPDPKPIQIIHSAISFSFQNLKTAQSKIKSIVDSSVGNLNRTNAANTCLQLLTYSEHRTQSTDQALTRGKIKDARAWMSAALVYQYDSWSALKYVNDTSQVGETMSFLDGLIHVTSNALSMMVSYDNFGDNVASWTYPATERDGFWEKTGPGLGLDPSTGLNLGFPSGLKEDVTVCKDGKCGYKTVQDAVNAAPEDNGMRKFVIKISEGVYEENVIVPFEKKNVVFIGDGMGKTVITGSLNAGMPGITTYNTATVGVVGDGFMARDLTFQNTAGPDAHQAVAFRSDSDFSLIENCEFLGNQDTLYAHGLRQFYKNCRIQGNVDFIFGNSAAVFQDCEILIAPRQINPEKGEKNAVTAQGRIDPSQSTGFVFLNCLINGTEEYMKLFKANPKVHKNFLGRPWKDYSRTVFIGCNLEALITPDGWLPWSGDFALKTLYYGESKNTGPGSDRSQRVSWSSQIPDEHVHVYSVANFIQADEWASMSA

SEQ ID NO: 42828 - protein, 551 aa, Arabidopsis thaliana
  peptide (1)..(551): Ceres Seq. ID no. 13592070
MSSILILLFSLFLFSSPSSSSRHHHHHNSGDTSPVNPSSSLAAQIRLACNATRYPDQCVSSLSEQGRVPPDPKPIQIIHSAISFSFQNLKTAQSKIKSIVDSSVGNLNRTNAANTCLQLLTYSEHRTQSTDQALTRGKIKDARAWMSAALVYQYDSWSALKYVNDTSQVGETMSFLDGLIHVTSNALSMMVSYDNFGDNVASWTYPATERDGFWEKTGPGLGLDPSTGLNLGFPSGLKEDVTVCKDGKCGYKTVQDAVNAAPEDNGMRKFVIKISEGVYEENVIVPFEKKNVVFIGDGMGKTVITGSLNAGMPGITTYNTATVGVVGDGFMARDLTFQNTAGPDAHQAVAFRSDSDFSLIENCEFLGNQDTLYAHGLRQFYKNCRIQGNVDFIFGNSAAVFQDCEILIAPRQINPEKGEKNAVTAQGRIDPSQSTGFVFLNCLINGTEEYMKLFKANPKVHKNFLGRPWKDYSRTVFIGCNLEALITPDGWLPWSGDFALKTLYYGESKNTGPGSDRSQRVSWSSQIPDEHVHVYSVANFIQADEWASMSA

SEQ ID NO: 42829 - protein, 406 aa, Arabidopsis thaliana
  peptide (1)..(406): Ceres Seq. ID no. 13592071
MSAALVYQYDSWSALKYVNDTSQVGETMSFLDGLIHVTSNALSMMVSYDNFGDNVASWTYPATERDGFWEKTGPGLGLDPSTGLNLGFPSGLKEDVTVCKDGKCGYKTVQDAVNAAPEDNGMRKFVIKISEGVYEENVIVPFEKKNVVFIGDGMGKTVITGSLNAGMPGITTYNTATVGVVGDGFMARDLTFQNTAGPDAHQAVAFRSDSDFSLIENCEFLGNQDTLYAHGLRQFYKNCRIQGNVDFIFGNSAAVFQDCEILIAPRQINPEKGEKNAVTAQGRIDPSQSTGFVFLNCLINGTEEYMKLFKANPKVHKNFLGRPWKDYSRTVFIGCNLEALITPDGWLPWSGDFALKTLYYGESKNTGPGSDRSQRVSWSSQIPDEHVHVYSVANFIQADEWASMSA

SEQ ID NO: 42830 - DNA, 1840 bp, Arabidopsis thaliana
  misc_feature (1)..(1840): Ceres Seq. ID no. 13592995
  misc_feature (1)..(1840): Ortholog of  Ceres SEQ ID NO 13597446 as cited in SEQ ID NO 64098
  misc_feature (1)..(1840): Ortholog of  Ceres SEQ ID NO 15226246 as cited in SEQ ID NO 68314
aagcacagcaaataatatcagaacacatttttttctttttataatttaatcaattaaatcaccaaactcaattaaataaaaagaaaaaattattattatcccttcttcttcttcttcttcgtcttcgtctttgattctcctgattcatgtcgcttaaatttttagcgatcttcgaatcccattttccttcgggaatctgacattttttctcgggaaattttttacccaaatcggagtaaagtatcgaatctagagaatccgctatggatgagacctattttgatctattgaatttctttaagaatccctcttttacagagacatttgtcgacatcttactatgcgcagttccgatttggctcgccgttatgatcgggttattaatcggatggtcttggcgtccaagatggaccggtttgatctatttagggtttcgttctaagcttcggtttttatggaccgcaccgcctgggtttggtgctcgtcggctttggcttgctttcaccgctctctctgctttctccgtttgccgaaccatctggtcaaggaatgacaccagagctaataaatcggcgaccggttcagcttcgtcgcagacgcctgttgaggataatgatgaatcaggattggcctcaagaggtagcgataacgggacggtgacagaggatattgtgacagagaatgatttagagcatctgcttcagctgcttgaagttggaaatgcagctttggaatggcaatctatgatggataagactactccaaatatgagctaccaggcttggcgtcatgagcctgagacaggtcctgttatttatcgcagccggactgtgtttgaggatgcaactccagatattgttagggatttcttctgggatgatgagtttcgacctaaatgggatttcatgcttgccaacttcaaaacgttggaggaggacactcagacaggaacaatgattgttcagtggagaaaaaagtttccttttttctgtagtgaccgagagtatatcattggccggagaatatgggagtctgggaagaagtattattgtgtcacaaagggagttccttatccagctctaccaaagcgtgataagccaaggcgtgttgagctttatttctcaagttgggttatcagagcggttgaatcccgaaaaggagatggacagcaaacggcttgtgaagtttcccttgtccactacgaagacatgggcatcccaaaagacgtagcaaagttaggtgtccgtcatggcatgtggggagctgtcaagaagctaaactccggtttacgagcgtaccaatccgccagaaaatcagactcatctctatctcggatcgcccaaatggcaagaatctctacaaaactgaacatgaattctgcagaatcatcttcaagagatgaagacagaagcagagcaatggaatatgcgagacaacgggaccatttgagaatggactggaaatgggttgttgtaggaggtgtcgcattggcttgtggcctacactctgggatcattggcaaggctttactggctggagctggccagagactggctcgtaggtgagaaaccttgtattcttattatatcttcccttgacagaaaagagaaacatatgcatataactaagggaaatgtattatttttgcaactcctctgagaagggcatgtggttttggtggtgaaccatgtagagtagtagctttaaactatggagtcataagttatttgagttctatcttgtaccacaggatagtgagatatgtattttataaactatatgaatctacatagcttctaaaagcttaaattctttgcatgtgatgcacttcgtatctccc

SEQ ID NO: 42831 - protein, 433 aa, Arabidopsis thaliana
  peptide (1)..(433): Ceres Seq. ID no. 15221190
MDETYFDLLNFFKNPSFTETFVDILLCAVPIWLAVMIGLLIGWSWRPRWTGLIYLGFRSKLRFLWTAPPGFGARRLWLAFTALSAFSVCRTIWSRNDTRANKSATGSASSQTPVEDNDESGLASRGSDNGTVTEDIVTENDLEHLLQLLEVGNAALEWQSMMDKTTPNMSYQAWRHEPETGPVIYRSRTVFEDATPDIVRDFFWDDEFRPKWDFMLANFKTLEEDTQTGTMIVQWRKKFPFFCSDREYIIGRRIWESGKKYYCVTKGVPYPALPKRDKPRRVELYFSSWVIRAVESRKGDGQQTACEVSLVHYEDMGIPKDVAKLGVRHGMWGAVKKLNSGLRAYQSARKSDSSLSRIAQMARISTKLNMNSAESSSRDEDRSRAMEYARQRDHLRMDWKWVVVGGVALACGLHSGIIGKALLAGAGQRLARR

SEQ ID NO: 42832 - protein, 398 aa, Arabidopsis thaliana
  peptide (1)..(398): Ceres Seq. ID no. 15221191
MIGLLIGWSWRPRWTGLIYLGFRSKLRFLWTAPPGFGARRLWLAFTALSAFSVCRTIWSRNDTRANKSATGSASSQTPVEDNDESGLASRGSDNGTVTEDIVTENDLEHLLQLLEVGNAALEWQSMMDKTTPNMSYQAWRHEPETGPVIYRSRTVFEDATPDIVRDFFWDDEFRPKWDFMLANFKTLEEDTQTGTMIVQWRKKFPFFCSDREYIIGRRIWESGKKYYCVTKGVPYPALPKRDKPRRVELYFSSWVIRAVESRKGDGQQTACEVSLVHYEDMGIPKDVAKLGVRHGMWGAVKKLNSGLRAYQSARKSDSSLSRIAQMARISTKLNMNSAESSSRDEDRSRAMEYARQRDHLRMDWKWVVVGGVALACGLHSGIIGKALLAGAGQRLARR

SEQ ID NO: 42833 - protein, 273 aa, Arabidopsis thaliana
  peptide (1)..(273): Ceres Seq. ID no. 15221192
MMDKTTPNMSYQAWRHEPETGPVIYRSRTVFEDATPDIVRDFFWDDEFRPKWDFMLANFKTLEEDTQTGTMIVQWRKKFPFFCSDREYIIGRRIWESGKKYYCVTKGVPYPALPKRDKPRRVELYFSSWVIRAVESRKGDGQQTACEVSLVHYEDMGIPKDVAKLGVRHGMWGAVKKLNSGLRAYQSARKSDSSLSRIAQMARISTKLNMNSAESSSRDEDRSRAMEYARQRDHLRMDWKWVVVGGVALACGLHSGIIGKALLAGAGQRLARR

SEQ ID NO: 42834 - DNA, 1764 bp, Arabidopsis thaliana
  misc_feature (1)..(1764): Ceres Seq. ID no. 12579999
  misc_feature (1)..(1764): Ortholog of  Ceres SEQ ID NO 15169264 as cited in SEQ ID NO 55026
  misc_feature (1)..(1764): Ortholog of  Ceres SEQ ID NO 15224709 as cited in SEQ ID NO 68627
aatataggtgcatttaaaacataacgttccctctcttgtcttcttatttttgctctctgttctttagaactgccattaacgagagtgagagagagacacacacacacagcgagtgaaaatgtctccggagaagaagagtcaaaacttccctccaataacggaatgcagagacggagagtacgattcgatagccgccgatcttgacgggactctgcttctctcaagaagctccttcccttacttcatgctcgtcgctgttgaagctggaagccttttacgtggactaatcctccttctctcgttaccattcgtcattatctcttacctattcgtatccgaatctcttggtatccagatcctcatcttcatctcattcgctggtctcaaaatccgcgatatcgaacttgtctctcgcgcagttcttccacggttttacgcggcggatgtgaggaaagacagttttgaggtgtttgataagtgtaagaagaaagtggtagtgacggcgaatccgattgtgatggtggaggcgtttgtgaaggattatcttggaggtgataaagttttgggaacagagattgaagttaaccctaaaaccaatagagccactggatttgtgaagaagcctggtgttcttgttggtgatcttaagaggttagccattttaaaagagtttggtaacgaatcacctgatctcggcctcggtgatcgaacctctgatcatgatttcatgtctctctgcaagaaaggttacatggttcatgcgaccaagtcagccacaacgattccaaaagaacgcttaaagaaccgcatagtcttccatgatgggcgtttagcgcaacgtccaactccgttaaacgccattatcacatacctatggcttccttttggtttcatcctctccatcattcgcgtctacttcaacctccctttacctgaaagatttgtccgttacacttacgagatgctcgggatccacttaaccattcgtggtcatcgtcctccacctccttcccctggaactcttggcaacctctatgtccttaaccaccgtaccgcgcttgatcccatcatcgttgctattgctcttggacgtaagatctgttgcgtcacttacagtgtctctcgtctctcccttatgctttctcctattcctgctgttgccctcacccgtgaccgtgccaccgatgctgccaacatgagaaaacttctcgagaaaggcgacttggtgatatgtcccgaaggcacgacgtgcagagaagagtatctactgagatttagcgctctattcgcagagctaagcgaccggattgtgccagtagcgatgaactgtaaacaaggaatgttcaacgggaccacagttaggggtgtgaagttttgggacccttacttcttcttcatgaacccaagaccaagctatgaagccactttcttggatcgtttgcctgaagaaatgactgtcaacggtggtggcaagactcctatagaggtggctaattacgtccagaaagttatcggcgcggttttgggcttcgaatgcaccgaacttactcgcaaggataaatatcttttgcttggaggtaatgacggcaaggtagagtctatcaacaacaccaagaagtgaaaatccaaacaagggttttttcttgttatgtcgtatacgaattttcatgtgtgtaattgctggagctcttgtcatcattatggtacgtttttgttatgtgtaatacgacgtatatatgtttgaataaaactatgtttcggtgg

SEQ ID NO: 42835 - protein, 500 aa, Arabidopsis thaliana
  peptide (1)..(500): Ceres Seq. ID no. 12580000
MSPEKKSQNFPPITECRDGEYDSIAADLDGTLLLSRSSFPYFMLVAVEAGSLLRGLILLLSLPFVIISYLFVSESLGIQILIFISFAGLKIRDIELVSRAVLPRFYAADVRKDSFEVFDKCKKKVVVTANPIVMVEAFVKDYLGGDKVLGTEIEVNPKTNRATGFVKKPGVLVGDLKRLAILKEFGNESPDLGLGDRTSDHDFMSLCKKGYMVHATKSATTIPKERLKNRIVFHDGRLAQRPTPLNAIITYLWLPFGFILSIIRVYFNLPLPERFVRYTYEMLGIHLTIRGHRPPPPSPGTLGNLYVLNHRTALDPIIVAIALGRKICCVTYSVSRLSLMLSPIPAVALTRDRATDAANMRKLLEKGDLVICPEGTTCREEYLLRFSALFAELSDRIVPVAMNCKQGMFNGTTVRGVKFWDPYFFFMNPRPSYEATFLDRLPEEMTVNGGGKTPIEVANYVQKVIGAVLGFECTELTRKDKYLLLGGNDGKVESINNTKK

SEQ ID NO: 42836 - protein, 458 aa, Arabidopsis thaliana
  peptide (1)..(458): Ceres Seq. ID no. 12580001
MLVAVEAGSLLRGLILLLSLPFVIISYLFVSESLGIQILIFISFAGLKIRDIELVSRAVLPRFYAADVRKDSFEVFDKCKKKVVVTANPIVMVEAFVKDYLGGDKVLGTEIEVNPKTNRATGFVKKPGVLVGDLKRLAILKEFGNESPDLGLGDRTSDHDFMSLCKKGYMVHATKSATTIPKERLKNRIVFHDGRLAQRPTPLNAIITYLWLPFGFILSIIRVYFNLPLPERFVRYTYEMLGIHLTIRGHRPPPPSPGTLGNLYVLNHRTALDPIIVAIALGRKICCVTYSVSRLSLMLSPIPAVALTRDRATDAANMRKLLEKGDLVICPEGTTCREEYLLRFSALFAELSDRIVPVAMNCKQGMFNGTTVRGVKFWDPYFFFMNPRPSYEATFLDRLPEEMTVNGGGKTPIEVANYVQKVIGAVLGFECTELTRKDKYLLLGGNDGKVESINNTKK

SEQ ID NO: 42837 - protein, 367 aa, Arabidopsis thaliana; identical to SEQ ID NO: 21110
  peptide (1)..(367): Ceres Seq. ID no. 12580002

SEQ ID NO: 42838 - DNA, 854 bp, Arabidopsis thaliana; identical to SEQ ID NO: 37166
  misc_feature (1)..(854): Ceres Seq. ID no. 13509066
  misc_feature (1)..(854): Ortholog of  Ceres SEQ ID NO 12473409 as cited in SEQ ID NO 104
  misc_feature (1)..(854): Ortholog of  Ceres SEQ ID NO 15170477 as cited in SEQ ID NO 52825
  misc_feature (1)..(854): Ortholog of  Ceres SEQ ID NO 13595055 as cited in SEQ ID NO 55744
  misc_feature (1)..(854): Ortholog of  Ceres SEQ ID NO 13662009 as cited in SEQ ID NO 61951

SEQ ID NO: 42839 - protein, 179 aa, Arabidopsis thaliana; identical to SEQ ID NO: 37167
  peptide (1)..(179): Ceres Seq. ID no. 13509067

SEQ ID NO: 42840 - protein, 162 aa, Arabidopsis thaliana; identical to SEQ ID NO: 37168
  peptide (1)..(162): Ceres Seq. ID no. 13509068

SEQ ID NO: 42841 - protein, 147 aa, Arabidopsis thaliana; identical to SEQ ID NO: 37169
  peptide (1)..(147): Ceres Seq. ID no. 13509069

SEQ ID NO: 42842 - DNA, 976 bp, Arabidopsis thaliana
  misc_feature (1)..(976): Ceres Seq. ID no. 12604796
  misc_feature (1)..(976): Ortholog of  Ceres SEQ ID NO 13595414 as cited in SEQ ID NO 56539
atcaactaaactttgtattcatttccaagtatcactctaaatcatctttttcgaattcgcctcccaagatatgtcgacagagtcgtacgaagacgccattaaaagactcggagagcttctcagtaagaaatcggatctcgggaacgtggcagccgcaaagatcaagaagttaacggatgagttagaggaacttgattccaacaagttagatgccgtagaacgaatcaaatccggatttctccatttcaagactaataattatgagaagaatcctactttgtacaattcacttgccaagagccagacccccaagtttttggtgtttgcttgtgcggattcacgagttagtccatctcacatcttgaatttccaacttggggaagccttcatcgttagaaacattgcaaacatggtgccaccttatgacaagacaaagcactctaatgttggtgcggcccttgaatatccaattacagtcctcaacgtggagaacattcttgttattggacacagctgttgtggtggaataaagggactcatggccattgaagataatacagctcccactaagaccgagttcatagaaaactggatccagatctgtgcaccggccaagaacaggatcaagcaggattgtaaagacctaagctttgaagatcagtgcaccaactgtgagaaggaagccgtgaacgtgtccttggggaatcttttgtcttacccattcgtgagagaaagagtggtgaagaacaagcttgccataagaggagctcactatgatttcgtaaaaggaacgtttgatctttgggaacttgacttcaagactacccctgcctttgccttgtcttaaaagattcctcctactcaaatattttctctatgttgtttctaattatgttcttataatcttcttctgttgcttctgtaatgtcatctttgctacttctattccaatagaaatgaataaagctttaaagag

SEQ ID NO: 42843 - protein, 258 aa, Arabidopsis thaliana
  peptide (1)..(258): Ceres Seq. ID no. 12604797
MSTESYEDAIKRLGELLSKKSDLGNVAAAKIKKLTDELEELDSNKLDAVERIKSGFLHFKTNNYEKNPTLYNSLAKSQTPKFLVFACADSRVSPSHILNFQLGEAFIVRNIANMVPPYDKTKHSNVGAALEYPITVLNVENILVIGHSCCGGIKGLMAIEDNTAPTKTEFIENWIQICAPAKNRIKQDCKDLSFEDQCTNCEKEAVNVSLGNLLSYPFVRERVVKNKLAIRGAHYDFVKGTFDLWELDFKTTPAFALS

SEQ ID NO: 42844 - protein, 145 aa, Arabidopsis thaliana
  peptide (1)..(145): Ceres Seq. ID no. 12604798
MVPPYDKTKHSNVGAALEYPITVLNVENILVIGHSCCGGIKGLMAIEDNTAPTKTEFIENWIQICAPAKNRIKQDCKDLSFEDQCTNCEKEAVNVSLGNLLSYPFVRERVVKNKLAIRGAHYDFVKGTFDLWELDFKTTPAFALS

SEQ ID NO: 42845 - DNA, 1203 bp, Arabidopsis thaliana
  misc_feature (1)..(1203): Ceres Seq. ID no. 12394530
  misc_feature (1)..(1203): Ortholog of  Ceres SEQ ID NO 13581579 as cited in SEQ ID NO 58361
  misc_feature (1)..(1203): Ortholog of  Ceres SEQ ID NO 13596969 as cited in SEQ ID NO 63375
  misc_feature (1)..(1203): Ortholog of  Ceres SEQ ID NO 13597519 as cited in SEQ ID NO 64759
  misc_feature (1)..(1203): Ortholog of  Ceres SEQ ID NO 13597870 as cited in SEQ ID NO 64982
  misc_feature (1)..(1203): Ortholog of  Ceres SEQ ID NO 13595926 as cited in SEQ ID NO 67778
  misc_feature (1)..(1203): Ortholog of  Ceres SEQ ID NO 12567001 as cited in SEQ ID NO 0
aatttaaatttctctttctatctactataaaaagtgactctctaagaactccaaagattagaacattgaattgaattagccatggagaagaatacttctcaaaccatcttctccaacttttttcttctccttctcctttcttcatgtgtctctgctcagctccggacaggtttctaccagaactcatgtccgaacgtggaaaccattgtacgtaacgctgtccgtcagaaattccagcagactttcgttaccgctccggccactcttcgcctcttcttccacgattgcttcgttcgtggatgtgatgcgtcaataatgatagcatcaccatcggagagagaccatccagatgacatgtcattggccggagacggattcgacacggtggtgaaggcgaagcaagccgttgatagcaatcccaattgccgcaacaaagtctcatgtgctgacattttggctctcgccactcgtgaagtcgtcgttttgaccggaggaccaagctacccggtggagctagggaggagagatggcagaatctccacgaaggccagcgttcaaagccaattgcctcagcccgagtttaacctaaaccagctcaacggcatgtttagccgtcacggcctctctcaaaccgatatgattgccctctcaggagcacacactataggatttgcacattgtggaaaaatgtcaaagagaatatacaattttagccctacaacacgtatcgacccgagtataaaccgtggatacgtggttcagcttaagcaaatgtgcccgatcggtgtcgacgtaagaatcgcaatcaacatggatccgaccagtccacgtactttcgataatgcttatttcaagaatctccaacaaggaaagggtttgttcacgtcagatcaaatcttgttcacagatcaacggtcaagatctacagttaattcgtttgccaatagtgaaggagcttttagacaagctttcatcacagcgatcacgaagttaggtcgggttggtgttttgactggtaatgctggtgagattcgaagggattgttcacgtgtcaattagtgtgatttgaggttttctttcttttattccttaaagaggattttttttttttaataataaaatttaatttcttgttgtcaaaataaggagttcataagtgtgaaacatggaaacttaaattaataagatgggtttatttcgttg

SEQ ID NO: 42846 - protein, 325 aa, Arabidopsis thaliana
  peptide (1)..(325): Ceres Seq. ID no. 12394531
MEKNTSQTIFSNFFLLLLLSSCVSAQLRTGFYQNSCPNVETIVRNAVRQKFQQTFVTAPATLRLFFHDCFVRGCDASIMIASPSERDHPDDMSLAGDGFDTVVKAKQAVDSNPNCRNKVSCADILALATREVVVLTGGPSYPVELGRRDGRISTKASVQSQLPQPEFNLNQLNGMFSRHGLSQTDMIALSGAHTIGFAHCGKMSKRIYNFSPTTRIDPSINRGYVVQLKQMCPIGVDVRIAINMDPTSPRTFDNAYFKNLQQGKGLFTSDQILFTDQRSRSTVNSFANSEGAFRQAFITAITKLGRVGVLTGNAGEIRRDCSRVN

SEQ ID NO: 42847 - protein, 247 aa, Arabidopsis thaliana
  peptide (1)..(247): Ceres Seq. ID no. 12394532
MIASPSERDHPDDMSLAGDGFDTVVKAKQAVDSNPNCRNKVSCADILALATREVVVLTGGPSYPVELGRRDGRISTKASVQSQLPQPEFNLNQLNGMFSRHGLSQTDMIALSGAHTIGFAHCGKMSKRIYNFSPTTRIDPSINRGYVVQLKQMCPIGVDVRIAINMDPTSPRTFDNAYFKNLQQGKGLFTSDQILFTDQRSRSTVNSFANSEGAFRQAFITAITKLGRVGVLTGNAGEIRRDCSRVN

SEQ ID NO: 42848 - protein, 234 aa, Arabidopsis thaliana
  peptide (1)..(234): Ceres Seq. ID no. 12394533
MSLAGDGFDTVVKAKQAVDSNPNCRNKVSCADILALATREVVVLTGGPSYPVELGRRDGRISTKASVQSQLPQPEFNLNQLNGMFSRHGLSQTDMIALSGAHTIGFAHCGKMSKRIYNFSPTTRIDPSINRGYVVQLKQMCPIGVDVRIAINMDPTSPRTFDNAYFKNLQQGKGLFTSDQILFTDQRSRSTVNSFANSEGAFRQAFITAITKLGRVGVLTGNAGEIRRDCSRVN

SEQ ID NO: 42849 - DNA, 2464 bp, Arabidopsis thaliana; identical to SEQ ID NO: 36543
  misc_feature (1)..(2464): Ceres Seq. ID no. 12377492
  misc_feature (1)..(2464): Ortholog of  Ceres SEQ ID NO 13600595 as cited in SEQ ID NO 629
  misc_feature (1)..(2464): Ortholog of  Ceres SEQ ID NO 13593379 as cited in SEQ ID NO 20573

SEQ ID NO: 42850 - protein, 732 aa, Arabidopsis thaliana; identical to SEQ ID NO: 36544
  peptide (1)..(732): Ceres Seq. ID no. 12377493

SEQ ID NO: 42851 - protein, 714 aa, Arabidopsis thaliana; identical to SEQ ID NO: 36545
  peptide (1)..(714): Ceres Seq. ID no. 12377494

SEQ ID NO: 42852 - protein, 672 aa, Arabidopsis thaliana; identical to SEQ ID NO: 36546
  peptide (1)..(672): Ceres Seq. ID no. 12377495

SEQ ID NO: 42853 - DNA, 1356 bp, Arabidopsis thaliana
  misc_feature (1)..(1356): Ceres Seq. ID no. 12395716
  misc_feature (1)..(1356): Ortholog of  Ceres SEQ ID NO 12617911 as cited in SEQ ID NO 65464
aaacccaaacatttttcgattttccccgactttctccgacgatgcgatggcgatagcgatggtgattccggtgacttatgctccgacgattgacacgatcatttgaggcagtctcctttgtccagattttcttcttcaacctctttctcttgcttacccaccaaattcatcatctttgaaactgcttcatccctttcgctttggtgattctgaagactccgctttatacccattttgatctggagaaggatatagatgaagtgctacagtcgcatactgtttattcaaatgtttcgaaaggagttcttgcaaaatcgaaagacttgatgaagtcgtttggatcagatgatcatacgaaaatatgcatcgatattttggagaaaggagagcttcaagttgctggaaaagaaagagaatcacagttctcaagccagtttcgggatatagcaacgattgttatgcagaaaactatcaaccctgaaacacaacgaccttataccatcagcatggtagagcgcctaatgcatgaaattcattttgctgttgatcctcatagtaattccaagaagcaggcacttgatgtcatccgtgagctgcaaaagcacttccctataaagcgttctccaatgagactgcgtcttactgttcctgttcaaaatttcccctcgcttctggagaagctaaaagaatgggatggtagtgttgtctccaaagacgaatctggaacacagatgtccactgtctgcgagatggaaccgggcctattccgagagtgtgattcccatgtgaggagtatccagggaagactagaaatactcgctgtatcagttcatgcagaaggtgacacaagcatggatcattacgatgagcatgatgatatggcattgcaaacccacaagccgttgttacctgctgagactgagactaaggatttgaccgatcccgtcgttgaacttagcaagaaactgcagaagcaagagataagtactacagataacataaagcaagaaggtggagaagaaaagaaggggaccaagtgcagcacttgcaacacgttcgttggagaggctaagcaatacagagagcactgtaagagtgattggcacaaacacaaccttaagcgtaagactcggaaactccctcctattagtgctgacgaatgcatgtctgagattgacatggacgactctagagcagatttgaaagactactctttctgaaactacaattttctccttttgtgcttttaattttgtcaatgtgttaaatctcgtagtcatatgtgagtatgaatacacaaaacttgtggaatgaaattttgcgcaaactttaagagtaaaaacttgtgtttaagag

SEQ ID NO: 42854 - protein, 297 aa, Arabidopsis thaliana; identical to SEQ ID NO: 34951
  peptide (1)..(297): Ceres Seq. ID no. 12395717

SEQ ID NO: 42855 - protein, 253 aa, Arabidopsis thaliana; identical to SEQ ID NO: 34952
  peptide (1)..(253): Ceres Seq. ID no. 12395718

SEQ ID NO: 42856 - protein, 237 aa, Arabidopsis thaliana
  peptide (1)..(237): Ceres Seq. ID no. 12395719
MVERLMHEIHFAVDPHSNSKKQALDVIRELQKHFPIKRSPMRLRLTVPVQNFPSLLEKLKEWDGSVVSKDESGTQMSTVCEMEPGLFRECDSHVRSIQGRLEILAVSVHAEGDTSMDHYDEHDDMALQTHKPLLPAETETKDLTDPVVELSKKLQKQEISTTDNIKQEGGEEKKGTKCSTCNTFVGEAKQYREHCKSDWHKHNLKRKTRKLPPISADECMSEIDMDDSRADLKDYSF

SEQ ID NO: 42857 - DNA, 1722 bp, Arabidopsis thaliana
  misc_feature (1)..(1722): Ceres Seq. ID no. 13495795
  misc_feature (1)..(1722): Ortholog of  Ceres SEQ ID NO 15177994 as cited in SEQ ID NO 55641
  misc_feature (1)..(1722): Ortholog of  Ceres SEQ ID NO 13595454 as cited in SEQ ID NO 56502
attcaacctctctacttcagtttctctgtccccatttttcatctgagagttaaaactgtaacctcaaaatctgagataaagtcaaaaaaaaaaccccagtttatgattctcattttctctttataatcgaaagcttcgatttttaacaaaacccagaatctgtgttcttgtttttttttttttttggtgagagttatcttttttttttttggaatattgggtgagaatctgagtaatgggatttacataaaatattctatgtaaatactaaaataatctggaaattattaaatttccaaactttgtgttccattttgtggactcaaatttgtttataaagatctcaaatcagagagattgagacgaccaagaacaagcagaagaagaagaagaattgagagaatgtggtggtggtcttcttcaactaaaggtcgttcgaatctggagaggtttcttttaggaatcactcctaagcctccttccttctctcttcatcaggaacagggaaaggaggagattgagtatttcaggcttggtgatctctgggattgttatgatgagatgagtgcgtatggctttggcacacaggttgatttaaacaatggcgaaaccgttatgcagtactacgtcccgtacctatccgctatccaaatccacactaacaaacccgccttgctttccaggaaccagaatgaggtggctgaatctgagagtagcgagggttggagcgatagtgagagtgaaaagttgttgtcaaggtcaatgagcaatgattcaagcaaaacatgggatgctgtctctgaagattcggttttcgatccggatggttcaccgttgctgaaagatagacttggtaaccttgactttaagtacattgaaagagatcctccgcacaagcggattcccttaaccgacaagataaacgtattggtggagaaatatccgggactcatgaccttaaggagtgtcgacatgtctcctgcaagttggatggctgttgcgtggtacccgatataccacatcccaacctgcaggaacgagaaagatttgacgacaggcttcctaacttatcatactctatcttcgtcttttcaagataatgtggtggaaggagatcaaagcaacaacaatgaagaaacagagttttgtgaagattccgtaataaacaagagaatgccattgcctccgtttggtgtaacaacttacaaaatgcaaggagatctttgggggaagacggggtttgaccaggaccggttgctttatcttcaaagcgctgcggattcatggctgaaacagctcaatgttgatcaccatgactataacttcttccttaactcgagcttctaaagatcaatcgggtcgttcgtatgtttatccttctccaaaccttaaacaaaaaaaaaagacctcataaccctttttctttgttgttttcaagctccttttgtttctctgtgttttttgttctttttgtttttgtctggctcgttgtgttgttttaggtagcaaccgccatcgcggagttttttctccttttgcaagccaatcatggaagtttctaagaagaaaacagagcttttttttctttttttttaacggtgttgagaaaacaagaaagttgttttcttttcttgggtgagagatcatgtaaattgaccttgaacagaggactctgttttgtacttttctgtctaaaatatataaaaaaatctgtctttcttg

SEQ ID NO: 42858 - protein, 314 aa, Arabidopsis thaliana
  peptide (1)..(314): Ceres Seq. ID no. 13495796
MWWWSSSTKGRSNLERFLLGITPKPPSFSLHQEQGKEEIEYFRLGDLWDCYDEMSAYGFGTQVDLNNGETVMQYYVPYLSAIQIHTNKPALLSRNQNEVAESESSEGWSDSESEKLLSRSMSNDSSKTWDAVSEDSVFDPDGSPLLKDRLGNLDFKYIERDPPHKRIPLTDKINVLVEKYPGLMTLRSVDMSPASWMAVAWYPIYHIPTCRNEKDLTTGFLTYHTLSSSFQDNVVEGDQSNNNEETEFCEDSVINKRMPLPPFGVTTYKMQGDLWGKTGFDQDRLLYLQSAADSWLKQLNVDHHDYNFFLNSSF

SEQ ID NO: 42859 - protein, 261 aa, Arabidopsis thaliana
  peptide (1)..(261): Ceres Seq. ID no. 13495797
MSAYGFGTQVDLNNGETVMQYYVPYLSAIQIHTNKPALLSRNQNEVAESESSEGWSDSESEKLLSRSMSNDSSKTWDAVSEDSVFDPDGSPLLKDRLGNLDFKYIERDPPHKRIPLTDKINVLVEKYPGLMTLRSVDMSPASWMAVAWYPIYHIPTCRNEKDLTTGFLTYHTLSSSFQDNVVEGDQSNNNEETEFCEDSVINKRMPLPPFGVTTYKMQGDLWGKTGFDQDRLLYLQSAADSWLKQLNVDHHDYNFFLNSSF

SEQ ID NO: 42860 - protein, 243 aa, Arabidopsis thaliana
  peptide (1)..(243): Ceres Seq. ID no. 13495798
MQYYVPYLSAIQIHTNKPALLSRNQNEVAESESSEGWSDSESEKLLSRSMSNDSSKTWDAVSEDSVFDPDGSPLLKDRLGNLDFKYIERDPPHKRIPLTDKINVLVEKYPGLMTLRSVDMSPASWMAVAWYPIYHIPTCRNEKDLTTGFLTYHTLSSSFQDNVVEGDQSNNNEETEFCEDSVINKRMPLPPFGVTTYKMQGDLWGKTGFDQDRLLYLQSAADSWLKQLNVDHHDYNFFLNSSF

SEQ ID NO: 42861 - DNA, 1431 bp, Arabidopsis thaliana
  misc_feature (1)..(1431): Ceres Seq. ID no. 13645903
  misc_feature (1)..(1431): Ortholog of  Ceres SEQ ID NO 13582332 as cited in SEQ ID NO 59890
  misc_feature (1)..(1431): Ortholog of  Ceres SEQ ID NO 13598278 as cited in SEQ ID NO 68456
ataaagaaaggtctcttctgtatctaaaagacatatcaaacgaaagaaatcaataaacacaatattctttcttccaaattttctcatttctcatgggcatatctcaagtacactattgcaatggtgaccagaacttagaagcaaaccttctagatcatgaggaaactgaatcattttcagtacctcaaacgaagaactgtaagaggtggctccgtgtctccatatacgcaatctttgtcatcttctgccaaccacttgctacagttctgggtagactgtactatgaaaatggagggaaaagcacatatgtggtaacacttcttcaactcattggcttccctgtactgattctcttccgcttcttttctcgaatcaggcaacccaaatcaacagatacaaatttcagtcagtccccttccttcaccacccttgcatcggtttacttgtgcactggactgctagtgtctgcttatgcttatttgtctgcagttgggttgctttacttaccagtctctactttctccctcatcttggcctcacagttggccttcactgcctttttctcatatttccttaactcgcaaaagttcactcctttgatagtcaattctttgtttctccttacggtttcctctgccctcctcgtggtcaacactgattcagaaaacacaacaaatgtatctagagtacaatatgtgattgggttcatctgtaccattggtgcttccgctgggattggattggtactatctctgatacaactgctcttcaggaaagttttcacgaagcatacatcctcagcagtcctggacttggccaattaccagtctctagttgcaacttgtgtggtactcataggactgtttgcaagtggagagtggagaactctgccaagtgagatgagaaactacaaactggggaaagtgtcatatatcttgactttggcctcagcagctattttctggcaagtatacactgttggttgtgtgggattaatcttcgagtcttcttctgtgttctccaattccataactgctgtgggactgcctatagttccagttgtagcagtgatagttttccatgataagatggatgcatcaaagattttctccatcattttagctatctggggcttcctttcatttgtctatcagcactacctcgacgaaaagaagttgaagacttgccagacaaaacctgttgaggaagaaacacaaactttatgaaacaagttgtatcgaaggtctcagaaacaaacatacatagttgtacacagtcatgtaaataacctatataaagcttgtatgtgtaatatccgtaatggtccatgcaaatgggatatgtatgtcgctcatatttcaggtatttagaacttttattcaaaagagtattgtgtaatacgagcagagtgataaaagcagtcatttattt

SEQ ID NO: 42862 - protein, 377 aa, Arabidopsis thaliana
  peptide (1)..(377): Ceres Seq. ID no. 13645904
MGISQVHYCNGDQNLEANLLDHEETESFSVPQTKNCKRWLRVSIYAIFVIFCQPLATVLGRLYYENGGKSTYVVTLLQLIGFPVLILFRFFSRIRQPKSTDTNFSQSPSFTTLASVYLCTGLLVSAYAYLSAVGLLYLPVSTFSLILASQLAFTAFFSYFLNSQKFTPLIVNSLFLLTVSSALLVVNTDSENTTNVSRVQYVIGFICTIGASAGIGLVLSLIQLLFRKVFTKHTSSAVLDLANYQSLVATCVVLIGLFASGEWRTLPSEMRNYKLGKVSYILTLASAAIFWQVYTVGCVGLIFESSSVFSNSITAVGLPIVPVVAVIVFHDKMDASKIFSIILAIWGFLSFVYQHYLDEKKLKTCQTKPVEEETQTL

SEQ ID NO: 42863 - DNA, 1380 bp, Arabidopsis thaliana
  misc_feature (1)..(1380): Ceres Seq. ID no. 12482758
  misc_feature (1)..(1380): Ortholog of  Ceres SEQ ID NO 12613390 as cited in SEQ ID NO 67690
acaaatatatacacacatacgcaaaaaactcatgatgcatcattgctcaattacgaaacccactttctcaatttcgatctcgacccagaagcttcatcatcattccagtaaattcttgaatttgggtttcagaatccgatgcgaatccggggatgtttcgtcgccattgcggaccaaggcggtgtctttgtcgtcggagatggaggattcgtcgtccttgaagaagagtttgatggagttagaagggaagaagagtgagccttacccaggaggaatgccgaagatgggtccattcacagggagagatccgaatgtgaagaaacctgcttggttgagacagaaggcaccacaaggcgaaaggtttcaggaggtgaaagagtccctttctcgtctcaatctcaatactgtttgtgaagaagctcagtgtcctaatatcggcgagtgttggaatggaggtggtgatggtgtagcaactgcaaccatcatggttcttggtgatacttgtactcgtggctgtagattctgtgctgttaaaacaagtagaaatcctcctcctcctgacccaatggaaccagagaacactgccaaggccatagccagttggggtgtagactacatagttattaccagcgtagaccgtgacgatatacctgatggtggaagtggacattttgcgcagactgtcaaagctatgaagagacataagccggatataatgatagaatgcttaacttctgattttcgtggggatttggaggctgtcgacactcttgtgcactcgggattggatgtttttgctcacaatgtcgagactgtgaaaaggctccagcgacttgtgagggatcctagggctggatatgagcagagcatgtcagttttgaaacatgcaaagatcagcaaacctggaatgatcacaaagacatccataatgcttggtcttggagaaacagacgaagagttgaaggaagcaatggctgatctaagagctatagatgttgatattctaacacttggccagtatctacagccaactccattgcatctgactgtgaaagagtatgtcacacctgagaagtttgatttctggaaaacatacggagaatcaataggatttcgttatgttgcaagtggtccactggtaagatcttcatatagagcaggagagctttttgttaagacaatggtgaaagaaagctactctaaatccttgtcttaataacaacaatggctactataatgccaaaaatgattgctgagaccacaaagccttcttcctatcttttttgtttgtttcttttaatagacttcatttattttggtaattgatttggaaaccattgtggatatataaaagtttatatatactagttttgtgttatt

SEQ ID NO: 42864 - protein, 404 aa, Arabidopsis thaliana
  peptide (1)..(404): Ceres Seq. ID no. 12482759
QIYTHIRKKLMMHHCSITKPTFSISISTQKLHHHSSKFLNLGFRIRCESGDVSSPLRTKAVSLSSEMEDSSSLKKSLMELEGKKSEPYPGGMPKMGPFTGRDPNVKKPAWLRQKAPQGERFQEVKESLSRLNLNTVCEEAQCPNIGECWNGGGDGVATATIMVLGDTCTRGCRFCAVKTSRNPPPPDPMEPENTAKAIASWGVDYIVITSVDRDDIPDGGSGHFAQTVKAMKRHKPDIMIECLTSDFRGDLEAVDTLVHSGLDVFAHNVETVKRLQRLVRDPRAGYEQSMSVLKHAKISKPGMITKTSIMLGLGETDEELKEAMADLRAIDVDILTLGQYLQPTPLHLTVKEYVTPEKFDFWKTYGESIGFRYVASGPLVRSSYRAGELFVKTMVKESYSKSLS

SEQ ID NO: 42865 - protein, 394 aa, Arabidopsis thaliana
  peptide (1)..(394): Ceres Seq. ID no. 12482760
MMHHCSITKPTFSISISTQKLHHHSSKFLNLGFRIRCESGDVSSPLRTKAVSLSSEMEDSSSLKKSLMELEGKKSEPYPGGMPKMGPFTGRDPNVKKPAWLRQKAPQGERFQEVKESLSRLNLNTVCEEAQCPNIGECWNGGGDGVATATIMVLGDTCTRGCRFCAVKTSRNPPPPDPMEPENTAKAIASWGVDYIVITSVDRDDIPDGGSGHFAQTVKAMKRHKPDIMIECLTSDFRGDLEAVDTLVHSGLDVFAHNVETVKRLQRLVRDPRAGYEQSMSVLKHAKISKPGMITKTSIMLGLGETDEELKEAMADLRAIDVDILTLGQYLQPTPLHLTVKEYVTPEKFDFWKTYGESIGFRYVASGPLVRSSYRAGELFVKTMVKESYSKSLS

SEQ ID NO: 42866 - protein, 393 aa, Arabidopsis thaliana
  peptide (1)..(393): Ceres Seq. ID no. 12482761
MHHCSITKPTFSISISTQKLHHHSSKFLNLGFRIRCESGDVSSPLRTKAVSLSSEMEDSSSLKKSLMELEGKKSEPYPGGMPKMGPFTGRDPNVKKPAWLRQKAPQGERFQEVKESLSRLNLNTVCEEAQCPNIGECWNGGGDGVATATIMVLGDTCTRGCRFCAVKTSRNPPPPDPMEPENTAKAIASWGVDYIVITSVDRDDIPDGGSGHFAQTVKAMKRHKPDIMIECLTSDFRGDLEAVDTLVHSGLDVFAHNVETVKRLQRLVRDPRAGYEQSMSVLKHAKISKPGMITKTSIMLGLGETDEELKEAMADLRAIDVDILTLGQYLQPTPLHLTVKEYVTPEKFDFWKTYGESIGFRYVASGPLVRSSYRAGELFVKTMVKESYSKSLS

SEQ ID NO: 42867 - DNA, 1339 bp, Arabidopsis thaliana
  misc_feature (1)..(1339): Ceres Seq. ID no. 13488268
  misc_feature (1)..(1339): Ortholog of  Ceres SEQ ID NO 13654187 as cited in SEQ ID NO 68219
acatatgaacataacccaatctgaagatcaatcataaccttaaaccatctctcataattttagtatttctattctcaccaccaaaactcgttgatacatcacaccccaactgttgttactcatgtcctacagatcgatttaccgcactcttcgaccggtactatcatcttcggtacaatcctccggtttaggaattggaggattcaggggacatctcattagccacttgcccaatgttcggctattgagctctgacacgtcatctccggtaagtgggaataaccagccagaaaatcctatccgaacggccgatggtaaagttatatccacttattggggtatacctcctactaagatcactaaaccggacggttcagcttggaagtggaattgttttcagccatgggattcatacaaaccggatgtgtccattgatgtaactaaacatcataaaccctccaatttcactgacaaattcgcatattggaccgttcaaactctgaaaataccggttcaactattttttcagaggaagcacatgtgccatgcgatgttgctagagacggtggctgcggtgccgggaatggtcggggggatgcttttgcacttgaaatctctccggaggttcgaacatagcgggggatggatcaaagctttgctcgaagaggctgagaacgagcgtatgcatctcatgactttcatcgaactttcacaacccaaatggtacgaacgagcgattgtgttcacggtccaaggcgttttcttcaacgcatatttcctggcttatgtaatttcacccaaacttgctcatcgtatcactggatacttagaagaagaggctgtaaattcttacactgaatttctcaaagacattgatgccggaaaattcgaaaattcgccagctccagccatcgcaatggattactggcggttccctaaagatgcaacgcttagggatgtggtttatgttatccgagctgaggaagctcccccccgtgatattaaccactatgcttcggatatacaattcaaaggacatgaactcaaggaagctccggctcctattggatatcattaaagattatgtgacaaagtcacaaagctgtgtatacatctatgaacatatgttgttgtggatctccatgatatttttattttatgttttcgatttatttaaaactgttattcgtttttattagctcaatatggatatttaaaccatattattttgttacgatttatgaacatagtactactcatgtgtgtgtaaaagatcatactgcctggacacgaagcggatatccggaaaaattataatatttgttttttgattcgtttc

SEQ ID NO: 42868 - protein, 318 aa, Arabidopsis thaliana
  peptide (1)..(318): Ceres Seq. ID no. 13488269
MSYRSIYRTLRPVLSSSVQSSGLGIGGFRGHLISHLPNVRLLSSDTSSPVSGNNQPENPIRTADGKVISTYWGIPPTKITKPDGSAWKWNCFQPWDSYKPDVSIDVTKHHKPSNFTDKFAYWTVQTLKIPVQLFFQRKHMCHAMLLETVAAVPGMVGGMLLHLKSLRRFEHSGGWIKALLEEAENERMHLMTFIELSQPKWYERAIVFTVQGVFFNAYFLAYVISPKLAHRITGYLEEEAVNSYTEFLKDIDAGKFENSPAPAIAMDYWRFPKDATLRDVVYVIRAEEAPPRDINHYASDIQFKGHELKEAPAPIGYH

SEQ ID NO: 42869 - protein, 179 aa, Arabidopsis thaliana
  peptide (1)..(179): Ceres Seq. ID no. 13488270
MCHAMLLETVAAVPGMVGGMLLHLKSLRRFEHSGGWIKALLEEAENERMHLMTFIELSQPKWYERAIVFTVQGVFFNAYFLAYVISPKLAHRITGYLEEEAVNSYTEFLKDIDAGKFENSPAPAIAMDYWRFPKDATLRDVVYVIRAEEAPPRDINHYASDIQFKGHELKEAPAPIGYH

SEQ ID NO: 42870 - protein, 175 aa, Arabidopsis thaliana
  peptide (1)..(175): Ceres Seq. ID no. 13488271
MLLETVAAVPGMVGGMLLHLKSLRRFEHSGGWIKALLEEAENERMHLMTFIELSQPKWYERAIVFTVQGVFFNAYFLAYVISPKLAHRITGYLEEEAVNSYTEFLKDIDAGKFENSPAPAIAMDYWRFPKDATLRDVVYVIRAEEAPPRDINHYASDIQFKGHELKEAPAPIGYH

SEQ ID NO: 42871 - DNA, 1267 bp, Arabidopsis thaliana
  misc_feature (1)..(1267): Ceres Seq. ID no. 13592804
  misc_feature (1)..(1267): Ortholog of  Ceres SEQ ID NO 13596474 as cited in SEQ ID NO 62169
  misc_feature (1)..(1267): Ortholog of  Ceres SEQ ID NO 13596969 as cited in SEQ ID NO 63375
  misc_feature (1)..(1267): Ortholog of  Ceres SEQ ID NO 13597519 as cited in SEQ ID NO 64759
  misc_feature (1)..(1267): Ortholog of  Ceres SEQ ID NO 13597870 as cited in SEQ ID NO 64982
  misc_feature (1)..(1267): Ortholog of  Ceres SEQ ID NO 13656123 as cited in SEQ ID NO 65212
agaacatcctaatcgaaaaatgcatctaaaacaaactctatctactaactcgaaacacacttgcgatctttatctaavacacaaaccaacaaaaagaaaaatgggcttggtcagatcatttgctttgttcttagtcttccttagttgtctcatcgcggtgtatggccaaggtacgaggatcgggttctactcgaccacgtgccctaatgccgagacgattgttcggaccactgtagcatctcactttagttcagatccaaaggttgcaccggggttactgagaatgcacaaccatgattgctttgtccaaggttgtgatggttcggtgctattatcgggacctaactctgaaagaaccgctggcgcaarcgttaaccttcatggttttgaagtcattgacgatgccaagaggcagctcgaggcagcatgtcctggtgttgtctcttgtgctgatatattggccttaagcggctcgtgahtccgttgctbgttyacaacacrgayaaagttggmackggagksssgaacaggacgtagagatggaagagtttccttggcatcgaacgttaacaatcttccttctccaagtgactctctagccattcaacaaaggaaattcgccgcttttcgcctcaacactcgcgatctcgtcactcttgttggaggaggacacacgatcggaacagctgcatgtgggtttatcacgaacaggatattcaactcgagcggaaacacagcagatccaacaatggaccmwacatttgtaccacaacttcaaagactttgtccccaaaacggcgacggatcagcacgtgttgatcttgacaccggaagtggaaacacttttgacacatcttatttcatcaatctcaaccgtaacagaggaattcttcaatccgaccacgttctttggactagtccggccacaagatccatagtgcaagagtttatggcacctagaggcaacttcaatgtccagttcgcaaggtcaatggttaaaatgagtaatattggtgtgaagacggggacaaatggagaaattcgtagggtttgctctgcggttaattaatcagtgattaagtttttatggctaaaaaaaagtgtttatggctaactcttgttcaagggcattttttttatagtttgatttaaatttaaacccaatagaatagaaaggatatgagagaaacccaaaagtgggttgctgataaatgtatttcatttctttcggtttgacttggtggaataaataaagttcaatttcgtc

SEQ ID NO: 42872 - protein, 158 aa, Arabidopsis thaliana
  peptide (1)..(158): Ceres Seq. ID no. 15221165
  misc_feature (26)..(26): Xaa is any aa, unknown or other
  misc_feature (123)..(123): Xaa is any aa, unknown or other
EHPNRKMHLKQTLSTNSKHTCDLYLXHKPTKRKMGLVRSFALFLVFLSCLIAVYGQGTRIGFYSTTCPNAETIVRTTVASHFSSDPKVAPGLLRMHNHDCFVQGCDGSVLLSGPNSERTAGAXVNLHGFEVIDDAKRQLEAACPGVVSCADILALSGS

SEQ ID NO: 42873 - protein, 152 aa, Arabidopsis thaliana
  peptide (1)..(152): Ceres Seq. ID no. 15221166
  misc_feature (20)..(20): Xaa is any aa, unknown or other
  misc_feature (117)..(117): Xaa is any aa, unknown or other
MHLKQTLSTNSKHTCDLYLXHKPTKRKMGLVRSFALFLVFLSCLIAVYGQGTRIGFYSTTCPNAETIVRTTVASHFSSDPKVAPGLLRMHNHDCFVQGCDGSVLLSGPNSERTAGAXVNLHGFEVIDDAKRQLEAACPGVVSCADILALSGS

SEQ ID NO: 42874 - protein, 125 aa, Arabidopsis thaliana
  peptide (1)..(125): Ceres Seq. ID no. 15221167
  misc_feature (90)..(90): Xaa is any aa, unknown or other
MGLVRSFALFLVFLSCLIAVYGQGTRIGFYSTTCPNAETIVRTTVASHFSSDPKVAPGLLRMHNHDCFVQGCDGSVLLSGPNSERTAGAXVNLHGFEVIDDAKRQLEAACPGVVSCADILALSGS

SEQ ID NO: 42875 - DNA, 1397 bp, Arabidopsis thaliana; identical to SEQ ID NO: 39289
  misc_feature (1)..(1397): Ceres Seq. ID no. 13489548
  misc_feature (1)..(1397): Ortholog of  Ceres SEQ ID NO 13661015 as cited in SEQ ID NO 60921
  misc_feature (1)..(1397): Ortholog of  Ceres SEQ ID NO 13596304 as cited in SEQ ID NO 69269

SEQ ID NO: 42876 - protein, 289 aa, Arabidopsis thaliana; identical to SEQ ID NO: 39290
  peptide (1)..(289): Ceres Seq. ID no. 13489549

SEQ ID NO: 42877 - protein, 226 aa, Arabidopsis thaliana; identical to SEQ ID NO: 39291
  peptide (1)..(226): Ceres Seq. ID no. 13489550

SEQ ID NO: 42878 - protein, 192 aa, Arabidopsis thaliana; identical to SEQ ID NO: 39292
  peptide (1)..(192): Ceres Seq. ID no. 13489551

SEQ ID NO: 42879 - DNA, 1175 bp, Arabidopsis thaliana
  misc_feature (1)..(1175): Ceres Seq. ID no. 12336495
  misc_feature (1)..(1175): Ortholog of  Ceres SEQ ID NO 12611159 as cited in SEQ ID NO 59821
  misc_feature (1)..(1175): Ortholog of  Ceres SEQ ID NO 13584238 as cited in SEQ ID NO 64216
gtgacatttgtcaatgtctgtggtttataacatgtttctcaatgtcaggatcacacacaccacttctcatgtataaatacacataaaagcaattggatttggtaagagggaatctcaaaagtgtgtgtctgtgagagaggagagagagaatatgggcaaaggaagagcaccatgttgtgacaaaaccaaagtgaagagaggaccatggagccatgatgaagacttgaaactcatctctttcattcacaagaatggtcatgagaattggagatctctcccaaagcaagctggattgttgaggtgtggcaagagttgtcgtctgcgatggattaattacctcagacctgatgtgaaacgtggcaatttcagtgcagaggaagaagacaccatcatcaaacttcaccagagctttggtaacaagtggtcgaagattgcttctaagctgcctggaagaacagacaatgagatcaagaatgtgtggcatacacatctcaagaaaagattgagctcggaaactaaccttaatgccgatgaagcgggttcaaaaggttctttgaatgaagaagagaactctcaagagtcatctccaaatgcttcaatgtcttttgctggttccaacatttcaagcaaagacgatgatgcacagataagtcaaatgtttgagcacattctaacttatagcgagtttacggggatgttacaagaggtagacaaaccagagctgctggagatgccttttgatttagatcctgacatttggagtttcatagatggttcagactcattccaacaaccagagaacagagctcttcaagagtctgaagaagatgaagttgataaatggtttaagcacctggaaagcgaactcgggttagaagaaaacgataaccaacaacaacaacagcataaacagggaacagaagatgaacattcatcatcactcttggagagttacgagctcctcatacattaatgaagccataaagcaagtcattttcaccttgaaaatggaattattagctaacttattggcattattagtatataagcaagatcagataggcgcatgtagtagcaacaacgaagaaacgtcgaattgtagacaaaatgtagatattacagagttgaaagattgtattttgcaaatgattgctttgtagtgaaatcaagttatc

SEQ ID NO: 42880 - protein, 273 aa, Arabidopsis thaliana
  peptide (1)..(273): Ceres Seq. ID no. 12336496
MGKGRAPCCDKTKVKRGPWSHDEDLKLISFIHKNGHENWRSLPKQAGLLRCGKSCRLRWINYLRPDVKRGNFSAEEEDTIIKLHQSFGNKWSKIASKLPGRTDNEIKNVWHTHLKKRLSSETNLNADEAGSKGSLNEEENSQESSPNASMSFAGSNISSKDDDAQISQMFEHILTYSEFTGMLQEVDKPELLEMPFDLDPDIWSFIDGSDSFQQPENRALQESEEDEVDKWFKHLESELGLEENDNQQQQQHKQGTEDEHSSSLLESYELLIH

SEQ ID NO: 42881 - DNA, 1586 bp, Arabidopsis thaliana
  misc_feature (1)..(1586): Ceres Seq. ID no. 12604692
  misc_feature (1)..(1586): Ortholog of  Ceres SEQ ID NO 13502874 as cited in SEQ ID NO 66298
  misc_feature (1)..(1586): Ortholog of  Ceres SEQ ID NO 12614124 as cited in SEQ ID NO 68392
aagaagcaaacagtcaaatggaagaaaccaacattagagttgttctctactccattttctctctcatcttcttgataatctctttcaagttcttaaaaccaaagaaacagaatcttccaccgtctccgccgggatggttgccaataataggccatctccgccttctgaagccacccatccaccgcaccctccgctccttctccgagaccctcgaccacaacgatggtggcggcgtgatgtccctccgacttggatcccgtctagtctacgtggtgtcgtcacataaggttgcggcagaggagtgctttggcaagaacgacgtcgttctagctaaccggccacaggtgatcatcggaaaacatgttggttataacaatacaaacatgatcgctgcaccttacggtgatcactggcgtaacctccgtcgcctctgcactatcgagatcttttcaacacaccgccttaactgctttctttatgtccgtaccgacgaagtacgtcgccttataagccgcctctctcgtctcgcaggaaccaaaaaaactgttgtggaattgaaaccaatgcttatggacttgacattcaacaacataatgagaatgatgaccggaaaacgatactacggtgaagaaacaaccgatgaggaagaagcaaagcgtgtccgtaagttggtagcagatgttggggctaacacgagttcaggcaacgccgttgactacgtccccatcctcagactgttttcaagttatgaaaatagggttaaaaagttaggagaggagacagataagtttttacaaggtctcattgacgataaacgtgggcaacaagaaaccggtactacaatgatcgatcatttgcttgtcctccaaaaatctgatattgagtattacactgatcaaatcatcaaaggcatcatactgataatggtaatagcagggactaacacatcagcagtcactctagaatgggcactttccaatttgcttaaccatcctgacgtaatatctaaagcgagagacgaaatcgataaccgggttggtttagaccggcttatcgaagaagcagatcttagcgagctaccatatctaaagaacattgtccttgagacccttaggctacacccagctacaccattgctagtcccacacatggcatcagaagattgcaagataggatcctacgatatgccacgtggtacaacgttgttggtgaatgcatgggccatacatagggatccaaacacgtgggatgatccggatagctttaaaccagagcggtttgagaaagaagaggaagcacaaaagcttctggcgtttggattaggtagaagagcgtgtcctggatcgggtctggcccaacgaatcgtgggactagctctcgggtcattgatacaatgctttgaatgggagagagttgggaatgtggaagtggatatgaaggaaggagttgggaatactgtacccaaagcgattcctttgaaagctatttgcaaagctcgtccatttctacataagattatttcctaaaattgttgaaactacgaataaaagatgtgtgacatgttaatgcaaatcaatgattctctc

SEQ ID NO: 42882 - protein, 507 aa, Arabidopsis thaliana
  peptide (1)..(507): Ceres Seq. ID no. 12604693
EANSQMEETNIRVVLYSIFSLIFLIISFKFLKPKKQNLPPSPPGWLPIIGHLRLLKPPIHRTLRSFSETLDHNDGGGVMSLRLGSRLVYVVSSHKVAAEECFGKNDVVLANRPQVIIGKHVGYNNTNMIAAPYGDHWRNLRRLCTIEIFSTHRLNCFLYVRTDEVRRLISRLSRLAGTKKTVVELKPMLMDLTFNNIMRMMTGKRYYGEETTDEEEAKRVRKLVADVGANTSSGNAVDYVPILRLFSSYENRVKKLGEETDKFLQGLIDDKRGQQETGTTMIDHLLVLQKSDIEYYTDQIIKGIILIMVIAGTNTSAVTLEWALSNLLNHPDVISKARDEIDNRVGLDRLIEEADLSELPYLKNIVLETLRLHPATPLLVPHMASEDCKIGSYDMPRGTTLLVNAWAIHRDPNTWDDPDSFKPERFEKEEEAQKLLAFGLGRRACPGSGLAQRIVGLALGSLIQCFEWERVGNVEVDMKEGVGNTVPKAIPLKAICKARPFLHKIIS

SEQ ID NO: 42883 - protein, 502 aa, Arabidopsis thaliana
  peptide (1)..(502): Ceres Seq. ID no. 12604694
MEETNIRVVLYSIFSLIFLIISFKFLKPKKQNLPPSPPGWLPIIGHLRLLKPPIHRTLRSFSETLDHNDGGGVMSLRLGSRLVYVVSSHKVAAEECFGKNDVVLANRPQVIIGKHVGYNNTNMIAAPYGDHWRNLRRLCTIEIFSTHRLNCFLYVRTDEVRRLISRLSRLAGTKKTVVELKPMLMDLTFNNIMRMMTGKRYYGEETTDEEEAKRVRKLVADVGANTSSGNAVDYVPILRLFSSYENRVKKLGEETDKFLQGLIDDKRGQQETGTTMIDHLLVLQKSDIEYYTDQIIKGIILIMVIAGTNTSAVTLEWALSNLLNHPDVISKARDEIDNRVGLDRLIEEADLSELPYLKNIVLETLRLHPATPLLVPHMASEDCKIGSYDMPRGTTLLVNAWAIHRDPNTWDDPDSFKPERFEKEEEAQKLLAFGLGRRACPGSGLAQRIVGLALGSLIQCFEWERVGNVEVDMKEGVGNTVPKAIPLKAICKARPFLHKIIS

SEQ ID NO: 42884 - protein, 429 aa, Arabidopsis thaliana
  peptide (1)..(429): Ceres Seq. ID no. 12604695
MSLRLGSRLVYVVSSHKVAAEECFGKNDVVLANRPQVIIGKHVGYNNTNMIAAPYGDHWRNLRRLCTIEIFSTHRLNCFLYVRTDEVRRLISRLSRLAGTKKTVVELKPMLMDLTFNNIMRMMTGKRYYGEETTDEEEAKRVRKLVADVGANTSSGNAVDYVPILRLFSSYENRVKKLGEETDKFLQGLIDDKRGQQETGTTMIDHLLVLQKSDIEYYTDQIIKGIILIMVIAGTNTSAVTLEWALSNLLNHPDVISKARDEIDNRVGLDRLIEEADLSELPYLKNIVLETLRLHPATPLLVPHMASEDCKIGSYDMPRGTTLLVNAWAIHRDPNTWDDPDSFKPERFEKEEEAQKLLAFGLGRRACPGSGLAQRIVGLALGSLIQCFEWERVGNVEVDMKEGVGNTVPKAIPLKAICKARPFLHKIIS

SEQ ID NO: 42885 - DNA, 1447 bp, Arabidopsis thaliana
  misc_feature (1)..(1447): Ceres Seq. ID no. 13489579
  misc_feature (1)..(1447): Ortholog of  Ceres SEQ ID NO 13577044 as cited in SEQ ID NO 58682
cttaaaagaaaaaaaaaatcccaaacacagcaaaaaaaaaaaaaaaagcctagaggaatagaatcggtctctttctctataatctctctctctctctgacttgtttgtgttctctcaaatcctctgataagaatcaatggccaaggaattagcagagaaagctaaagaagcttttctagatgatgacttcgatgttgctgttgacttatactccaaagccattgacttggatcccaattgcgccgccttcttcgccgatcgtgctcaggccaacatcaaaatcgataacttcactgaagctgttgtagatgcgaacaaagccattgagttggagccaacgttggcaaaagcctatctcagaaagggcactgcttgtatgaagctagaagaatatagtactgctaaagcagccctggaaaagggagcttctgttgcaccgaatgaaccaaagtttaagaagatgatagatgaatgcgatcttcgtattgcagaagaagagaaagatttggttcagccgatgccaccgagtttgccttcaagctctacaacaccactagcaacggaagctgatgctcctcctgttccaattcctgcagcacctgccaaaccgatgttcaggcacgagttctaccagaaaccagaagaagcggtggtgacaattttcgccaaaaaagtacctaaggagaacgtaactgtcgagtttggtgagcagattctgagtgttgtcattgatgttgctggagaggaagcttatcatctccagccgagattgttcgggaagataataccagagaagtgcagatttgaagtattgtcgaccaaagttgagatccgtcttgcgaaagcagagataatcacctgggcctcccttgaatatggtaaagggcaaagtgttttgcccaaacccaatgtctcatcagcgctgtcgcagagaccagtgtacccatcttctaagccagcaaaagactgggacaagttggaagctgaagtgaagaaacaggagaaggatgagaagcttgatggagatgcagctatgaacaaatttttcagcgacatatactcgagtgcagatgaagacatgaggcgggcaatgaacaaatcatttgcagagtcgaatgggacggtactgtcgacaaactggaaagaagttgggactaagaaagtggagagcactccaccagatggcatggagctcaagaagtgggagtattgatcttcttaaaatccccttttctggtttttgttaaaaaaaagtctgacaaatcttttgaacttttaaggtgtttttcttttttggtttctgctcgaatttgtctctctccattcttgcgttgtggtctcaaagaacgttctgatactttgattttgtattagaaaactaaaactcgcaagtctgttgttttggaactttgttcttttatcgagaggcttatctaaatatttcttg

SEQ ID NO: 42886 - protein, 358 aa, Arabidopsis thaliana; identical to SEQ ID NO: 25341
  peptide (1)..(358): Ceres Seq. ID no. 13489580

SEQ ID NO: 42887 - protein, 278 aa, Arabidopsis thaliana; identical to SEQ ID NO: 25342
  peptide (1)..(278): Ceres Seq. ID no. 13489581

SEQ ID NO: 42888 - protein, 250 aa, Arabidopsis thaliana; identical to SEQ ID NO: 25343
  peptide (1)..(250): Ceres Seq. ID no. 13489582

SEQ ID NO: 42889 - DNA, 779 bp, Arabidopsis thaliana; identical to SEQ ID NO: 23744
  misc_feature (1)..(779): Ceres Seq. ID no. 13497399
  misc_feature (1)..(779): Ortholog of  Ceres SEQ ID NO 13594466 as cited in SEQ ID NO 51247
  misc_feature (1)..(779): Ortholog of  Ceres SEQ ID NO 13622409 as cited in SEQ ID NO 0

SEQ ID NO: 42890 - protein, 209 aa, Arabidopsis thaliana; identical to SEQ ID NO: 23745
  peptide (1)..(209): Ceres Seq. ID no. 13497400

SEQ ID NO: 42891 - protein, 199 aa, Arabidopsis thaliana; identical to SEQ ID NO: 23746
  peptide (1)..(199): Ceres Seq. ID no. 13497401

SEQ ID NO: 42892 - protein, 160 aa, Arabidopsis thaliana; identical to SEQ ID NO: 23747
  peptide (1)..(160): Ceres Seq. ID no. 13497402

SEQ ID NO: 42893 - DNA, 1259 bp, Arabidopsis thaliana
  misc_feature (1)..(1259): Ceres Seq. ID no. 12562527
  misc_feature (1)..(1259): Ortholog of  Ceres SEQ ID NO 15177676 as cited in SEQ ID NO 52631
  misc_feature (1)..(1259): Ortholog of  Ceres SEQ ID NO 14314212 as cited in SEQ ID NO 57401
aaacaacacacacacaaatggctcctcgtgtgatcttcttacttctctcgcttgtttttctctagctcgcaaacacatcacactctttgagaaagtttcaatcatttctacaccctatttataaagacacggccaaaaatatatacaccatccctttgtccatcggctcaacttccagcgaaaaattcgtccttgacctcaacggagccgcaccgttattgcaaaactgtccaaccgccgccaaatccaccacctaccacccaatcagatgtggctccacaagatgcaaatacgcaaaccccaacttcccctgtcccaacaatgtcattgccaagaagaggaccgtgtgtctctcctccgacaattcccgcctattccgagacaccgtccccttgttatacacatttaatggagtttacactagggacagtgaaatgagttcttcattgactttgacttgcactgacggtgctcctgccttaaaacaaagaaccatcggtctcgctaacacccacttgtcgattccctcgcagctcatctccatgtaccagcttcctcataagatagctctttgtttgccttccaccgaacgaagtcagtctcataatggtgacctttggatcggtaaaggggaatattattatctgccttacgataaagatgtctctaagatctttgcctccacgcctctgatcggtaatggcaagtccggcgagtacttaatcgatgtgaagtccatccaaatcggtgcaaagaccgttcctataccctatggagccacaaagatcagcactttggctccttacaccgtattccaaacttccctttacaaggctctgctcacagctttcaccgaaaacatcaagatagctaaagctcccgcggtgaagcctttcggtgcgtgcttctactccaatggaggacgtggagttcccgtgatcgacctggtgctgagcggaggggctaagtggaggatctacgggtctaattccttggtgaaggtgaataaaaatgtggtttgtttagggtttgtggacggaggtgtgaagccgaagtaccctatagtgatcggaggatttcagatggaggataatttggtggagttcgatcttgaagcttccaaattttctttctcctcttctcttttgcttcacaacacttcttgctcagtgcaaaggttgtctcctttctaatgcacgtgatcgattattcatgttatcaagacatatcatcagtttcctttttaataaattaatgtc

SEQ ID NO: 42894 - protein, 252 aa, Arabidopsis thaliana
  peptide (1)..(252): Ceres Seq. ID no. 12562528
MSSSLTLTCTDGAPALKQRTIGLANTHLSIPSQLISMYQLPHKIALCLPSTERSQSHNGDLWIGKGEYYYLPYDKDVSKIFASTPLIGNGKSGEYLIDVKSIQIGAKTVPIPYGATKISTLAPYTVFQTSLYKALLTAFTENIKIAKAPAVKPFGACFYSNGGRGVPVIDLVLSGGAKWRIYGSNSLVKVNKNVVCLGFVDGGVKPKYPIVIGGFQMEDNLVEFDLEASKFSFSSSLLLHNTSCSVQRLSPF

SEQ ID NO: 42895 - protein, 216 aa, Arabidopsis thaliana
  peptide (1)..(216): Ceres Seq. ID no. 12562529
MYQLPHKIALCLPSTERSQSHNGDLWIGKGEYYYLPYDKDVSKIFASTPLIGNGKSGEYLIDVKSIQIGAKTVPIPYGATKISTLAPYTVFQTSLYKALLTAFTENIKIAKAPAVKPFGACFYSNGGRGVPVIDLVLSGGAKWRIYGSNSLVKVNKNVVCLGFVDGGVKPKYPIVIGGFQMEDNLVEFDLEASKFSFSSSLLLHNTSCSVQRLSPF

SEQ ID NO: 42896 - DNA, 1318 bp, Arabidopsis thaliana
  misc_feature (1)..(1318): Ceres Seq. ID no. 12357572
  misc_feature (1)..(1318): Ortholog of  Ceres SEQ ID NO 15175900 as cited in SEQ ID NO 53751
agtgggcctaatggcccatatgtaacacgaagatttctgacagtacgacttctaaagtactttgctttccttgttgaattccgaccaaagtcgataaagagttatgacgatggacgatggtaactccgtctacgtcggcggcctcccttacgacatcaccgaggaggctgtccgtcgcgtcttctccatttacggctccgtcctcaccgttaagattgtcaatgaccggagtgtaagagggaaatgctatggctttgttacattttcgaaccgtcgatcggctgatgatgctatcgaagatatggatggaaaaagtattggtgggcgtgcagtgcgtgtgaatgatgtgacaacaagaggtggaagaatgaatccaggtccggggcggttacaaccacacggtggttgggatagaagtcctgataggagaagtgatggtaattatgagagggatcggtatagtgataggtctcgagaacgggataggtctcaggataggagaaaagatcatcgctacatagagaaggaaagagcttatgagcattcacatgattttgagaggaggaatgatcatgatatggtagatagaaatggttataaggaaagagttttcgatggtgatgaaggagattggcgtggggataggtcttatgtggataatggtaggggaataaatgggaccagtgctcacgaaggaaggagccaagaaacaaagagagaagatagtaccattcttgatggtggacgtggcagagatcacttctctaattcaagtggagatcatcaggtgaaagaagatctggaagcgctgattaagatgcgtgaggcgcttcgagatgaggtgatggtgatggaagagagactggaagtaaaagaagtagtgtgctcagagctacagaagaaatctaagagattagaagatttgttgatcaatgaaaagaaactggtttcacaacgccgaaaagaattggcaaagctacataaatcatattcaagggttagagagtgcacggacaacctgaaagactgtgaacaagaactccagttgcttgttaattcagcagctagagaaggcgtggcaggtgctgatgaaggattgggacacgggtatccgtaacacggtcacccgcatgtatgatctgttttgtctaaagtgtagctttgatatgtcttctctttgtgactttccgagtttttttctagtcgagctacactaatttggtacatatttacttgttttggcaagtatgtattcatttcattcgggatgtattattatcatacgaacatgaactaaataattatgttttcaacttgc

SEQ ID NO: 42897 - protein, 337 aa, Arabidopsis thaliana
  peptide (1)..(337): Ceres Seq. ID no. 12357573
MTMDDGNSVYVGGLPYDITEEAVRRVFSIYGSVLTVKIVNDRSVRGKCYGFVTFSNRRSADDAIEDMDGKSIGGRAVRVNDVTTRGGRMNPGPGRLQPHGGWDRSPDRRSDGNYERDRYSDRSRERDRSQDRRKDHRYIEKERAYEHSHDFERRNDHDMVDRNGYKERVFDGDEGDWRGDRSYVDNGRGINGTSAHEGRSQETKREDSTILDGGRGRDHFSNSSGDHQVKEDLEALIKMREALRDEVMVMEERLEVKEVVCSELQKKSKRLEDLLINEKKLVSQRRKELAKLHKSYSRVRECTDNLKDCEQELQLLVNSAAREGVAGADEGLGHGYP

SEQ ID NO: 42898 - protein, 335 aa, Arabidopsis thaliana
  peptide (1)..(335): Ceres Seq. ID no. 12357574
MDDGNSVYVGGLPYDITEEAVRRVFSIYGSVLTVKIVNDRSVRGKCYGFVTFSNRRSADDAIEDMDGKSIGGRAVRVNDVTTRGGRMNPGPGRLQPHGGWDRSPDRRSDGNYERDRYSDRSRERDRSQDRRKDHRYIEKERAYEHSHDFERRNDHDMVDRNGYKERVFDGDEGDWRGDRSYVDNGRGINGTSAHEGRSQETKREDSTILDGGRGRDHFSNSSGDHQVKEDLEALIKMREALRDEVMVMEERLEVKEVVCSELQKKSKRLEDLLINEKKLVSQRRKELAKLHKSYSRVRECTDNLKDCEQELQLLVNSAAREGVAGADEGLGHGYP

SEQ ID NO: 42899 - protein, 271 aa, Arabidopsis thaliana
  peptide (1)..(271): Ceres Seq. ID no. 12357575
MDGKSIGGRAVRVNDVTTRGGRMNPGPGRLQPHGGWDRSPDRRSDGNYERDRYSDRSRERDRSQDRRKDHRYIEKERAYEHSHDFERRNDHDMVDRNGYKERVFDGDEGDWRGDRSYVDNGRGINGTSAHEGRSQETKREDSTILDGGRGRDHFSNSSGDHQVKEDLEALIKMREALRDEVMVMEERLEVKEVVCSELQKKSKRLEDLLINEKKLVSQRRKELAKLHKSYSRVRECTDNLKDCEQELQLLVNSAAREGVAGADEGLGHGYP

SEQ ID NO: 42900 - DNA, 1708 bp, Arabidopsis thaliana; identical to SEQ ID NO: 29984
  misc_feature (1)..(1708): Ceres Seq. ID no. 12603224
  misc_feature (1)..(1708): Ortholog of  Ceres SEQ ID NO 14307843 as cited in SEQ ID NO 20508
  misc_feature (1)..(1708): Ortholog of  Ceres SEQ ID NO 15170811 as cited in SEQ ID NO 52649
  misc_feature (1)..(1708): Ortholog of  Ceres SEQ ID NO 13638331 as cited in SEQ ID NO 58047
  misc_feature (1)..(1708): Ortholog of  Ceres SEQ ID NO 15225845 as cited in SEQ ID NO 65125

SEQ ID NO: 42901 - protein, 501 aa, Arabidopsis thaliana; identical to SEQ ID NO: 29985
  peptide (1)..(501): Ceres Seq. ID no. 12603225

SEQ ID NO: 42902 - protein, 424 aa, Arabidopsis thaliana; identical to SEQ ID NO: 29986
  peptide (1)..(424): Ceres Seq. ID no. 12603226

SEQ ID NO: 42903 - protein, 357 aa, Arabidopsis thaliana; identical to SEQ ID NO: 29987
  peptide (1)..(357): Ceres Seq. ID no. 12603227

SEQ ID NO: 42904 - DNA, 1675 bp, Arabidopsis thaliana
  misc_feature (1)..(1675): Ceres Seq. ID no. 12336497
  misc_feature (1)..(1675): Ortholog of  Ceres SEQ ID NO 13600098 as cited in SEQ ID NO 0
aacatcaccacaaaagtccaagctttctctctcctcaacctcgtccccttgcttcttctcctcctgctctgtctcgtttcttctcttctacttcggagatgtctgcttctgattccacttcttctcttcccattactcttgactccatcaatcccaaggttctgaaatgtgagtatgctgttcgaggagaaattgtcaacattgctcagaagttacaagaagacttgaagactaataaggatgcttatccctttgatgagataatctattgcaacattgggaatcctcaatctcttggtcagctgcctataaagttcttccgtgaggttctcgcattgtgtgaccacgcaagtcttttggatgagtctgaaacccatggtttgttcagtaccgattcaattgaccgagcatggaggattttggaccatattcccggaagagcaactggggcttacagtcatagccagggtatcaagggtttacgtgatgtaattgcagctggaatcgaagcacgtgatggtttccctgctgatccaaatgatattttcttgactgatggtgcaagtccagcggttcacatgatgatgcaacttctcttgagctcagagaaagatggtattctttgcccgattcctcagtatccattgtactcggcttcaattgcccttcatggtggatctttggttccgtactatcttgatgaagcaacaggatggggactggaaatatctgaccttaagaagcaactagaggaagctaggtccaagggcatctctgtaagggccttggttgtcataaaccccggtaacccaactgggcaggttcttgcggaagaaaaccagcgtgacattgttaatttctgcaagcaagagggtttggttcttttagctgatgaagtctaccaagaaaaatgtttacgtccctgacaaaaagttccattctttcaagaaagtggctcggtctttgggctatggaaaaaagatatctcgttagtctcgttccaatcagtctccaaaggatattatggagaatgtggaaaaagaggaggttacatggaggttactggattcacttctgatgtaagagaacagatatacaaaatggcttctgtgaatctttgttctaacatctctggtcaaattcttgctagccttgtcatgagcccacccaagaaagagatggaattctctcatccatggctaaacgtgcaaagactttggaagacgctctcaacagtttagaaggtgttacatgtaacagagccgaaggagcaatgtatctcttcccgcgaattaaccttcctcaaaaggctatcgaagctgctgaggctgaaaaaactgcaccagatgcgttctactgcaaacgccttctcaatgctactggtgtagttgtagtccctggttctggctttggacaggttcctggaacatggcactttagatgcacaatacttccacaagaagacaagattccagcgatagtgaatcgtctgacagagttccacaagagcttcatggacgagttccgcaactaaaaggacctgaccatgaagatgaacttaaagacccttttgaagaaaagtgtgatcagtttgagttattaaaaaaaagaaaacttgtgttttgaatttgatcaggcaattgtgatcagctaatttaattttagaatattttgc

SEQ ID NO: 42905 - protein, 307 aa, Arabidopsis thaliana
  peptide (1)..(307): Ceres Seq. ID no. 12336498
HHHKSPSFLSPQPRPLASSPPALSRFFSSTSEMSASDSTSSLPITLDSINPKVLKCEYAVRGEIVNIAQKLQEDLKTNKDAYPFDEIIYCNIGNPQSLGQLPIKFFREVLALCDHASLLDESETHGLFSTDSIDRAWRILDHIPGRATGAYSHSQGIKGLRDVIAAGIEARDGFPADPNDIFLTDGASPAVHMMMQLLLSSEKDGILCPIPQYPLYSASIALHGGSLVPYYLDEATGWGLEISDLKKQLEEARSKGISVRALVVINPGNPTGQVLAEENQRDIVNFCKQEGLVLLADEVYQEKCLRP

SEQ ID NO: 42906 - protein, 275 aa, Arabidopsis thaliana
  peptide (1)..(275): Ceres Seq. ID no. 12336499
MSASDSTSSLPITLDSINPKVLKCEYAVRGEIVNIAQKLQEDLKTNKDAYPFDEIIYCNIGNPQSLGQLPIKFFREVLALCDHASLLDESETHGLFSTDSIDRAWRILDHIPGRATGAYSHSQGIKGLRDVIAAGIEARDGFPADPNDIFLTDGASPAVHMMMQLLLSSEKDGILCPIPQYPLYSASIALHGGSLVPYYLDEATGWGLEISDLKKQLEEARSKGISVRALVVINPGNPTGQVLAEENQRDIVNFCKQEGLVLLADEVYQEKCLRP

SEQ ID NO: 42907 - DNA, 1146 bp, Arabidopsis thaliana; identical to SEQ ID NO: 25459
  misc_feature (1)..(1146): Ceres Seq. ID no. 12336445
  misc_feature (1)..(1146): Ortholog of  Ceres SEQ ID NO 13599585 as cited in SEQ ID NO 988
  misc_feature (1)..(1146): Ortholog of  Ceres SEQ ID NO 13594624 as cited in SEQ ID NO 55765
  misc_feature (1)..(1146): Ortholog of  Ceres SEQ ID NO 15177682 as cited in SEQ ID NO 0

SEQ ID NO: 42908 - protein, 115 aa, Arabidopsis thaliana; identical to SEQ ID NO: 25460
  peptide (1)..(115): Ceres Seq. ID no. 12336446

SEQ ID NO: 42909 - protein, 97 aa, Arabidopsis thaliana; identical to SEQ ID NO: 25461
  peptide (1)..(97): Ceres Seq. ID no. 12336447

SEQ ID NO: 42910 - protein, 80 aa, Arabidopsis thaliana; identical to SEQ ID NO: 25462
  peptide (1)..(80): Ceres Seq. ID no. 12336448

SEQ ID NO: 42911 - protein, 69 aa, Arabidopsis thaliana; identical to SEQ ID NO: 25463
  peptide (1)..(69): Ceres Seq. ID no. 12336449

SEQ ID NO: 42912 - DNA, 960 bp, Arabidopsis thaliana
  misc_feature (1)..(960): Ceres Seq. ID no. 12603058
  misc_feature (1)..(960): Ortholog of  Ceres SEQ ID NO 14307801 as cited in SEQ ID NO 59512
  misc_feature (1)..(960): Ortholog of  Ceres SEQ ID NO 14309110 as cited in SEQ ID NO 0
  misc_feature (1)..(960): Ortholog of  Ceres SEQ ID NO 15225903 as cited in SEQ ID NO 0
gctttcgagggtggggagagagtagaagagaaatatcaaatttcccttcaaaagcctctcctctcttcgttcaagtttttttccttggatgtgcatgtttcttgtggaacaaggcagttctgtttttaagtaaaattcatggcgacggattcgttcatcaagttaaatccaatttcctttaaccgtgcccgcttcgacctccgagattttgctggcataagtcctaaaagcatctcttctctgtgttgcattagcccaagattgatatcttgcaaccatttcagcccgagaacattgatatccggcgagaatggtaacatattgttttccaagaaaaagatccccgcgtttgtccgatgtcagacaagtcttgggatcggaaggaaccaaaaatggtgggagaaggaattgaaaccgaacatgaagtcggttacatcaccgcaagatcttgtcgtctctttacgtaacgctggagataaacttgtcgttgttgatttcttctcgcctagttgtggtggctgcaaagctcttcatcccaagatatgtaaaattgcagagaagaatccggaagtagagtttctacaagtgaattatgaagaacatagaagtttatgtcaaagtcttaacattcatgttcttcccttcttccgcttctatcgtggttcctctggccgcgtttgcagcttcagttgtactaatgccacgataaggaaattcaaggaagcgttggagaagcatgggagggagcaatgtagcattggagaaacaaaggggcttgaggagaaagaacttgtcgccatggctgcaaataaagacttgtcattcgattataaacccacatcgtgtggaaatatccaagagcaaaaaaagaaagaaatatttctcccgaaatctccaacttttaataaacaaaaagaagtagaacattctctactactagttagtcctgctcctgcatga

SEQ ID NO: 42913 - protein, 273 aa, Arabidopsis thaliana
  peptide (1)..(273): Ceres Seq. ID no. 12603059
MATDSFIKLNPISFNRARFDLRDFAGISPKSISSLCCISPRLISCNHFSPRTLISGENGNILFSKKKIPAFVRCQTSLGIGRNQKWWEKELKPNMKSVTSPQDLVVSLRNAGDKLVVVDFFSPSCGGCKALHPKICKIAEKNPEVEFLQVNYEEHRSLCQSLNIHVLPFFRFYRGSSGRVCSFSCTNATIRKFKEALEKHGREQCSIGETKGLEEKELVAMAANKDLSFDYKPTSCGNIQEQKKKEIFLPKSPTFNKQKEVEHSLLLVSPAPA

SEQ ID NO: 42914 - protein, 179 aa, Arabidopsis thaliana
  peptide (1)..(179): Ceres Seq. ID no. 12603060
MKSVTSPQDLVVSLRNAGDKLVVVDFFSPSCGGCKALHPKICKIAEKNPEVEFLQVNYEEHRSLCQSLNIHVLPFFRFYRGSSGRVCSFSCTNATIRKFKEALEKHGREQCSIGETKGLEEKELVAMAANKDLSFDYKPTSCGNIQEQKKKEIFLPKSPTFNKQKEVEHSLLLVSPAPA

SEQ ID NO: 42915 - DNA, 1525 bp, Arabidopsis thaliana
  misc_feature (1)..(1525): Ceres Seq. ID no. 12601754
  misc_feature (1)..(1525): Ortholog of  Ceres SEQ ID NO 14308099 as cited in SEQ ID NO 58651
  misc_feature (1)..(1525): Ortholog of  Ceres SEQ ID NO 13596893 as cited in SEQ ID NO 62932
attctctctcaacggtaaagatccgccattttcaccgatctctgtttcttctcgtttggatctttggaaattttagagtttgttcgttctctctcgtatctcattttggaattgaatcgttagtggatttgatcgggaaatgagtgttttcgcgttcgattagtgtttatcagtctctggatctgtgattttgattttgttttctccagttttcgttttgaaatggcgaggaagaagatcagagagtatgactcaaagaggttggtgaaggaacatttcaaaaggctttctggcaaagagcttcctatcagatccgttcagattaatgaaacaactgatctaaatgagctagttgaaaaggaaccttggctctcgtctgagaagctggtggtgaaacctgacatgttgtttggaaagcgtggcaagagtggtttggttgccttgaaattagattttgctgatgttgccacttttgttaaagaacgtttgggaaaagaggtagagatgagtggatgcaaaggacccataacaacattcatagttgaaccatttgttccacacaatgaggagtattatctcaatgttgtctcggatcggcttggttgcagcataagcttttctgagtgtggaggaattgagatcgaggagaactgggacaaggtcaagacaatatttttaccaacaggtgcttccctgacacctgaaatatgtgcacctcttgtcgcaactcttcccttagagatcaaagctgaaattgaagaatttatcaaagtcattttcaccctattccaagatcttgatttcactttcttggagatgaatcctttcactctagttgatggaagtccttatcctctggatatgaggggtgagcttgatgatactgctgccttcaaaaactttaaaaaatggggcgacattgaatttcctctgccatttggaagagtaatgagtcctacagaaagctttatccacggactggatgagaagacaagtgcgtctttgaagtttaccgttctgaaccccaagggacggatttggacaatggtagctggtggaggagcaagtgtcatctatgcggatacggttggagatctcgggtatgcatctgaacttggcaactatgctgaatacagtggagcacccaaagaagatgaggttttgcagtacgccagagtcgttattgattgtgctacagcaaacccggatggaaaaagcagagcccttgtcatcggaggcggaattgccaacttcactgacgttgctgctactttcaatggcataatccgcgctcttaaagaaaaggaagcaaagctgaaagcagcaaggatgcatatatttgtgaggagaggaggaccaaactaccaaaagggacttgctaaaatgcgagcccttggagatgatatcggtgtccccatcgaggtctatggcccagaagcaaccatgacaggtatctgcaaggaggcaatccagtacatcacagcagcagcataagcttctctcagtaccttctatgaccaaaact

SEQ ID NO: 42916 - protein, 423 aa, Arabidopsis thaliana; identical to SEQ ID NO: 23456
  peptide (1)..(423): Ceres Seq. ID no. 12601755

SEQ ID NO: 42917 - protein, 363 aa, Arabidopsis thaliana; identical to SEQ ID NO: 23457
  peptide (1)..(363): Ceres Seq. ID no. 12601756

SEQ ID NO: 42918 - protein, 329 aa, Arabidopsis thaliana; identical to SEQ ID NO: 23458
  peptide (1)..(329): Ceres Seq. ID no. 12601757

SEQ ID NO: 42919 - DNA, 661 bp, Arabidopsis thaliana
  misc_feature (1)..(661): Ceres Seq. ID no. 12422313
  misc_feature (1)..(661): Ortholog of  Ceres SEQ ID NO 14304353 as cited in SEQ ID NO 20380
  misc_feature (1)..(661): Ortholog of  Ceres SEQ ID NO 12562293 as cited in SEQ ID NO 20690
atcacttacttaacatactaagagagttattagaacttgcaaaaaatggcttccaaggctttgattctgttaggtctcttctcagttcttctcgtcgtctccgaagtgtctgccgcaaggaantcgggcatggtgaagccagagagtgaggaaactgtgcaacctgaaggttatggcggtggccacggacatggaggacacaacggaggagggggccacggacttgacggatacggaggaggtggaggacactatggaggaggtggaggacactacggaggaggtggaggacactacggaggaggtggaggacactacggaggaggtggtggaggacacggaggtggaggacactacggaggtggtggaggaggatacggaggtggaggaggacaccacggaggaggaggccacgggctaaacgaacctgttcagactaagccgggtgtttaaaactatataatatcttcactaccatgcatgattgcatatatatatatacgcttatgtattatctatatgcctataaataaaccatggtgagtttgtaacgcagtgccttcagaaatgttcggaataaatttccataatattagtataatgtctctctgtttgaattataaactgcgctgtttgcataataaaatctcttgtagctagg

SEQ ID NO: 42920 - protein, 135 aa, Arabidopsis thaliana
  peptide (1)..(135): Ceres Seq. ID no. 12422314
  misc_feature (26)..(26): Xaa is any aa, unknown or other
MASKALILLGLFSVLLVVSEVSAARXSGMVKPESEETVQPEGYGGGHGHGGHNGGGGHGLDGYGGGGGHYGGGGGHYGGGGGHYGGGGGHYGGGGGGHGGGGHYGGGGGGYGGGGGHHGGGGHGLNEPVQTKPGV

SEQ ID NO: 42921 - protein, 107 aa, Arabidopsis thaliana
  peptide (1)..(107): Ceres Seq. ID no. 12422315
MVKPESEETVQPEGYGGGHGHGGHNGGGGHGLDGYGGGGGHYGGGGGHYGGGGGHYGGGGGHYGGGGGGHGGGGHYGGGGGGYGGGGGHHGGGGHGLNEPVQTKPGV

SEQ ID NO: 42922 - protein, 82 aa, Arabidopsis thaliana
  peptide (1)..(82): Ceres Seq. ID no. 12422316
MAVATDMEDTTEEGATDLTDTEEVEDTMEEVEDTTEEVEDTTEEVEDTTEEVVEDTEVEDTTEVVEEDTEVEEDTTEEEATG

SEQ ID NO: 42923 - DNA, 1804 bp, Arabidopsis thaliana
  misc_feature (1)..(1804): Ceres Seq. ID no. 13494156
  misc_feature (1)..(1804): Ortholog of  Ceres SEQ ID NO 13657677 as cited in SEQ ID NO 66119
agtcacaaaaacctctgcaagaaccctaaagctaaaacctttttgcgatcaatcgaaagaaaacaaaaaatggggaaagttccgtcgtcgtttcgtagtatgccggcgaacttattggtcagaaaaacaacaccatctcctccagcgccgccgcgagattttcgcaacagaaccgccgtgggaggagattcagccaaacttccccagaatactcaagcccctcgcgagccctccttgaggaatccattcaagtcaccaaatctctcagacgctaaaagcctcttcaattcaatcgccgccacttcacgaatcccactcgatctcaagttccacaactctgttcttcaatcatacggttcaatcgccgtcgtcaacgatacggtgaaactctttcagcatattttgaaatcgcagcctaatttcaggccgggacgttcaacgttccttatcttgctttcacatgcttgtagagctcctgattcgtcgatttcgaatgttcatagagttcttaatctcatggttaataatggtttagagcctgatcaagtaactaccgatatcgcggtgaggtctctttgcgaaacgggtcgggttgatgaagctaaggatttgatgaaggagctcactgagaaacactctcctccggatacatatacttataactttctactgaagcatttgtgcaaatgcaaagatcttcatgttgtttatgagtttgttgatgagatgagagatgatttcgatgttaagccggatcttgttagcttcactatcttgattgataatgtttgtaactctaagaacttgagggaggcaatgtatctagttagtaagttaggtaatgctgggtttaagccggattgtttcctctataacacgattatgaaaggtttttgcacactgagtaaagggagtgaggcggttggtgtgtataagaaaatgaaggaagaaggtgttgagccagatcagattacctacaatactttgatatttggactgtcgaaagctggtagagttgaggaagctaggatgtatttgaaaactatggttgatgcggggtatgagccggatactgctacttacacatcactgatgaatggaatgtgtagaaaaggtgagtctttaggtgcgttgagtttgttagaagaaatggaagcaagagggtgtgctccaaatgattgtacttataatactttgcttcatggattgtgtaaagcaaggttgatggataaagggatggagttatatgaaatgatgaaatcaagtggtgtaaagcttgagagtaatggttatgctacacttgtgaggtctctggttaaaagtggcaaggtcgcagaggcttatgaagtgtttgattatgcagttgatagcaagagtttgtcagatgcttctgcgtactctacacttgaaactaccttgaaatggttgaaaaaagctaaagaacaaggcttggttccataaatggtatcctctagctgagctttaccgactttcttctttatgcaagtccatatttcatttttgaagtagtgttactccaaaagcaatgaatttgtttcgaaatatgctgttcgattcttaagggaccagcagtgatttataatagtaactttgttggtaatattattgtcacttgagatttctaaaggtttccttaacactcgagttattgattgggtgaaagttgttgctgtgtttctatatgaacagtcatattctattattctgtttgtatcagcttcttgccttcagtgtcatgtactctgttcttatgagctattgtgaataccataattggttattg

SEQ ID NO: 42924 - protein, 486 aa, Arabidopsis thaliana
  peptide (1)..(486): Ceres Seq. ID no. 13494157
SHKNLCKNPKAKTFLRSIERKQKMGKVPSSFRSMPANLLVRKTTPSPPAPPRDFRNRTAVGGDSAKLPQNTQAPREPSLRNPFKSPNLSDAKSLFNSIAATSRIPLDLKFHNSVLQSYGSIAVVNDTVKLFQHILKSQPNFRPGRSTFLILLSHACRAPDSSISNVHRVLNLMVNNGLEPDQVTTDIAVRSLCETGRVDEAKDLMKELTEKHSPPDTYTYNFLLKHLCKCKDLHVVYEFVDEMRDDFDVKPDLVSFTILIDNVCNSKNLREAMYLVSKLGNAGFKPDCFLYNTIMKGFCTLSKGSEAVGVYKKMKEEGVEPDQITYNTLIFGLSKAGRVEEARMYLKTMVDAGYEPDTATYTSLMNGMCRKGESLGALSLLEEMEARGCAPNDCTYNTLLHGLCKARLMDKGMELYEMMKSSGVKLESNGYATLVRSLVKSGKVAEAYEVFDYAVDSKSLSDASAYSTLETTLKWLKKAKEQGLVP

SEQ ID NO: 42925 - protein, 463 aa, Arabidopsis thaliana
  peptide (1)..(463): Ceres Seq. ID no. 13494158
MGKVPSSFRSMPANLLVRKTTPSPPAPPRDFRNRTAVGGDSAKLPQNTQAPREPSLRNPFKSPNLSDAKSLFNSIAATSRIPLDLKFHNSVLQSYGSIAVVNDTVKLFQHILKSQPNFRPGRSTFLILLSHACRAPDSSISNVHRVLNLMVNNGLEPDQVTTDIAVRSLCETGRVDEAKDLMKELTEKHSPPDTYTYNFLLKHLCKCKDLHVVYEFVDEMRDDFDVKPDLVSFTILIDNVCNSKNLREAMYLVSKLGNAGFKPDCFLYNTIMKGFCTLSKGSEAVGVYKKMKEEGVEPDQITYNTLIFGLSKAGRVEEARMYLKTMVDAGYEPDTATYTSLMNGMCRKGESLGALSLLEEMEARGCAPNDCTYNTLLHGLCKARLMDKGMELYEMMKSSGVKLESNGYATLVRSLVKSGKVAEAYEVFDYAVDSKSLSDASAYSTLETTLKWLKKAKEQGLVP

SEQ ID NO: 42926 - protein, 453 aa, Arabidopsis thaliana
  peptide (1)..(453): Ceres Seq. ID no. 13494159
MPANLLVRKTTPSPPAPPRDFRNRTAVGGDSAKLPQNTQAPREPSLRNPFKSPNLSDAKSLFNSIAATSRIPLDLKFHNSVLQSYGSIAVVNDTVKLFQHILKSQPNFRPGRSTFLILLSHACRAPDSSISNVHRVLNLMVNNGLEPDQVTTDIAVRSLCETGRVDEAKDLMKELTEKHSPPDTYTYNFLLKHLCKCKDLHVVYEFVDEMRDDFDVKPDLVSFTILIDNVCNSKNLREAMYLVSKLGNAGFKPDCFLYNTIMKGFCTLSKGSEAVGVYKKMKEEGVEPDQITYNTLIFGLSKAGRVEEARMYLKTMVDAGYEPDTATYTSLMNGMCRKGESLGALSLLEEMEARGCAPNDCTYNTLLHGLCKARLMDKGMELYEMMKSSGVKLESNGYATLVRSLVKSGKVAEAYEVFDYAVDSKSLSDASAYSTLETTLKWLKKAKEQGLVP

SEQ ID NO: 42927 - DNA, 1252 bp, Arabidopsis thaliana
  misc_feature (1)..(1252): Ceres Seq. ID no. 12604923
  misc_feature (1)..(1252): Ortholog of  Ceres SEQ ID NO 14307526 as cited in SEQ ID NO 58875
tctctctctataatccgatctgagaaatttcgccggagctaggttttgttgtttaccgatcaatcctttaatcaatggcaatggctgttttccgtcgcgaagggaggcgtctcctcccttcaatcgccgctcgcccaatcgctgctatccgatctcctctctcttctgaccaggaggaaggacttcttggagttcgatctatctcaactcaagtggtgcgtaaccgcatgaagagtgttaagaacatccaaaagatcacaaaggcaatgaagatggttgctgcttccaagcttagagcagttcaaggccgagctgagaactcccgtggactttggcagccatttactgcacttctaggagataatcccagcattgatgtaaagaagagtgtggtggtcactctctcttctgacaagggtctctgtggtggaatcaactccactgtcgttaaagtgagcagggctctgtacaaattgaatgctggtcctgaaaaggaagttcagtttgttattgtcggagagaaagcaaaggctataatgtttcgtgactcaaagaacgacattgtcctctctgtaacagagctgaataagaacccactcaattatgctcaggtgtcagttctagctgatgacatcctgaagaacgttgaatttgatgctttgcgcattgtctacaacaagttccattcagttgtcgcatttctgccaactgtgtccactgttttgtcacctgagattattgagaaggagtctgaaattggaggaaaacttggcgagcttgactcatatgagattgaaggtggggaaacaaagggagaaatattgcagaatctggccgagttccaattctcttgtgtgatgttcaatgcggttctggagaatgcatgtagtgagatgggagcaagaatgtctgccatggacagctcaagcagaaacgcaggagaaatgctcgaccgtctcaccctcacatacaacaggactcgtcaagcttctattacaacagagcttattgagattatctctggagcttctgctcttgaagctgctaaataagcccatccgtgttagttctcttttcttcgctttgatatttacccccaccttgaaggagaagagtgtgttaaaattttactgaatcagtttcctttgctggcttcttgttgagacctaccaatgtttgctcaacgatttttaataaacatacctgtaatttccagcaggatttcgaataattgcattaacattttgttctg

SEQ ID NO: 42928 - protein, 325 aa, Arabidopsis thaliana; identical to SEQ ID NO: 36222
  peptide (1)..(325): Ceres Seq. ID no. 12604924

SEQ ID NO: 42929 - protein, 323 aa, Arabidopsis thaliana; identical to SEQ ID NO: 36223
  peptide (1)..(323): Ceres Seq. ID no. 12604925

SEQ ID NO: 42930 - protein, 274 aa, Arabidopsis thaliana; identical to SEQ ID NO: 36224
  peptide (1)..(274): Ceres Seq. ID no. 12604926

SEQ ID NO: 42931 - DNA, 1134 bp, Arabidopsis thaliana
  misc_feature (1)..(1134): Ceres Seq. ID no. 12370937
  misc_feature (1)..(1134): Ortholog of  Ceres SEQ ID NO 13596108 as cited in SEQ ID NO 68591
gaactatctctttttgctttacaaagataggtgtgccaataataaaggagtgaatattataagttcaaaatgtagcacggattgtgatgctgaggtttcttcttcagggaataactcagacgaagacagcttatctattgttgaaaataaacagttgtttgggagagatagaaaagaacaagagactaaagtttgtttgtcccctccagaaacgcctacttacgcctttgctaaacagcggcatgcttttgcgggtgcgttggccggcataagcgtcagtctttgtcttcatccacttgataccgttaagacaatgattcagtcatgccgcttggaggagaagtctctatgcaatactgggagatcaattatatcagaaagagggttttctggactttatcgggggattgctagtaacattgcctcgtcagctcctatatctgccctctatacgttcacttatgaaaccgttaaaggaactctgcttcctcttgttcctaaggaatattgctccattacccactgtgtagctggtggttctgcaagcattgcaacttcttttatcttcacgccaagtgagcgcataaaacaacagatgcaagtcagttcacattatcgcaattgctggaccgcattggttggaatcatccaaaagggtggtctgctttctttatatgctggatggactgcagtgctatgtagaaatatcccgcactcaatcattaagttctatgtctatgaaaacatgaagcagatgttattaccatccccaggccctcgtggtgaaatggctcaacccacaacattacaaacactcacctgtggaggactagcgggatctgctgctgctttcttcacaaccccatttgatgtagtaaaaacaagattacaaactcagattcccggatctaggaaccaacatcctagtgtctatcaaactcttcaatcaatacgcaggcaagaaggtctgagaggactatacagaggcttgatccccagactagtgatgtacatgtcgcaaggagccatattctttacttcgtatgaattttacaagagtgtactctctctagaagcggcgcagcccaattcatcagctctctctggaacaaaacaaaagatggagatagccct

SEQ ID NO: 42932 - protein, 377 aa, Arabidopsis thaliana
  peptide (1)..(377): Ceres Seq. ID no. 12370938
NYLFLLYKDRCANNKGVNIISSKCSTDCDAEVSSSGNNSDEDSLSIVENKQLFGRDRKEQETKVCLSPPETPTYAFAKQRHAFAGALAGISVSLCLHPLDTVKTMIQSCRLEEKSLCNTGRSIISERGFSGLYRGIASNIASSAPISALYTFTYETVKGTLLPLVPKEYCSITHCVAGGSASIATSFIFTPSERIKQQMQVSSHYRNCWTALVGIIQKGGLLSLYAGWTAVLCRNIPHSIIKFYVYENMKQMLLPSPGPRGEMAQPTTLQTLTCGGLAGSAAAFFTTPFDVVKTRLQTQIPGSRNQHPSVYQTLQSIRRQEGLRGLYRGLIPRLVMYMSQGAIFFTSYEFYKSVLSLEAAQPNSSALSGTKQKMEIA

SEQ ID NO: 42933 - protein, 273 aa, Arabidopsis thaliana
  peptide (1)..(273): Ceres Seq. ID no. 12370939
MIQSCRLEEKSLCNTGRSIISERGFSGLYRGIASNIASSAPISALYTFTYETVKGTLLPLVPKEYCSITHCVAGGSASIATSFIFTPSERIKQQMQVSSHYRNCWTALVGIIQKGGLLSLYAGWTAVLCRNIPHSIIKFYVYENMKQMLLPSPGPRGEMAQPTTLQTLTCGGLAGSAAAFFTTPFDVVKTRLQTQIPGSRNQHPSVYQTLQSIRRQEGLRGLYRGLIPRLVMYMSQGAIFFTSYEFYKSVLSLEAAQPNSSALSGTKQKMEIA

SEQ ID NO: 42934 - DNA, 1516 bp, Arabidopsis thaliana
  misc_feature (1)..(1516): Ceres Seq. ID no. 13489432
  misc_feature (1)..(1516): Ortholog of  Ceres SEQ ID NO 14314264 as cited in SEQ ID NO 57374
acacactctgcaacacctctcactcaaatttcattcaccatgttctctctcaaatccttaatctcctcacctttcacacaatccaccactcatggattattcaccaacccgattacccgacccgttaatccattaccacgtaccgtttccttcaccgttaccgcttccatgatacccaaaagatcctcagctaacatgattcccaaaaaccctccggcgaggcaacagctctaccaaccgttccgaccaccgtcatctcccattccaacccaattccgttcactcgactccgccggtaaaatcgaaatcctcgccggtcgaatggctctctggttcgaatacgcacctcttatctcttctctttacaccgatggtttcactcctccaaccatcgaagaactcaccggaatctcaagcatcgaacagaaccgtttaatcgtcggtgcgcaagttcgtgactcaattcttcaatctatccatgaaccggagctcatttctgcgttcgacaccggtggtgcagagcttctatacgaaattcgtctccttagcaccacgcagcgtgttgcagccgccacattcatcattgatcgtaatattgattcgaaaggagcacaggatttggcacgagccatcaaggattatcctaaccgtcgtggagacgttggatggttggattttgattacaacttaccaggagattgtctttcattcttgtattacaggcagagcagagagaataagaatccatcggatcagagaacctcgatgcttctacaagcattgggggttgcagaatcagaaaaggctaagaacaggttgaacacagagctatacggggacaaggaagcagagaaggagaaggagaagaagaagaaggaagaggaagtcaaagctattcggattccagtggtgaggcttaagtttggagaagtagcagaagcgacctcggtggtagttttaccggtttgtaaagcagaggaaggggaaaagaagattcttgaagctccaatggagatcatagccggaggggattttaaggtggttgaggcggagaaaggatggaagagatgggtagtgcttccgtcgtggaacccagtggcagccattgggaaaggcggtgtggcggtttctttcagggatgatagaaaagtgctgccttgggatggaaaggaggagcctttactggtagtggccgatagggtgaggaatgttgtggaggctgatgacgggtattatctcgtggtggctgagaacggacttaagctagagaaaggatcagatttgaaggcgagagaggtgaaggagagtttagggatggttgttttggtggtgaggccgccaagagaagatgatgatgattggcagacaagtcatcagaactgggactgaattaatagaatcaatactcatatgctgtaactgattacggagtcatcatggtcatgtaaaaattttggataaaggtggtaactttttgttctaagatacaatcagaaacagagcaatatttttctcc

SEQ ID NO: 42935 - protein, 462 aa, Arabidopsis thaliana
  peptide (1)..(462): Ceres Seq. ID no. 13489433
THSATPLTQISFTMFSLKSLISSPFTQSTTHGLFTNPITRPVNPLPRTVSFTVTASMIPKRSSANMIPKNPPARQQLYQPFRPPSSPIPTQFRSLDSAGKIEILAGRMALWFEYAPLISSLYTDGFTPPTIEELTGISSIEQNRLIVGAQVRDSILQSIHEPELISAFDTGGAELLYEIRLLSTTQRVAAATFIIDRNIDSKGAQDLARAIKDYPNRRGDVGWLDFDYNLPGDCLSFLYYRQSRENKNPSDQRTSMLLQALGVAESEKAKNRLNTELYGDKEAEKEKEKKKKEEEVKAIRIPVVRLKFGEVAEATSVVVLPVCKAEEGEKKILEAPMEIIAGGDFKVVEAEKGWKRWVVLPSWNPVAAIGKGGVAVSFRDDRKVLPWDGKEEPLLVVADRVRNVVEADDGYYLVVAENGLKLEKGSDLKAREVKESLGMVVLVVRPPREDDDDWQTSHQNWD

SEQ ID NO: 42936 - protein, 449 aa, Arabidopsis thaliana
  peptide (1)..(449): Ceres Seq. ID no. 13489434
MFSLKSLISSPFTQSTTHGLFTNPITRPVNPLPRTVSFTVTASMIPKRSSANMIPKNPPARQQLYQPFRPPSSPIPTQFRSLDSAGKIEILAGRMALWFEYAPLISSLYTDGFTPPTIEELTGISSIEQNRLIVGAQVRDSILQSIHEPELISAFDTGGAELLYEIRLLSTTQRVAAATFIIDRNIDSKGAQDLARAIKDYPNRRGDVGWLDFDYNLPGDCLSFLYYRQSRENKNPSDQRTSMLLQALGVAESEKAKNRLNTELYGDKEAEKEKEKKKKEEEVKAIRIPVVRLKFGEVAEATSVVVLPVCKAEEGEKKILEAPMEIIAGGDFKVVEAEKGWKRWVVLPSWNPVAAIGKGGVAVSFRDDRKVLPWDGKEEPLLVVADRVRNVVEADDGYYLVVAENGLKLEKGSDLKAREVKESLGMVVLVVRPPREDDDDWQTSHQNWD

SEQ ID NO: 42937 - protein, 406 aa, Arabidopsis thaliana
  peptide (1)..(406): Ceres Seq. ID no. 13489435
MIPKRSSANMIPKNPPARQQLYQPFRPPSSPIPTQFRSLDSAGKIEILAGRMALWFEYAPLISSLYTDGFTPPTIEELTGISSIEQNRLIVGAQVRDSILQSIHEPELISAFDTGGAELLYEIRLLSTTQRVAAATFIIDRNIDSKGAQDLARAIKDYPNRRGDVGWLDFDYNLPGDCLSFLYYRQSRENKNPSDQRTSMLLQALGVAESEKAKNRLNTELYGDKEAEKEKEKKKKEEEVKAIRIPVVRLKFGEVAEATSVVVLPVCKAEEGEKKILEAPMEIIAGGDFKVVEAEKGWKRWVVLPSWNPVAAIGKGGVAVSFRDDRKVLPWDGKEEPLLVVADRVRNVVEADDGYYLVVAENGLKLEKGSDLKAREVKESLGMVVLVVRPPREDDDDWQTSHQNWD

SEQ ID NO: 42938 - DNA, 1638 bp, Arabidopsis thaliana
  misc_feature (1)..(1638): Ceres Seq. ID no. 12326934
  misc_feature (1)..(1638): Ortholog of  Ceres SEQ ID NO 13597574 as cited in SEQ ID NO 64677
  misc_feature (1)..(1638): Ortholog of  Ceres SEQ ID NO 12617417 as cited in SEQ ID NO 65089
  misc_feature (1)..(1638): Ortholog of  Ceres SEQ ID NO 13591190 as cited in SEQ ID NO 68044
  misc_feature (1)..(1638): Ortholog of  Ceres SEQ ID NO 13595961 as cited in SEQ ID NO 68223
aaactaagaaacacccaagaaaacaaacaaactttttaaaaaatgtccgtttcaacacatcaccaccacgtggtcctcttcccttacatgtcaaaaggccacatcatccctctcctccaattcggtcgtctcctcctccgtcaccaccgcaaagaaccaaccatcaccgtcaccgttttcaccactcccaagaaccaacctttcatctcagacttcctctcggacacgccggagatcaaagtcatctctctccctttcccggaaaacatcaccggaatccctcccggcgtcgagaacaccgaaaggctcccatccatgtcacttttcgtccccttcacacgcgccacgaagcttctccaacctttcttcgaagaaacactcaagactcttccaaaagtttcgttcatggtctctgatggattcctctggtggacatcggagtctgcagctaagttcaacattccaagatttgtctcctacggcatgaactcttactccgccgctgtctccatctctgttttcaaacacgaactctttaccgaaccggaaagtaaatctgataccgaaccggtcactgtaccagactttccatggatcaagatcaagaagtgtgatttcgaccatggcactaccgagccggaagaatcaggtgcagccctcgaactatctatggaccaaatcaagtcgaccaccacaagccatgggtttttagtcaatagcttctacgagctcgagtcagcatttgttgattacaacaacaactctggtgataaaccaaagtcgtggtgtgttgggccactgtgtttgacagatcctcctaaacaggggagtgctaaaccggcttggattcattggttggatcagaagcgagaggaagggcgtccggttttgtacgtggcgtttggaacgcaggcagagatatcgaacaagcagcttatggaactagctttcggcttggaagattcaaaggtgaactttctgtgggtcacaagaaaagatgtggaggagattattggagaaggattcaacgatagaataagagagagtgggatgatagtgagagattgagtggaccaatgggagatattgtcacatgaaagtgtcaaaggatttttgagccattgtgggtggaactcagcacaagagagcatatgtgtcggggtcccattgttggcttggccgatgatggccgagcaaccgctcaatgcgaagatggttgtggaggagataaaggtgggagtaagagttgaaacggaagatgggagtgtaaaaggttttgtgacaagagaagaactaagtggaaagattaaagaactgatggaaggagaaacggggaaaaccgcaagaaagaatgtaaaagaatattcgaaaatggcgaaagcggctttggtcgaagggactggttcgtcatggaagaatttagatatgattcttaaggagttatgtaagagtagagattcaaacggtgctagtgagtagagtgattaagaattgaataactgaaccagtctatacgtttactaattaaaacaagtattttcaatatacgtcttgtgtaagtcttggtttagttgaaaagatgttatcgattacaataactgactctctcatttgataatactgactatgattaatatt

SEQ ID NO: 42939 - protein, 341 aa, Arabidopsis thaliana
  peptide (1)..(341): Ceres Seq. ID no. 12326935
MSVSTHHHHVVLFPYMSKGHIIPLLQFGRLLLRHHRKEPTITVTVFTTPKNQPFISDFLSDTPEIKVISLPFPENITGIPPGVENTERLPSMSLFVPFTRATKLLQPFFEETLKTLPKVSFMVSDGFLWWTSESAAKFNIPRFVSYGMNSYSAAVSISVFKHELFTEPESKSDTEPVTVPDFPWIKIKKCDFDHGTTEPEESGAALELSMDQIKSTTTSHGFLVNSFYELESAFVDYNNNSGDKPKSWCVGPLCLTDPPKQGSAKPAWIHWLDQKREEGRPVLYVAFGTQAEISNKQLMELAFGLEDSKVNFLWVTRKDVEEIIGEGFNDRIRESGMIVRD

SEQ ID NO: 42940 - protein, 326 aa, Arabidopsis thaliana
  peptide (1)..(326): Ceres Seq. ID no. 12326936
MSKGHIIPLLQFGRLLLRHHRKEPTITVTVFTTPKNQPFISDFLSDTPEIKVISLPFPENITGIPPGVENTERLPSMSLFVPFTRATKLLQPFFEETLKTLPKVSFMVSDGFLWWTSESAAKFNIPRFVSYGMNSYSAAVSISVFKHELFTEPESKSDTEPVTVPDFPWIKIKKCDFDHGTTEPEESGAALELSMDQIKSTTTSHGFLVNSFYELESAFVDYNNNSGDKPKSWCVGPLCLTDPPKQGSAKPAWIHWLDQKREEGRPVLYVAFGTQAEISNKQLMELAFGLEDSKVNFLWVTRKDVEEIIGEGFNDRIRESGMIVRD

SEQ ID NO: 42941 - protein, 250 aa, Arabidopsis thaliana
  peptide (1)..(250): Ceres Seq. ID no. 12326937
MSLFVPFTRATKLLQPFFEETLKTLPKVSFMVSDGFLWWTSESAAKFNIPRFVSYGMNSYSAAVSISVFKHELFTEPESKSDTEPVTVPDFPWIKIKKCDFDHGTTEPEESGAALELSMDQIKSTTTSHGFLVNSFYELESAFVDYNNNSGDKPKSWCVGPLCLTDPPKQGSAKPAWIHWLDQKREEGRPVLYVAFGTQAEISNKQLMELAFGLEDSKVNFLWVTRKDVEEIIGEGFNDRIRESGMIVRD

SEQ ID NO: 42942 - DNA, 1671 bp, Arabidopsis thaliana
  misc_feature (1)..(1671): Ceres Seq. ID no. 12489603
  misc_feature (1)..(1671): Ortholog of  Ceres SEQ ID NO 15227226 as cited in SEQ ID NO 54691
  misc_feature (1)..(1671): Ortholog of  Ceres SEQ ID NO 14303169 as cited in SEQ ID NO 65741
agattcaaacttgttcatcgaaattttgcttgaagattcgaatcgagaagtccgtggaagaggaagaagaagaagatgtctgtgcaagagtatttagacaagcatatgctttctcggaaaatcgaagacgccgttaatgccgccgtaagggctaaaacctcagatcccgttctcttcatcgctaatcatctgaagaaagctgtatcatctgtgataacgaaggttaaagcacgacagatccttgacagcagaggaattccaacagttgaagttgatctgcacacgaacaaaggcgtttttcgtgcttctgttcccagtggtgattcttctggaacgtatgaagctattgagctacgtgatggagacaaaggaatgtatcttggaaacagtgtggctaaagctgttaagaacataaatgaaaaaatttctgaggcgttgattggtatggacccaaaacttcagggtcagatagatcaggctatgatagatttggataaaactgaaaagaagagtgaacttggtgctaatgctatacttgctgtgtcaattgcggcatgcaaggctggagctgctgagaaagaggtccctttgtgcaagcatctttctgatcttagtggcagagcaaacatggtgttacctgtacctgcgttcactgttttgagtggtgggaagcatgcttcgaatacttttgccattcaggaaattatgattctcccaattggagcaagtagatttgaggaggccctgcaatggggatctgagacatatcatcatttaaaggctgtcatttcagaaaagaatggtggtttgggatgtaatgttggtgaagatggtggtcttgctccagatatctcgagcctcaaggaaggtttggagcttgtaaaagaagctatcaaccgaacagggtacaatgataagataaagatagccattgatattgccgccactaatttttgtttaggtaccaagtatgatttagatatcaagtctccaaataaatctgggcaaaatttcaagtcagcggaagatatgatagatatgtacaaagaaatttgtaatgattatccaattgtgtctatagaggacccttttgacaaggaggactgggaacacaccaagtatttttcgagtcttggaatatgtcaggtggtaggtgacgatttgttgatgtcaaattcaaaacgagttgagcgtgccatacaggagtcttcttgtaatgctcttcttctcaaggtgaatcagattggtacagtaacagaagccattgaagtagtgaaaatggcaagggatgcccagtggggtgtggtgacatctcatagatgtggagaaacagaggactctttcatctctgacttatctgtgggtctcgcaacaggtgtgattaaagctggtgctccttgcagaggagaacgtactatgaagtataaccagttgctacggatagaggaagagcttggggatcaagcagtgtatgctggagaagattggaagctatctctctaaacaaaatgcacatgtgatattaattgttacacttctcgtcttacttcattgttctcgagtctatttctcacgcagacaaattcttgtgtcttgaaagttcaaattttttgttgtttttgccaaatttaagaacaaacagaagtaaagagtgttaaacatgttttttac

SEQ ID NO: 42943 - protein, 475 aa, Arabidopsis thaliana
  peptide (1)..(475): Ceres Seq. ID no. 12489604
MSVQEYLDKHMLSRKIEDAVNAAVRAKTSDPVLFIANHLKKAVSSVITKVKARQILDSRGIPTVEVDLHTNKGVFRASVPSGDSSGTYEAIELRDGDKGMYLGNSVAKAVKNINEKISEALIGMDPKLQGQIDQAMIDLDKTEKKSELGANAILAVSIAACKAGAAEKEVPLCKHLSDLSGRANMVLPVPAFTVLSGGKHASNTFAIQEIMILPIGASRFEEALQWGSETYHHLKAVISEKNGGLGCNVGEDGGLAPDISSLKEGLELVKEAINRTGYNDKIKIAIDIAATNFCLGTKYDLDIKSPNKSGQNFKSAEDMIDMYKEICNDYPIVSIEDPFDKEDWEHTKYFSSLGICQVVGDDLLMSNSKRVERAIQESSCNALLLKVNQIGTVTEAIEVVKMARDAQWGVVTSHRCGETEDSFISDLSVGLATGVIKAGAPCRGERTMKYNQLLRIEEELGDQAVYAGEDWKLSL

SEQ ID NO: 42944 - protein, 465 aa, Arabidopsis thaliana
  peptide (1)..(465): Ceres Seq. ID no. 12489605
MLSRKIEDAVNAAVRAKTSDPVLFIANHLKKAVSSVITKVKARQILDSRGIPTVEVDLHTNKGVFRASVPSGDSSGTYEAIELRDGDKGMYLGNSVAKAVKNINEKISEALIGMDPKLQGQIDQAMIDLDKTEKKSELGANAILAVSIAACKAGAAEKEVPLCKHLSDLSGRANMVLPVPAFTVLSGGKHASNTFAIQEIMILPIGASRFEEALQWGSETYHHLKAVISEKNGGLGCNVGEDGGLAPDISSLKEGLELVKEAINRTGYNDKIKIAIDIAATNFCLGTKYDLDIKSPNKSGQNFKSAEDMIDMYKEICNDYPIVSIEDPFDKEDWEHTKYFSSLGICQVVGDDLLMSNSKRVERAIQESSCNALLLKVNQIGTVTEAIEVVKMARDAQWGVVTSHRCGETEDSFISDLSVGLATGVIKAGAPCRGERTMKYNQLLRIEEELGDQAVYAGEDWKLSL

SEQ ID NO: 42945 - protein, 376 aa, Arabidopsis thaliana
  peptide (1)..(376): Ceres Seq. ID no. 12489606
MYLGNSVAKAVKNINEKISEALIGMDPKLQGQIDQAMIDLDKTEKKSELGANAILAVSIAACKAGAAEKEVPLCKHLSDLSGRANMVLPVPAFTVLSGGKHASNTFAIQEIMILPIGASRFEEALQWGSETYHHLKAVISEKNGGLGCNVGEDGGLAPDISSLKEGLELVKEAINRTGYNDKIKIAIDIAATNFCLGTKYDLDIKSPNKSGQNFKSAEDMIDMYKEICNDYPIVSIEDPFDKEDWEHTKYFSSLGICQVVGDDLLMSNSKRVERAIQESSCNALLLKVNQIGTVTEAIEVVKMARDAQWGVVTSHRCGETEDSFISDLSVGLATGVIKAGAPCRGERTMKYNQLLRIEEELGDQAVYAGEDWKLSL

SEQ ID NO: 42946 - DNA, 1225 bp, Arabidopsis thaliana
  misc_feature (1)..(1225): Ceres Seq. ID no. 13592996
  misc_feature (1)..(1225): Ortholog of  Ceres SEQ ID NO 13596039 as cited in SEQ ID NO 62117
taatcgaaaacctttcgtctttttctgactcttcaatctctcccaaagcctaaagcgatctctgcaaatctctcgcgactctctctttcaagatgcaaatcttcgtgaaaacactcactggcaagacaatcactctcgaggttgagagctctgacaccatcgacaatgttaaggcaaagattcaggacaaggaaggcattcctccggatcagcaaagattaatattcgccggtaaacagctagaagatggccgtaccttggcggattacaatatccagaaagaatcaacccttcatttggttctccgtttaagaggtggtatgcagatctttgtcaagactctgactggcaaaaccattactttggaagttgagagctctgacactattgataacgtcaaagcaaagatccaggacaaggaaggaatccctccggatcagcaaagacttatctttgccggtaagcagcttgaggacggaagaactcttgctgactacaacattcaaaaggagtcgacccttcatttggtgcttcgtctcagaggtggtatgcaaatctttgtcaagaccctcactggtaaaacaatcacccttgaggttgagagttcagacaccattgacaatgtcaaagctaagatccaggataaagagggaattcctccggatcagcagaggcttatctttgccggtaagcagctcgaagatggacgcacccttgcagattacaacatccaaaaggagtctacccttcatcttgtgcttcgtctccgtggtggtatgcagatctttgtgaagacccttaccggaaagaccattactctggaggttgaaagctcagacactatcgataatgtcaaggctaagattcaggacaaggaagggatcccaccagaccaacagagactcatcttcgctggtaaacagcttgaggatggtcgcacacttgcagattacaacatccagaaggagtcgactcttcacttggttcttcgtcttcgtggtggaagcttctaagctttttttgatctgatgataagtggttggttcgtgtctcatgcacttgggaggtgaactatttcacctggtgtagtttgtgtttccgtctgttggaaaaacttatccctatcgatttcgttttcattttctgcttttcttttatgtaccttcgtttgggcttgtaacgggcctttgtatttcaactctcaataataatccaagtgcatgtt

SEQ ID NO: 42947 - protein, 306 aa, Arabidopsis thaliana
  peptide (1)..(306): Ceres Seq. ID no. 15221193
MQIFVKTLTGKTITLEVESSDTIDNVKAKIQDKEGIPPDQQRLIFAGKQLEDGRTLADYNIQKESTLHLVLRLRGGMQIFVKTLTGKTITLEVESSDTIDNVKAKIQDKEGIPPDQQRLIFAGKQLEDGRTLADYNIQKESTLHLVLRLRGGMQIFVKTLTGKTITLEVESSDTIDNVKAKIQDKEGIPPDQQRLIFAGKQLEDGRTLADYNIQKESTLHLVLRLRGGMQIFVKTLTGKTITLEVESSDTIDNVKAKIQDKEGIPPDQQRLIFAGKQLEDGRTLADYNIQKESTLHLVLRLRGGSF

SEQ ID NO: 42948 - protein, 230 aa, Arabidopsis thaliana
  peptide (1)..(230): Ceres Seq. ID no. 15221194
MQIFVKTLTGKTITLEVESSDTIDNVKAKIQDKEGIPPDQQRLIFAGKQLEDGRTLADYNIQKESTLHLVLRLRGGMQIFVKTLTGKTITLEVESSDTIDNVKAKIQDKEGIPPDQQRLIFAGKQLEDGRTLADYNIQKESTLHLVLRLRGGMQIFVKTLTGKTITLEVESSDTIDNVKAKIQDKEGIPPDQQRLIFAGKQLEDGRTLADYNIQKESTLHLVLRLRGGSF

SEQ ID NO: 42949 - protein, 154 aa, Arabidopsis thaliana
  peptide (1)..(154): Ceres Seq. ID no. 15221195
MQIFVKTLTGKTITLEVESSDTIDNVKAKIQDKEGIPPDQQRLIFAGKQLEDGRTLADYNIQKESTLHLVLRLRGGMQIFVKTLTGKTITLEVESSDTIDNVKAKIQDKEGIPPDQQRLIFAGKQLEDGRTLADYNIQKESTLHLVLRLRGGSF

SEQ ID NO: 42950 - DNA, 1272 bp, Arabidopsis thaliana
  misc_feature (1)..(1272): Ceres Seq. ID no. 12370257
  misc_feature (1)..(1272): Ortholog of  Ceres SEQ ID NO 15170768 as cited in SEQ ID NO 52641
gtagtcagcgacacggaactcattaactttactcttctcactggtcaatcgtcggagataatcgggtgatcggcgatggagaatacggacgtcttcttggggctgcatgatttcctggagcggatgcgcaaaccctccgccggcgatttcgtcaaatccattaaaagtttcattgtttcattctcgaacaatgcaccagacccggaaaaagattgtgctatggttcaggagttcttttctaagatggaggctgctttcagggctcatccactttggtctggttgttctgaggaggaattggatagtgctggagatggcctggagaagtatgttatgacaaagctatttactcgggtgtttgcttcaaacactgaggaggttatagctgatgagaagctatttcagaagatgtcattggttcaacaattcatttctcccgagaatttggatatacaaccaacttttcaaaatgaatcgtcatggctgctagctcaaaaagagctccagaagataaacatgtacaaagctcctcgtgataagcttgtgtgtatccttaactgttgcaaagtgattaataacttactgctaaatgcttcaattgcttcaaacgagaatgcacctggagcagacgaatttcttcctgttttgatatatgtaacaataaaggctaaccctccacaacttcactcaaacttgttgtatatacaaagctgagtttgaaaagaacatggaatctgcacgggcacgaatttctggtttggacagccagacttatcaaactggtcatggctctggcaccaccccctcgtgatgagtccactcttcagaaaactcaaagtctgaatcccaagagggaaaacactcttttccaatcaaaatcgtctgatagtctttctgggaccaacgaattactgaatataaacagtgaaacaccaatgaagaaagctgaatccatttcagatttggaaaataagggtacgacgcttctgaaggataccgagccaagcaaagtctttcaagaatatccttacatatttgccagtgctggtgatttgaggataggagatgttgaaggcttgttaaatagttataaacagctcgttttcaaatatgtgtgccttaccaaaggattgggtgatggaacatctttagctccatccagttcacccttgcaagcgtcgtccggttttaatacgtctaaggaatctgaggatcatagaagatcgtcttcagatgtacaaatgacaaaggaaactgacaggagtgttgatg

SEQ ID NO: 42951 - protein, 212 aa, Arabidopsis thaliana
  peptide (1)..(212): Ceres Seq. ID no. 12370258
MENTDVFLGLHDFLERMRKPSAGDFVKSIKSFIVSFSNNAPDPEKDCAMVQEFFSKMEAAFRAHPLWSGCSEEELDSAGDGLEKYVMTKLFTRVFASNTEEVIADEKLFQKMSLVQQFISPENLDIQPTFQNESSWLLAQKELQKINMYKAPRDKLVCILNCCKVINNLLLNASIASNENAPGADEFLPVLIYVTIKANPPQLHSNLLYIQS

SEQ ID NO: 42952 - protein, 196 aa, Arabidopsis thaliana
  peptide (1)..(196): Ceres Seq. ID no. 12370259
MRKPSAGDFVKSIKSFIVSFSNNAPDPEKDCAMVQEFFSKMEAAFRAHPLWSGCSEEELDSAGDGLEKYVMTKLFTRVFASNTEEVIADEKLFQKMSLVQQFISPENLDIQPTFQNESSWLLAQKELQKINMYKAPRDKLVCILNCCKVINNLLLNASIASNENAPGADEFLPVLIYVTIKANPPQLHSNLLYIQS

SEQ ID NO: 42953 - protein, 164 aa, Arabidopsis thaliana
  peptide (1)..(164): Ceres Seq. ID no. 12370260
MVQEFFSKMEAAFRAHPLWSGCSEEELDSAGDGLEKYVMTKLFTRVFASNTEEVIADEKLFQKMSLVQQFISPENLDIQPTFQNESSWLLAQKELQKINMYKAPRDKLVCILNCCKVINNLLLNASIASNENAPGADEFLPVLIYVTIKANPPQLHSNLLYIQS

SEQ ID NO: 42954 - DNA, 1480 bp, Arabidopsis thaliana
  misc_feature (1)..(1480): Ceres Seq. ID no. 12422298
  misc_feature (1)..(1480): Ortholog of  Ceres SEQ ID NO 13659033 as cited in SEQ ID NO 66372
  misc_feature (1)..(1480): Ortholog of  Ceres SEQ ID NO 12625899 as cited in SEQ ID NO 69079
ataattcctaatttcgacacgttctttacataaatcaccagatttgccactatgagcttcttgattcctaatagaggagtaggaggaaccaagattcctctctccatcatcgttctcgttctttgtggtttcatgttcttcattctcttatacactgaaagaatcagcttgttgtcttcttcttcctcttcgtcttcatctttcttcaagctaaagtcttgtccgaggaaagatgttagctcgaaacctaaggagaaaattcgaaaggaaagatcagagatattggaagtgcttgacgacaggttcgaattcgatcccgaagagtgtaacgttgcagcagggaaatgggtttacaatagctcaattgaaccactctacaccgatagatcatgtccatacatcgatcgtcaattctcttgtatgaaaaacggacagccagaaactgattatcttcggtgggaatggcagcctgatgactgtacaattccacgatttagtccgaagttagcaatgaacaaactcagaggaaaaagactactttttgtgggagattcgttgcaacgaagccaatgggaatcgttcgtgtgtttggtggaatcaataatacccgaaggagaaaaatcaatgaagcgtagccaaaaatactttgtatttaaagcaaaggaatacaatgcgactatagagttctattgggcaccgtatatcgtcgaatcaaacacagatatacctgtgatttcggatccaaagaaacggatagtgaaagtggactcagtgaaagatcgagctaagttttgggaaggagctgatattttggttttcaacacttatgtttggtggatgagtggtctccgcatgaaagctctgtggggttctttcggaaatggagagagtggtgcagaggcactagacacacaagtggcttacaggctagggctcaagacatgggctaattgggttgactctaccgttgaccctaataagaccagagtcttcttcaccaccatgtctcctactcatactagaagtgcggattggggaaagccaaacggcacgaaatgtttcaacgagacgaaaccgataaaagataagaagttttggggaacaggctctaacaagcagatgatgaaagtggtgtcaagcgtgataaagcacatgactacgcacgtgacagtcatcaacatcacgcagctctctgagtatcgtatcgacgctcacacatcagtttacaccgagacaggtgggaagatcctaaccgctgagcagagggctgatccaatgcatcacgctgattgtatacattggtgtttacctggactacccgatacatggaatcggatcctattggctcatttgtaaatcaagctaggaagctgagggttaaacgggaaaaacccaaatcctctgtttttctttctcctcttgtgttgtcggggagatttgtttgtttcagtgtattgtgattgtcgtcaattttcttaag

SEQ ID NO: 42955 - protein, 434 aa, Arabidopsis thaliana
  peptide (1)..(434): Ceres Seq. ID no. 12422299
MSFLIPNRGVGGTKIPLSIIVLVLCGFMFFILLYTERISLLSSSSSSSSSFFKLKSCPRKDVSSKPKEKIRKERSEILEVLDDRFEFDPEECNVAAGKWVYNSSIEPLYTDRSCPYIDRQFSCMKNGQPETDYLRWEWQPDDCTIPRFSPKLAMNKLRGKRLLFVGDSLQRSQWESFVCLVESIIPEGEKSMKRSQKYFVFKAKEYNATIEFYWAPYIVESNTDIPVISDPKKRIVKVDSVKDRAKFWEGADILVFNTYVWWMSGLRMKALWGSFGNGESGAEALDTQVAYRLGLKTWANWVDSTVDPNKTRVFFTTMSPTHTRSADWGKPNGTKCFNETKPIKDKKFWGTGSNKQMMKVVSSVIKHMTTHVTVINITQLSEYRIDAHTSVYTETGGKILTAEQRADPMHHADCIHWCLPGLPDTWNRILLAHL

SEQ ID NO: 42956 - protein, 407 aa, Arabidopsis thaliana
  peptide (1)..(407): Ceres Seq. ID no. 12422300
MFFILLYTERISLLSSSSSSSSSFFKLKSCPRKDVSSKPKEKIRKERSEILEVLDDRFEFDPEECNVAAGKWVYNSSIEPLYTDRSCPYIDRQFSCMKNGQPETDYLRWEWQPDDCTIPRFSPKLAMNKLRGKRLLFVGDSLQRSQWESFVCLVESIIPEGEKSMKRSQKYFVFKAKEYNATIEFYWAPYIVESNTDIPVISDPKKRIVKVDSVKDRAKFWEGADILVFNTYVWWMSGLRMKALWGSFGNGESGAEALDTQVAYRLGLKTWANWVDSTVDPNKTRVFFTTMSPTHTRSADWGKPNGTKCFNETKPIKDKKFWGTGSNKQMMKVVSSVIKHMTTHVTVINITQLSEYRIDAHTSVYTETGGKILTAEQRADPMHHADCIHWCLPGLPDTWNRILLAHL

SEQ ID NO: 42957 - protein, 311 aa, Arabidopsis thaliana
  peptide (1)..(311): Ceres Seq. ID no. 12422301
MKNGQPETDYLRWEWQPDDCTIPRFSPKLAMNKLRGKRLLFVGDSLQRSQWESFVCLVESIIPEGEKSMKRSQKYFVFKAKEYNATIEFYWAPYIVESNTDIPVISDPKKRIVKVDSVKDRAKFWEGADILVFNTYVWWMSGLRMKALWGSFGNGESGAEALDTQVAYRLGLKTWANWVDSTVDPNKTRVFFTTMSPTHTRSADWGKPNGTKCFNETKPIKDKKFWGTGSNKQMMKVVSSVIKHMTTHVTVINITQLSEYRIDAHTSVYTETGGKILTAEQRADPMHHADCIHWCLPGLPDTWNRILLAHL

SEQ ID NO: 42958 - DNA, 839 bp, Arabidopsis thaliana
  misc_feature (1)..(839): Ceres Seq. ID no. 13647083
  misc_feature (1)..(839): Ortholog of  Ceres SEQ ID NO 14316161 as cited in SEQ ID NO 52384
  misc_feature (1)..(839): Ortholog of  Ceres SEQ ID NO 14315249 as cited in SEQ ID NO 52512
  misc_feature (1)..(839): Ortholog of  Ceres SEQ ID NO 15174595 as cited in SEQ ID NO 53460
  misc_feature (1)..(839): Ortholog of  Ceres SEQ ID NO 13503553 as cited in SEQ ID NO 64822
  misc_feature (1)..(839): Ortholog of  Ceres SEQ ID NO 13660155 as cited in SEQ ID NO 67635
ataaactctctctctcttttcattattaatcttcccgtctataattcattaattctcgttagcagcttcttcttcgttggattcgtaaaatggatggatttggagctaactacgagtgtttgttctttgatatggacgatactttataccctttgagcatcggaatcaacttagcttgtcgaaacaacatccaagagttcatgcttaaccaactcggaatcgaagagagtgaagttccaaagttgtgtttggatctttacaaagaatatggaaccaccatggctggtctcaaggttatgggttacgaattcgacaacgatgaattccatgaatatgtccatggaagacttccctacgagaaactaaaacctgatccactcctccgtaaccttctcctctctatgcctcaccgtaaaatcatctttactaacgcagacaaagctcacgcaacacgagctctcaacagattgggtcttgaggactgctttgaaggaatcatttgcttcgaaacactaaacccttcttctgattcaaacactcaaatcctctgtaaaccctctgttgaagcatttgaagctgcaattcgcattgcagacattgttgatccacgcaaaacgatattcttcgatgacagtattcgtaacatcgctagtgctaaagcaacagggctaaaaaccgtgtttgtgggggaatcagtgctagttccaggtgctgactatgcactaagcagcattcataacataaaggaagcaatacctgatttatgggaagacaacaaagatgagaagctcgagccaattgttcagcaagccgcggttgcaaccatggtcaatgcttag

SEQ ID NO: 42959 - protein, 249 aa, Arabidopsis thaliana
  peptide (1)..(249): Ceres Seq. ID no. 13647084
MDGFGANYECLFFDMDDTLYPLSIGINLACRNNIQEFMLNQLGIEESEVPKLCLDLYKEYGTTMAGLKVMGYEFDNDEFHEYVHGRLPYEKLKPDPLLRNLLLSMPHRKIIFTNADKAHATRALNRLGLEDCFEGIICFETLNPSSDSNTQILCKPSVEAFEAAIRIADIVDPRKTIFFDDSIRNIASAKATGLKTVFVGESVLVPGADYALSSIHNIKEAIPDLWEDNKDEKLEPIVQQAAVATMVNA

SEQ ID NO: 42960 - protein, 235 aa, Arabidopsis thaliana
  peptide (1)..(235): Ceres Seq. ID no. 13647085
MDDTLYPLSIGINLACRNNIQEFMLNQLGIEESEVPKLCLDLYKEYGTTMAGLKVMGYEFDNDEFHEYVHGRLPYEKLKPDPLLRNLLLSMPHRKIIFTNADKAHATRALNRLGLEDCFEGIICFETLNPSSDSNTQILCKPSVEAFEAAIRIADIVDPRKTIFFDDSIRNIASAKATGLKTVFVGESVLVPGADYALSSIHNIKEAIPDLWEDNKDEKLEPIVQQAAVATMVNA

SEQ ID NO: 42961 - protein, 212 aa, Arabidopsis thaliana
  peptide (1)..(212): Ceres Seq. ID no. 13647086
MLNQLGIEESEVPKLCLDLYKEYGTTMAGLKVMGYEFDNDEFHEYVHGRLPYEKLKPDPLLRNLLLSMPHRKIIFTNADKAHATRALNRLGLEDCFEGIICFETLNPSSDSNTQILCKPSVEAFEAAIRIADIVDPRKTIFFDDSIRNIASAKATGLKTVFVGESVLVPGADYALSSIHNIKEAIPDLWEDNKDEKLEPIVQQAAVATMVNA

SEQ ID NO: 42962 - DNA, 1254 bp, Arabidopsis thaliana
  misc_feature (1)..(1254): Ceres Seq. ID no. 13592855
  misc_feature (1)..(1254): Ortholog of  Ceres SEQ ID NO 14315275 as cited in SEQ ID NO 52556
  misc_feature (1)..(1254): Ortholog of  Ceres SEQ ID NO 13597260 as cited in SEQ ID NO 63885
attccatcaatttctcatccttgttgttttcttcttcttcttcttcctcttcttttatgtccatcgccgtcgaagtttctccggtaatggaagacatcacacggcagagcaaaaaaacttcggttgagaatgaaaccggcgatgatcagtcagcaacatcagtagtccttaaagctaaacgcaaacgccgatcgcaaccacgagacgctccaccccaacgtagctccgtccatagaggcgtcacaaggcatcgatggactggaaggtacgaagcacatttgtgggataagaatagttggaacgaaactcagaccaagaaaggaagacaagtatatttaggggcatatgacgaggaagatgcagcagcacgtgcctacgacttagcagcattgaaatattggggacgagacaccatcttgaacttccctttgtgtaattatgaagaagacatcaaagaaatggaaagccagtcaaaggaagagtatattggatctttgagaagaaaaagtagtgggttttcacgaggtgtatcaaaatacagaggcgttgcaaagcatcaccacaatgggagatgggaagctcgaatcggaagagtgtttggcaataaatatttataccttggaacttacgcgacgcaagaagaagcagctatagcgtacgatatcgcagctatcgagtaccgtggactcaacgccgttactaacttcgacatcagccgttatctgaaactcccggtgccggagaaccctatcgataccgcgaataatctcctcgagagtccgcattctgatcttagcccatttataaaacctaaccacgagtctgacttatcacagagtcaatcttcgtcagaggacaacgatgatcggaaaacaaagctcttgaagtcgtcacctttagtggcagaggaggtaatcggaccatcgacgccacctgagattgctccgcctcgtcggagcttcccggaagatatccagacgtatttcgggtgtcaaaactccggcaagttaacggcggaggaagatgatgttatcttcggtgatttagattctttccttacgcctgatttctacagcgagttaaatgattgctaaagtgttgttcttctgataagttttgttttttagttgttcagaatctcggttgtgaaaatcaacattgacacatcgattattctttcttgtgacaatcttatataataaagtttgaatctttctaaaaaaaaaaaaaaaaaagcttatcgataccgtcgac

SEQ ID NO: 42963 - protein, 363 aa, Arabidopsis thaliana
  peptide (1)..(363): Ceres Seq. ID no. 13592856
SINFSSLLFSSSSSSSSFMSIAVEVSPVMEDITRQSKKTSVENETGDDQSATSVVLKAKRKRRSQPRDAPPQRSSVHRGVTRHRWTGRYEAHLWDKNSWNETQTKKGRQVYLGAYDEEDAAARAYDLAALKYWGRDTILNFPLCNYEEDIKEMESQSKEEYIGSLRRKSSGFSRGVSKYRGVAKHHHNGRWEARIGRVFGNKYLYLGTYATQEEAAIAYDIAAIEYRGLNAVTNFDISRYLKLPVPENPIDTANNLLESPHSDLSPFIKPNHESDLSQSQSSSEDNDDRKTKLLKSSPLVAEEVIGPSTPPEIAPPRRSFPEDIQTYFGCQNSGKLTAEEDDVIFGDLDSFLTPDFYSELNDC

SEQ ID NO: 42964 - protein, 345 aa, Arabidopsis thaliana
  peptide (1)..(345): Ceres Seq. ID no. 13592857
MSIAVEVSPVMEDITRQSKKTSVENETGDDQSATSVVLKAKRKRRSQPRDAPPQRSSVHRGVTRHRWTGRYEAHLWDKNSWNETQTKKGRQVYLGAYDEEDAAARAYDLAALKYWGRDTILNFPLCNYEEDIKEMESQSKEEYIGSLRRKSSGFSRGVSKYRGVAKHHHNGRWEARIGRVFGNKYLYLGTYATQEEAAIAYDIAAIEYRGLNAVTNFDISRYLKLPVPENPIDTANNLLESPHSDLSPFIKPNHESDLSQSQSSSEDNDDRKTKLLKSSPLVAEEVIGPSTPPEIAPPRRSFPEDIQTYFGCQNSGKLTAEEDDVIFGDLDSFLTPDFYSELNDC

SEQ ID NO: 42965 - protein, 335 aa, Arabidopsis thaliana
  peptide (1)..(335): Ceres Seq. ID no. 13592858
MEDITRQSKKTSVENETGDDQSATSVVLKAKRKRRSQPRDAPPQRSSVHRGVTRHRWTGRYEAHLWDKNSWNETQTKKGRQVYLGAYDEEDAAARAYDLAALKYWGRDTILNFPLCNYEEDIKEMESQSKEEYIGSLRRKSSGFSRGVSKYRGVAKHHHNGRWEARIGRVFGNKYLYLGTYATQEEAAIAYDIAAIEYRGLNAVTNFDISRYLKLPVPENPIDTANNLLESPHSDLSPFIKPNHESDLSQSQSSSEDNDDRKTKLLKSSPLVAEEVIGPSTPPEIAPPRRSFPEDIQTYFGCQNSGKLTAEEDDVIFGDLDSFLTPDFYSELNDC

SEQ ID NO: 42966 - DNA, 1177 bp, Arabidopsis thaliana
  misc_feature (1)..(1177): Ceres Seq. ID no. 12558559
  misc_feature (1)..(1177): Ortholog of  Ceres SEQ ID NO 12614972 as cited in SEQ ID NO 61986
  misc_feature (1)..(1177): Ortholog of  Ceres SEQ ID NO 14302317 as cited in SEQ ID NO 63244
  misc_feature (1)..(1177): Ortholog of  Ceres SEQ ID NO 12625706 as cited in SEQ ID NO 64144
  misc_feature (1)..(1177): Ortholog of  Ceres SEQ ID NO 13584933 as cited in SEQ ID NO 65009
  misc_feature (1)..(1177): Ortholog of  Ceres SEQ ID NO 12634984 as cited in SEQ ID NO 0
  misc_feature (1)..(1177): Ortholog of  Ceres SEQ ID NO 13599377 as cited in SEQ ID NO 0
atagagagcttaagcaaaagatctcatactttcaagattgatcgatctctcaagtctcaacaatgtcatcatcatcatcagttcctgcttacttgggagatgaagatctgacacaagaaacaagagctctgatctcttctcttcctaaagagaaaggttggttagtgagtgaaatatatgaattccaaggactttggcacacacaagctattttacaaggaatcttgatctgccaaaaacgctttgaagctaaagattccgacattatcctcgtcactaatcctaaatcaggtaccacttggttaaaagctcttgtctttgctctccttaaccgacacaagtttccagtttcttcttctggtaaccatcctcttctggtcaccaatccacaccttcttgtgcccttcttggaaggagtttactacgagtccccagatttcgatttctccagtttgccttctccaagactgatgaacacgcacatatcgcatctttcgctccccgagtctgttaagagctcgtcttgtaagattgtgtattgttgtaggaaccctaaggacatgtttgtgtccttatggcattttgggaaaaagctagctcctgaggaaaccgcggattatcctatcgaaaaagcggttgaagcgttttgtgaagggaagtttataggtggacccttttgggatcatatattggagtactggtatgcaagccgcgagaatccgaacaaggtcttgtttgttacttacgaggagctaaagaagcagaccgaagttgagatgaagcggatcgcggagttcttggaatgtggctttattgaagaagaagaagtgagagagattgtgaagttgtgtagctttgagagtttaagtaatttggaagttaacaaagaagggaaattgccaaatggaatagagactaaaactttctttagaaaaggagagattggaggatggagagatactttgagtgagtcattggcagaggaaattgatagaaccattgaagagaagtttaaaggttctggtcttaaattttcttcttgaatcaatctttgaaacttgttctcatgttcttgttttgcttcaattatgttatttcttgttttatatatttttctgctgttatgtttgtgtttgtgtttatgaataaaatgaaataaattatgtttgtgttttct

SEQ ID NO: 42967 - protein, 326 aa, Arabidopsis thaliana
  peptide (1)..(326): Ceres Seq. ID no. 12558560
MSSSSSVPAYLGDEDLTQETRALISSLPKEKGWLVSEIYEFQGLWHTQAILQGILICQKRFEAKDSDIILVTNPKSGTTWLKALVFALLNRHKFPVSSSGNHPLLVTNPHLLVPFLEGVYYESPDFDFSSLPSPRLMNTHISHLSLPESVKSSSCKIVYCCRNPKDMFVSLWHFGKKLAPEETADYPIEKAVEAFCEGKFIGGPFWDHILEYWYASRENPNKVLFVTYEELKKQTEVEMKRIAEFLECGFIEEEEVREIVKLCSFESLSNLEVNKEGKLPNGIETKTFFRKGEIGGWRDTLSESLAEEIDRTIEEKFKGSGLKFSS

SEQ ID NO: 42968 - protein, 190 aa, Arabidopsis thaliana
  peptide (1)..(190): Ceres Seq. ID no. 12558561
MNTHISHLSLPESVKSSSCKIVYCCRNPKDMFVSLWHFGKKLAPEETADYPIEKAVEAFCEGKFIGGPFWDHILEYWYASRENPNKVLFVTYEELKKQTEVEMKRIAEFLECGFIEEEEVREIVKLCSFESLSNLEVNKEGKLPNGIETKTFFRKGEIGGWRDTLSESLAEEIDRTIEEKFKGSGLKFSS

SEQ ID NO: 42969 - DNA, 1163 bp, Arabidopsis thaliana; identical to SEQ ID NO: 22762
  misc_feature (1)..(1163): Ceres Seq. ID no. 12558793
  misc_feature (1)..(1163): Ortholog of  Ceres SEQ ID NO 12474685 as cited in SEQ ID NO 88
  misc_feature (1)..(1163): Ortholog of  Ceres SEQ ID NO 13638574 as cited in SEQ ID NO 51223
  misc_feature (1)..(1163): Ortholog of  Ceres SEQ ID NO 14311531 as cited in SEQ ID NO 51466
  misc_feature (1)..(1163): Ortholog of  Ceres SEQ ID NO 15170465 as cited in SEQ ID NO 52798
  misc_feature (1)..(1163): Ortholog of  Ceres SEQ ID NO 15177112 as cited in SEQ ID NO 55956
  misc_feature (1)..(1163): Ortholog of  Ceres SEQ ID NO 12610790 as cited in SEQ ID NO 56123
  misc_feature (1)..(1163): Ortholog of  Ceres SEQ ID NO 14315399 as cited in SEQ ID NO 57112
  misc_feature (1)..(1163): Ortholog of  Ceres SEQ ID NO 13655636 as cited in SEQ ID NO 63519
  misc_feature (1)..(1163): Ortholog of  Ceres SEQ ID NO 13655896 as cited in SEQ ID NO 64970

SEQ ID NO: 42970 - protein, 314 aa, Arabidopsis thaliana; identical to SEQ ID NO: 22763
  peptide (1)..(314): Ceres Seq. ID no. 12558794

SEQ ID NO: 42971 - protein, 239 aa, Arabidopsis thaliana; identical to SEQ ID NO: 22764
  peptide (1)..(239): Ceres Seq. ID no. 12558795

SEQ ID NO: 42972 - protein, 172 aa, Arabidopsis thaliana; identical to SEQ ID NO: 22765
  peptide (1)..(172): Ceres Seq. ID no. 12558796

SEQ ID NO: 42973 - DNA, 2041 bp, Arabidopsis thaliana
  misc_feature (1)..(2041): Ceres Seq. ID no. 12394599
  misc_feature (1)..(2041): Ortholog of  Ceres SEQ ID NO 15178728 as cited in SEQ ID NO 67280
aaaattacatctcaaatacacaatccagcaacacctttctctctctaacagcttcgagcttctacactcatggctgcttcatcctttgtagacggagaaagagatatggagaaaggaggaatgatattactacagtcaagtgagaatcaaaatcctatgatagatccttcaccaacaccttcaccatctgcaactgctactgccccagctttggttttgtctaattcaggcaagagaatggatcaagctggcaagaaaaagtatgttaagcaagtcacgggtcgccacaacgacaccgagcttcacttagcggcccaacgaggtgatttggctgctgtgcagcagattctcaaggatattaactctcagatggaagggattctgagtggggaagagtttgatgctgaagttgcggagattcgagcatcgattgtgaatgaggtgaatgagttaggggagacggcgctcttcactgctgcggataaaggacatcttgatgttgtcaaagagctgttgaagtattcgagtagagagagtattgctaagaagaatcgttctggatatgatccacttcatattgctgccatacagggtcatcatgctattgttgaggtctcgctagatcatgatgcgacgcttagccagacatttggcccatcgaatgcaactccgcttgtgtctgcagctatgagaggccatacagaagttgtgaaccagctcttatccaaagctgggaatttgctagaaatttctcggtctaacaacaaaaatgccttgcatctagctgcaaggcaaggacatgtggaggtcataaaagctcttctctccaaggatcctcagctagcgagacggattgacaagaaaggacaaactgcacttcacatggctgttaaaggccagagttctgaagtagtgaaattgcttcttgatgcagatcctgctattgttatgcaaccggacaagtcttgtaacacagcgttacatgttgccaccaggaaaaaacgagcagagattgtagaactattgttgtcactgcctgataccaacgccaatactttaacccgcgatcacaagacagcgcttgacatagcagaaggacttcccctctcagaagaatcttcatacataaaagagtgtcttgctcgtagcggggctcttagggcgaatgagctgaaccagccaagggacgagctgagaagcactgtcacccaaatcaagaacgatgtacacatccagctggaacagacgaaaaggacgaacaaaaacgtgcacaacatttcaaaagaactcaggaaactccacagagaagggatcaacaatgcaaccaattctgtaactgttgtggctgtattgtttgcaactgtagcttttgctgctatattcacagtgccgggaggagacaacaatgacgggtctgcagtggtggtgggccgagcatcattcaagatcttcttcatcttcaacgcactcgcgttgtttacgtctctggcggttgtggttgtccagatcacattggtgagaggagagacaaaagctgagaagagggtagtggaagtgatcaacaaactcatgtggttggcatcgatgtgtacatctgtggcatttttggcatcttcatacatagtggttgggcgtaagaacgagtgggcggctgagctggtgaccgtggttgggggtgtgataatggctggtgttcttggaaccatgacttattacgtggtaaaatcgaagaggacaaggtcgatgaggaagaaggtgaagagtgctcgcaggagtggttccaactcgtggcatcattcagatttctctaactcggaagttgatcctattttcgcaatctaagatgcgtaaaagaatcgtgtatatatattgttgtatttggtgaagagagctagactatttagtgtataaagccccctgaccatcaaaaggcaaacactattgtcaaccattaaaggtttacactgctcaactcatctgtaaaacagttaacaattgtcttcttcggaaagcaaagaaaagcaaaggttcctttgttagg

SEQ ID NO: 42974 - protein, 590 aa, Arabidopsis thaliana
  peptide (1)..(590): Ceres Seq. ID no. 12394600
MAASSFVDGERDMEKGGMILLQSSENQNPMIDPSPTPSPSATATAPALVLSNSGKRMDQAGKKKYVKQVTGRHNDTELHLAAQRGDLAAVQQILKDINSQMEGILSGEEFDAEVAEIRASIVNEVNELGETALFTAADKGHLDVVKELLKYSSRESIAKKNRSGYDPLHIAAIQGHHAIVEVSLDHDATLSQTFGPSNATPLVSAAMRGHTEVVNQLLSKAGNLLEISRSNNKNALHLAARQGHVEVIKALLSKDPQLARRIDKKGQTALHMAVKGQSSEVVKLLLDADPAIVMQPDKSCNTALHVATRKKRAEIVELLLSLPDTNANTLTRDHKTALDIAEGLPLSEESSYIKECLARSGALRANELNQPRDELRSTVTQIKNDVHIQLEQTKRTNKNVHNISKELRKLHREGINNATNSVTVVAVLFATVAFAAIFTVPGGDNNDGSAVVVGRASFKIFFIFNALALFTSLAVVVVQITLVRGETKAEKRVVEVINKLMWLASMCTSVAFLASSYIVVGRKNEWAAELVTVVGGVIMAGVLGTMTYYVVKSKRTRSMRKKVKSARRSGSNSWHHSDFSNSEVDPIFAI

SEQ ID NO: 42975 - protein, 578 aa, Arabidopsis thaliana
  peptide (1)..(578): Ceres Seq. ID no. 12394601
MEKGGMILLQSSENQNPMIDPSPTPSPSATATAPALVLSNSGKRMDQAGKKKYVKQVTGRHNDTELHLAAQRGDLAAVQQILKDINSQMEGILSGEEFDAEVAEIRASIVNEVNELGETALFTAADKGHLDVVKELLKYSSRESIAKKNRSGYDPLHIAAIQGHHAIVEVSLDHDATLSQTFGPSNATPLVSAAMRGHTEVVNQLLSKAGNLLEISRSNNKNALHLAARQGHVEVIKALLSKDPQLARRIDKKGQTALHMAVKGQSSEVVKLLLDADPAIVMQPDKSCNTALHVATRKKRAEIVELLLSLPDTNANTLTRDHKTALDIAEGLPLSEESSYIKECLARSGALRANELNQPRDELRSTVTQIKNDVHIQLEQTKRTNKNVHNISKELRKLHREGINNATNSVTVVAVLFATVAFAAIFTVPGGDNNDGSAVVVGRASFKIFFIFNALALFTSLAVVVVQITLVRGETKAEKRVVEVINKLMWLASMCTSVAFLASSYIVVGRKNEWAAELVTVVGGVIMAGVLGTMTYYVVKSKRTRSMRKKVKSARRSGSNSWHHSDFSNSEVDPIFAI

SEQ ID NO: 42976 - protein, 573 aa, Arabidopsis thaliana
  peptide (1)..(573): Ceres Seq. ID no. 12394602
MILLQSSENQNPMIDPSPTPSPSATATAPALVLSNSGKRMDQAGKKKYVKQVTGRHNDTELHLAAQRGDLAAVQQILKDINSQMEGILSGEEFDAEVAEIRASIVNEVNELGETALFTAADKGHLDVVKELLKYSSRESIAKKNRSGYDPLHIAAIQGHHAIVEVSLDHDATLSQTFGPSNATPLVSAAMRGHTEVVNQLLSKAGNLLEISRSNNKNALHLAARQGHVEVIKALLSKDPQLARRIDKKGQTALHMAVKGQSSEVVKLLLDADPAIVMQPDKSCNTALHVATRKKRAEIVELLLSLPDTNANTLTRDHKTALDIAEGLPLSEESSYIKECLARSGALRANELNQPRDELRSTVTQIKNDVHIQLEQTKRTNKNVHNISKELRKLHREGINNATNSVTVVAVLFATVAFAAIFTVPGGDNNDGSAVVVGRASFKIFFIFNALALFTSLAVVVVQITLVRGETKAEKRVVEVINKLMWLASMCTSVAFLASSYIVVGRKNEWAAELVTVVGGVIMAGVLGTMTYYVVKSKRTRSMRKKVKSARRSGSNSWHHSDFSNSEVDPIFAI

SEQ ID NO: 42977 - DNA, 1232 bp, Arabidopsis thaliana
  misc_feature (1)..(1232): Ceres Seq. ID no. 12338068
  misc_feature (1)..(1232): Ortholog of  Ceres SEQ ID NO 15224625 as cited in SEQ ID NO 1390
ctctctcgcgttcgttcttatccacgagctctgcaccgtcgcaatctccgtcttctccatttagatccaacacagagccttttctacatgaaattcggcaaagagtttcgtactcacctcgaagaaactttaccagagtggagagacaagttcctttgctataaacctttaaaaaagcttctcaaatattatccttattactccgccgattttggacccgccaattccgatcacaacgattcgcgtccagtatttgctgatactactaacatctcttccgccgccgacgacggcggtgtggttcccggcgtcaggccatcggaagatctccagggttcgtttgtgaggatacttaacgatgaacttgagaagtttaacgatttttacgttgataaggaagaagatttcgttatcagattacaggagctcaaggaaagaatcgagcaagttaaagaaaagaatggggaatttgcatcagaaagtgagttcagcgaagaaatgatggatattcggagagaccttgttaccattcatggcgagatggtgctcctgaaaaactacagctcccttaattttgcaggacttgtcaagattttgaagaagtacgataaaagaacaggtggacttttacgtttgcctttcacacagcttgttctccatcaacccttctttactacagagccacttactaggttagtccgtgaatgtgaggccaatcttgagcttctttttccttcagaagcggaagttgtagagtcttctagcgcagtgcaagcacactcaagctcacatcagcacaactccccaagaatctcagctgagacttcctcaactctcggcaatgaaaatcttgatatatataagagtacactcgctgcaatgagagctataagagggttacaaaaggctagctcgacgtacaaccctttatcattctcatcgcttcttcagaacgaggatgatgagacggtaacagctgaaaactctccaaactctgggaacaaagatgattcagagaaggaagatactggaccttcccactgatcagaagagaatgatgctctttttgatcaagattttgagaatttgcttcttgatttcaccctaacttttcataaaattaacacattttactttacttcttcaccttttgcaggacacaacttctgtatgcatttgaattttagtacagtcgtttatagattttcaatgaaattttcctccattgtcgc

SEQ ID NO: 42978 - protein, 347 aa, Arabidopsis thaliana
  peptide (1)..(347): Ceres Seq. ID no. 12338069
LSRVRSYPRALHRRNLRLLHLDPTQSLFYMKFGKEFRTHLEETLPEWRDKFLCYKPLKKLLKYYPYYSADFGPANSDHNDSRPVFADTTNISSAADDGGVVPGVRPSEDLQGSFVRILNDELEKFNDFYVDKEEDFVIRLQELKERIEQVKEKNGEFASESEFSEEMMDIRRDLVTIHGEMVLLKNYSSLNFAGLVKILKKYDKRTGGLLRLPFTQLVLHQPFFTTEPLTRLVRECEANLELLFPSEAEVVESSSAVQAHSSSHQHNSPRISAETSSTLGNENLDIYKSTLAAMRAIRGLQKASSTYNPLSFSSLLQNEDDETVTAENSPNSGNKDDSEKEDTGPSH

SEQ ID NO: 42979 - protein, 318 aa, Arabidopsis thaliana; identical to SEQ ID NO: 41480
  peptide (1)..(318): Ceres Seq. ID no. 12338070

SEQ ID NO: 42980 - protein, 181 aa, Arabidopsis thaliana
  peptide (1)..(181): Ceres Seq. ID no. 12338071
MMDIRRDLVTIHGEMVLLKNYSSLNFAGLVKILKKYDKRTGGLLRLPFTQLVLHQPFFTTEPLTRLVRECEANLELLFPSEAEVVESSSAVQAHSSSHQHNSPRISAETSSTLGNENLDIYKSTLAAMRAIRGLQKASSTYNPLSFSSLLQNEDDETVTAENSPNSGNKDDSEKEDTGPSH

SEQ ID NO: 42981 - DNA, 1029 bp, Arabidopsis thaliana
  misc_feature (1)..(1029): Ceres Seq. ID no. 12422288
  misc_feature (1)..(1029): Ortholog of  Ceres SEQ ID NO 14303471 as cited in SEQ ID NO 59423
aacaaagtgtgttcttaaattatcttctctgataaccaaaaaagccctattttccgagatgaataccctagaagaagtagatgaatccactcatatcttcaacgctttgatgagtctaatgaggaaatttttgttcagagttctatgcgtcggtccaatccctactaacatttcattcatcatggatggaaaccgcaggttcgctaagaaacacaatcttataggcctagatgcaggacatagagctggtttcatatccgtgaaatatattcttcaatactgcaaagagattggtgtaccgtacgtcacactccacgcgtttggtatggataatttcaagagaggacctgaagaagtcaagtgtgtgatggatctaatgcttgagaaagtcgagctcgcgatcgatcaagctgtatcagggaatatgaacggcgtgagaataatctttgccggtgatttggattcgttaaacgagcattttagagctgcgacaaagaaactgatggagcttacggaggagaatagagatctgattgtggtggtttgcgttgcttacagcacaagtctcgagattgttcacgctgttcgaaaatcttgtgttagaaaatgtacgaatggagatgatcttgtacttttggagttgagtgatgttgaagagtgtatgtatacatcgattgtgccggttccggatcttgtgataagaaccggaggaggagatcggctgagtaacttcatgacgtggcaaacttcgaggtctcttcttcacagaacggaggctctttggccggagttagggctctggcatttggtttgggcaattcttaaattccaaagaatgcaagattacttgacgaagaagaaaaagctcgattagatagtttctaaagttaaaccctgcaggaaagaacttttaactctttattacgtttaatttacgtgtttctatgactggaaacgagaaagctcacaagcaaatcttttttattatgtattggatccgtataacaaacacgaatatacaaaacatcg

SEQ ID NO: 42982 - protein, 290 aa, Arabidopsis thaliana
  peptide (1)..(290): Ceres Seq. ID no. 12422289
TKCVLKLSSLITKKALFSEMNTLEEVDESTHIFNALMSLMRKFLFRVLCVGPIPTNISFIMDGNRRFAKKHNLIGLDAGHRAGFISVKYILQYCKEIGVPYVTLHAFGMDNFKRGPEEVKCVMDLMLEKVELAIDQAVSGNMNGVRIIFAGDLDSLNEHFRAATKKLMELTEENRDLIVVVCVAYSTSLEIVHAVRKSCVRKCTNGDDLVLLELSDVEECMYTSIVPVPDLVIRTGGGDRLSNFMTWQTSRSLLHRTEALWPELGLWHLVWAILKFQRMQDYLTKKKKLD

SEQ ID NO: 42983 - protein, 271 aa, Arabidopsis thaliana
  peptide (1)..(271): Ceres Seq. ID no. 12422290
MNTLEEVDESTHIFNALMSLMRKFLFRVLCVGPIPTNISFIMDGNRRFAKKHNLIGLDAGHRAGFISVKYILQYCKEIGVPYVTLHAFGMDNFKRGPEEVKCVMDLMLEKVELAIDQAVSGNMNGVRIIFAGDLDSLNEHFRAATKKLMELTEENRDLIVVVCVAYSTSLEIVHAVRKSCVRKCTNGDDLVLLELSDVEECMYTSIVPVPDLVIRTGGGDRLSNFMTWQTSRSLLHRTEALWPELGLWHLVWAILKFQRMQDYLTKKKKLD

SEQ ID NO: 42984 - protein, 254 aa, Arabidopsis thaliana
  peptide (1)..(254): Ceres Seq. ID no. 12422291
MSLMRKFLFRVLCVGPIPTNISFIMDGNRRFAKKHNLIGLDAGHRAGFISVKYILQYCKEIGVPYVTLHAFGMDNFKRGPEEVKCVMDLMLEKVELAIDQAVSGNMNGVRIIFAGDLDSLNEHFRAATKKLMELTEENRDLIVVVCVAYSTSLEIVHAVRKSCVRKCTNGDDLVLLELSDVEECMYTSIVPVPDLVIRTGGGDRLSNFMTWQTSRSLLHRTEALWPELGLWHLVWAILKFQRMQDYLTKKKKLD

SEQ ID NO: 42985 - DNA, 1847 bp, Arabidopsis thaliana
  misc_feature (1)..(1847): Ceres Seq. ID no. 12337058
  misc_feature (1)..(1847): Ortholog of  Ceres SEQ ID NO 15171040 as cited in SEQ ID NO 55332
ctcttgatcttttagtgttcttgctttgtcgcttcaacgcttaaggtaacactgcttcttctttgatattcgcgattcatcgaacgatttcatcattatagacaaacatcctatcgatcggtttggatttgtgtgagtctgcataatcatggcgaggaagatgcttgttgatggtgagattgataaggtggcggctgatgaagccaacgcgacgcactatgattttgatttgtttgtcatcggtgccgggagtggcggtgttcgtgctgctaggttttcggctaatcatggcgctaaggttggtatttgtgagcttccatttcaccctattagctctgaggagattggaggcgttggtggaacctgtgttatccgtggttgtgttcctaaaaagattctcgtctatggagctacttacggtggtgaacttgaggatgctaaaaattatgggtgggaaataaatgagaaagtcgacttcacatggaagaagcttttgcaaaagaagactgatgagatactaagactgaataatatctacaagcggttattggcaaatgctgcggtgaaattgtatgaaggtgaaggaagagtagttggtcccaacgaagtggaggtgagacaaatagatggcacaaaaataagttataccgcaaagcacatattgattgccactggcagtcgggcgcaaaagcctaatattcctggacatgagctggctattacatctgatgaagctttgagcttggaagaatttcccaagcgtgctatagtgcttggaggagggtatattgctgtggagtttgcatcaatatggcgtggaatgggtgctactgtagatttattcttcaggaaggaacttccgctaaggggttttgatgacgaaatgagggcactagttgctagaaatcttgaaggaaggggcgttaatctgcatccacaaacaagtttgactcagttgacaaaaacagaccaggggatcaaagtcatatcgtcccatggggaggaattcgtggcagatgtcgtcctatttgctactggcagaagtcctaataccaaaagattgaatttagaagctgttggtgttgaacttgatcaggctggagctgtgaaggttgacgagtattcacgaactaatatacctagcatatgggctgtaggagatgccacaaaccgaattaaccttacacctgttgcgttaatggaggccacctgttttgcgaacactgcttttggtggaaagcctactaaagcagaatacagcaatgtcgcctgtgctgtattttgcataccaccactagctgtagtgggtctcagcgaagaagaagcagtagaacaagcaaccggtgatattctggtcttcacctcaggctttaatccaatgaagaacaccatttctggacgccaggaaaagacattgatgaagctaatagttgatgagaagagtgataaggttattggagcatccatgtgcggtcctgatgcagctgagatcatgcaggggattgcaattgcgctcaagtgtggagcaaccaaagcacaatttgatagcacggttgggatacatccatcttctgcagaggaatttgtgacaatgcgcagtgtgaccagacgcattgcccacaaacccaaacctaagacaaatctatgaaccgcaaaatataaagagctatatagcatgaaaactcggtacacttagtttgatcaaagagtcagacaacgatgagtttaatcatactcgtgtcccaataaaggatttgtaatttttgtttgtttgtatgatgcttctcttcttacttacttgagaaaacatcaaggtttcttctcttattgcttagtggaactttatt

SEQ ID NO: 42986 - protein, 499 aa, Arabidopsis thaliana; identical to SEQ ID NO: 24219
  peptide (1)..(499): Ceres Seq. ID no. 12337059

SEQ ID NO: 42987 - protein, 495 aa, Arabidopsis thaliana; identical to SEQ ID NO: 24220
  peptide (1)..(495): Ceres Seq. ID no. 12337060

SEQ ID NO: 42988 - protein, 275 aa, Arabidopsis thaliana; identical to SEQ ID NO: 24221
  peptide (1)..(275): Ceres Seq. ID no. 12337061

SEQ ID NO: 42989 - DNA, 830 bp, Arabidopsis thaliana
  misc_feature (1)..(830): Ceres Seq. ID no. 13645928
  misc_feature (1)..(830): Ortholog of  Ceres SEQ ID NO 14307589 as cited in SEQ ID NO 20466
ttcctttgctttcacgaatagaaaccttagcttcttccatttcttctttctctcctcgtttaaattagtttttgacaaggaagaaaaagatggggagaagaccatgctgtgagaagataggattgaagaaagggccatggagtgctgaagaagatcgaatcttgatcaattatattagtctccatggccatcccaattggagagctctccctaaactagccgggctacttcggtgcggaaaaagttgcaggcttcgttggattaattatttgagaccagacatcaaacgtggcaatttcactcctcatgaagaagatactatcatcagcttacatcaactcttaggcaacagatggtctgcgatagctgcaaaattgcctggacgaacagacaacgaaattaaaaatgtttggcacactcatttaaagaaaagactccaccacagtcaagatcaaaacaacaaggaagatttcgtctctactacagctgcggagatgccaacctctccgcaacaacaatctagtagtagtgccgacatttcagcaattacaacattgggaaacaacaatgacatctccaatagcaacaaagactccgcgacgtcatccgaagatgttcttgcaattatagatgagagcttttggtcagaagtggtattgatggactgtgacatttcaggaaatgagaagaatgagaaaaagatagagaattgggagggctcactagatagaaacgataagggatataaccatgacatggagttttggtttgaccatctcactagtagtagttgtataattggagaaatgtccgacatttctgagttttga

SEQ ID NO: 42990 - protein, 246 aa, Arabidopsis thaliana
  peptide (1)..(246): Ceres Seq. ID no. 13645929
MGRRPCCEKIGLKKGPWSAEEDRILINYISLHGHPNWRALPKLAGLLRCGKSCRLRWINYLRPDIKRGNFTPHEEDTIISLHQLLGNRWSAIAAKLPGRTDNEIKNVWHTHLKKRLHHSQDQNNKEDFVSTTAAEMPTSPQQQSSSSADISAITTLGNNNDISNSNKDSATSSEDVLAIIDESFWSEVVLMDCDISGNEKNEKKIENWEGSLDRNDKGYNHDMEFWFDHLTSSSCIIGEMSDISEF

SEQ ID NO: 42991 - DNA, 1290 bp, Arabidopsis thaliana
  misc_feature (1)..(1290): Ceres Seq. ID no. 12481784
  misc_feature (1)..(1290): Ortholog of  Ceres SEQ ID NO 15177862 as cited in SEQ ID NO 56033
  misc_feature (1)..(1290): Ortholog of  Ceres SEQ ID NO 13661430 as cited in SEQ ID NO 61258
  misc_feature (1)..(1290): Ortholog of  Ceres SEQ ID NO 13590940 as cited in SEQ ID NO 68653
actgcatcttatctccactctcaaaatcatcttcttcacccaaaaacccctaaaagccttatcccttcttcttcccatggctgcttcagacttcgtctctcgctctctcttccttcaaccctaaatctcttcctttcggcgtctccagacctgcctccgtttccctcttatctccttccctctcctttaaactcaattccgactccgtttccttctccatcgccgccaaatggaactctcccgcttctcgcttcgtccgtaacgttgcgattacctcagagttcgaggtggaagaagatggtttcgctgacgtcgctccgccaaaagagcaatctttctctgctgaccttaaactcttcgttggtaaccttcctttcaacgttgacagtgctcagctcgctcagctctttgagagtgccggaaatgttgagatggttgaggtaatctatgacaaaattacagagaggttttggattcgtgactatgtcttcagtttctgaagttaaggcagctgctcagcagttcaatggctatgagttggatggtagacctttgagagtcaatgctggtcccccaccaccaaagagggaagatggtttctccagaggacctaggagcagctttggaagctcaggttctggatatggaggaggtggtggttctggtgctggttcaggaaaccgtgtttatgtgggtaacctctcttggggagttgatgacatggctcttgagagtttgttctcggagcaaggaaaggttgttgaggccagagtcatctacgacagggacagtggtcgatccaagggttttggatttgtgacatacgactcttctcaagaggtccaaaatgccatcaagtccttggatggtgctgatttggacggtagacaaattagagtctcggaagctgaggctaggcctccaaggccgccaatattgagcaccaatctatgacttcctattctcaaaaacgcatattctggagggcgcttcgaagtaaagagggtttgtgagatgatggcagtttcagacggtactaagctcttagttcgcctatgtttgttgccttggatgcaagaaggtcgtaaaggaatggtcttttttttttttgagaaacgtataattaagatagaaactggagagaccatgttcttgtctgtctgaatgctgccattgactgcttcgctttggttttgattcaatttttttttctctctatatcgtggtctcttcttcctaatgcttctctgtttatttgatcctctgctcaaatgaatatgaacacacttg

SEQ ID NO: 42992 - protein, 168 aa, Arabidopsis thaliana
  peptide (1)..(168): Ceres Seq. ID no. 12481785
MTKLQRGFGFVTMSSVSEVKAAAQQFNGYELDGRPLRVNAGPPPPKREDGFSRGPRSSFGSSGSGYGGGGGSGAGSGNRVYVGNLSWGVDDMALESLFSEQGKVVEARVIYDRDSGRSKGFGFVTYDSSQEVQNAIKSLDGADLDGRQIRVSEAEARPPRPPILSTNL

SEQ ID NO: 42993 - protein, 156 aa, Arabidopsis thaliana
  peptide (1)..(156): Ceres Seq. ID no. 12481786
MSSVSEVKAAAQQFNGYELDGRPLRVNAGPPPPKREDGFSRGPRSSFGSSGSGYGGGGGSGAGSGNRVYVGNLSWGVDDMALESLFSEQGKVVEARVIYDRDSGRSKGFGFVTYDSSQEVQNAIKSLDGADLDGRQIRVSEAEARPPRPPILSTNL

SEQ ID NO: 42994 - protein, 147 aa, Arabidopsis thaliana
  peptide (1)..(147): Ceres Seq. ID no. 12481787
TASYLHSQNHLLHPKTPKSLIPSSSHGCFRLRLSLSLPSTLNLFLSASPDLPPFPSYLLPSPLNSIPTPFPSPSPPNGTLPLLASSVTLRLPQSSRWKKMVSLTSLRQKSNLSLLTLNSSLVTFLSTLTVLSSLSSLRVPEMLRWLR

SEQ ID NO: 42995 - DNA, 1261 bp, Arabidopsis thaliana
  misc_feature (1)..(1261): Ceres Seq. ID no. 13494006
  misc_feature (1)..(1261): Ortholog of  Ceres SEQ ID NO 14302555 as cited in SEQ ID NO 55555
acatacgcggaaaaaaaaaaaaaaagcgaatcgtttacttacccctctttgaaaccgacggtggtatttttcgccggagaagatgaagcagagaacctggccttgtagatctgaaggatctcgattctcctccttatcgtttttgaaacctcacgacaaggataaacggagtagaatttcatcaatcaacaaagcaacggcgaagtcaaccacaagttcaaggtcttcttcttcctcttcttcttcacgtcctccatcgaatgagttcggagatttctcgatgcttccgtatgatatactgatgaagattgctgcaccgtttagtcatccgaatcttcaagcggcgtctttggtatgtaaatcgtggagagacgcgctaaagccgttgcgagagtcgatgttgttgattcggtgggggaaaaagtacaagcacggaagaggaggtgtgcgagcgaatctcgacaaagctcttgattcgtttctgaaaggagctatgcgtggatccacgctcgctatggtcgacgctgggcttgtgtattgggaaagaggagagaaggagaaagcggtgaatttgtatcggagagcttcggagcttggtgatgctgttggtcaatgtaatttagggattgcttatcttcaagttcaaccttcaaatcccaaggaagcgatgaaatggttgaaacaatctgcagagaatggttatgttcgagcacagtatcagttagctctttgtttacaccatggtcgggtcgtgcaaaccaatctgcttgaagctactaaatggtacctaaaggcagcagaaggtgggtatgtacgagcgatgtataacatttcgctttgttattcggttggagaaggcttaccacaaaaccgcaagctagcaagaaaatggatgaaacgagcagctgatcacggccacagtaaagctcagtttgaacacggccttgctctattttctgaaggggagatgctgaagtcagtgctttacttagaacttgccgaacgtggtggcgaagcagctgctactcccgtcaaagaagttgtacaccaacagctttctgcaacttttggtggtcaggccgtacaccatgccatacaccaagccaataactggcgtcctctaccagttactcgatgactcctatcatttatttcagtgaggtctagtgattggctagttacatgtccataacttaaattccaatttgacaatgtatcaatgacaaaaccttatttcagatttctacttttagttcgtact

SEQ ID NO: 42996 - protein, 351 aa, Arabidopsis thaliana
  peptide (1)..(351): Ceres Seq. ID no. 13494007
MKQRTWPCRSEGSRFSSLSFLKPHDKDKRSRISSINKATAKSTTSSRSSSSSSSSRPPSNEFGDFSMLPYDILMKIAAPFSHPNLQAASLVCKSWRDALKPLRESMLLIRWGKKYKHGRGGVRANLDKALDSFLKGAMRGSTLAMVDAGLVYWERGEKEKAVNLYRRASELGDAVGQCNLGIAYLQVQPSNPKEAMKWLKQSAENGYVRAQYQLALCLHHGRVVQTNLLEATKWYLKAAEGGYVRAMYNISLCYSVGEGLPQNRKLARKWMKRAADHGHSKAQFEHGLALFSEGEMLKSVLYLELAERGGEAAATPVKEVVHQQLSATFGGQAVHHAIHQANNWRPLPVTR

SEQ ID NO: 42997 - protein, 285 aa, Arabidopsis thaliana
  peptide (1)..(285): Ceres Seq. ID no. 13494008
MLPYDILMKIAAPFSHPNLQAASLVCKSWRDALKPLRESMLLIRWGKKYKHGRGGVRANLDKALDSFLKGAMRGSTLAMVDAGLVYWERGEKEKAVNLYRRASELGDAVGQCNLGIAYLQVQPSNPKEAMKWLKQSAENGYVRAQYQLALCLHHGRVVQTNLLEATKWYLKAAEGGYVRAMYNISLCYSVGEGLPQNRKLARKWMKRAADHGHSKAQFEHGLALFSEGEMLKSVLYLELAERGGEAAATPVKEVVHQQLSATFGGQAVHHAIHQANNWRPLPVTR

SEQ ID NO: 42998 - protein, 278 aa, Arabidopsis thaliana
  peptide (1)..(278): Ceres Seq. ID no. 13494009
MKIAAPFSHPNLQAASLVCKSWRDALKPLRESMLLIRWGKKYKHGRGGVRANLDKALDSFLKGAMRGSTLAMVDAGLVYWERGEKEKAVNLYRRASELGDAVGQCNLGIAYLQVQPSNPKEAMKWLKQSAENGYVRAQYQLALCLHHGRVVQTNLLEATKWYLKAAEGGYVRAMYNISLCYSVGEGLPQNRKLARKWMKRAADHGHSKAQFEHGLALFSEGEMLKSVLYLELAERGGEAAATPVKEVVHQQLSATFGGQAVHHAIHQANNWRPLPVTR

SEQ ID NO: 42999 - DNA, 1331 bp, Arabidopsis thaliana; identical to SEQ ID NO: 36290
  misc_feature (1)..(1331): Ceres Seq. ID no. 12330652
  misc_feature (1)..(1331): Ortholog of  Ceres SEQ ID NO 13584001 as cited in SEQ ID NO 63430
  misc_feature (1)..(1331): Ortholog of  Ceres SEQ ID NO 15180075 as cited in SEQ ID NO 0

SEQ ID NO: 43000 - protein, 383 aa, Arabidopsis thaliana; identical to SEQ ID NO: 36291
  peptide (1)..(383): Ceres Seq. ID no. 12330653

SEQ ID NO: 43001 - protein, 379 aa, Arabidopsis thaliana; identical to SEQ ID NO: 36292
  peptide (1)..(379): Ceres Seq. ID no. 12330654

SEQ ID NO: 43002 - protein, 284 aa, Arabidopsis thaliana; identical to SEQ ID NO: 36293
  peptide (1)..(284): Ceres Seq. ID no. 12330655

SEQ ID NO: 43003 - DNA, 1692 bp, Arabidopsis thaliana
  misc_feature (1)..(1692): Ceres Seq. ID no. 12338706
  misc_feature (1)..(1692): Ortholog of  Ceres SEQ ID NO 13593854 as cited in SEQ ID NO 53403
  misc_feature (1)..(1692): Ortholog of  Ceres SEQ ID NO 12581680 as cited in SEQ ID NO 55019
aagatttgttttctttctctctcgtcatctctcttcctctctgtaatcccaaccngagttacgattccttcttatcgtaactcctgcttccgatctcgatccaattttcacttttgttttgtccgaacggtaaatcatttcgcggcttttttttttttaagggaaggaggaataagcaaattttgatttgattccgtttttttgggggtgttagtgatcttttagatgaagtaaagaaattttgattattgaggggattatgtgagttatggtatcatcggcaactatattgcggatggtagcaccatgttggaggcgaccttctgttaaaggagatcattctactagagacgctaatggtcgatgtgatggtcttctttggtataaagattctggtaaccatgttgctggagagttctctatgtctgttattcaagctaataatcttctcgaagatcatagcaagcttgagtctggacctgttagtatgtttgattctggtcctcaagctacttttgttggtgtttatgatggtcatggtggtcctgaagctgcccgtttcgttaataaacacctcttcgacaacatcaggaagtttacatcagagaatcatggaatgtctgccaatgttataactaaagcgtttttagctacggaagaagattttctttctcttgtccggcggcagtggcagattaaaccacagattgcttctgttggagcttgttgtctggtagggatcatatgtagtggattgttgtatattgcaaacgctggagattctcgggttgtgctaggaagactggaaaaagcgtttaaaattgtcaaggccgttcagttatcgtctgagcataatgcaagtcttgaatctgtgagagaggagttgcgctcgttgcatccaaatgatcctcagattgtggtcttgaagcacaaagtttggcgtgtcaaaggtattatacaggtaaaaatactttcacggtaatgcgagttgctgacttctagactcttttcttgcaagtagcttgactgtgaaagatacaactaagtaagccctatgcatgtataagaagaggatttttcgctagatataacccgtggctggttcttgaaggtttcacggtcgattggtgatgcatacttaaagaaagcagaattcaaccgggaaccattgttggcaaagttcagggtccctgaggttttccataagcccatccttagagcagagccggcaattacagtacacaaaatccatccagaagatcagtttcttatatttgcatcagacggcttgtgggagcacttgtccaatcaagaagctgttgacattgtgaacacatgcccgcgcaatgggattgcaaggaagctcataaaaacagctctaagagaggcagcaaagaagagagagatgagatattcggatctaaaaaagatcgatagaggagtgcggagacattttcatgatgatataacagtcatagttgtgtttcttgattcacatctcgtcagtcgcagtacctcacgccgacctctcctctccatctcaggtggtggtgatttagctggaccttctacttgactctactctcaccacatctatatatatcttatatatacattatccactatatataaaaacacattgcaaaacgcaattcaagttccttcttttttttttttctctatatataaaaa

SEQ ID NO: 43004 - protein, 237 aa, Arabidopsis thaliana
  peptide (1)..(237): Ceres Seq. ID no. 12338707
MVSSATILRMVAPCWRRPSVKGDHSTRDANGRCDGLLWYKDSGNHVAGEFSMSVIQANNLLEDHSKLESGPVSMFDSGPQATFVGVYDGHGGPEAARFVNKHLFDNIRKFTSENHGMSANVITKAFLATEEDFLSLVRRQWQIKPQIASVGACCLVGIICSGLLYIANAGDSRVVLGRLEKAFKIVKAVQLSSEHNASLESVREELRSLHPNDPQIVVLKHKVWRVKGIIQVKILSR

SEQ ID NO: 43005 - protein, 228 aa, Arabidopsis thaliana
  peptide (1)..(228): Ceres Seq. ID no. 12338708
MVAPCWRRPSVKGDHSTRDANGRCDGLLWYKDSGNHVAGEFSMSVIQANNLLEDHSKLESGPVSMFDSGPQATFVGVYDGHGGPEAARFVNKHLFDNIRKFTSENHGMSANVITKAFLATEEDFLSLVRRQWQIKPQIASVGACCLVGIICSGLLYIANAGDSRVVLGRLEKAFKIVKAVQLSSEHNASLESVREELRSLHPNDPQIVVLKHKVWRVKGIIQVKILSR

SEQ ID NO: 43006 - protein, 186 aa, Arabidopsis thaliana
  peptide (1)..(186): Ceres Seq. ID no. 12338709
MSVIQANNLLEDHSKLESGPVSMFDSGPQATFVGVYDGHGGPEAARFVNKHLFDNIRKFTSENHGMSANVITKAFLATEEDFLSLVRRQWQIKPQIASVGACCLVGIICSGLLYIANAGDSRVVLGRLEKAFKIVKAVQLSSEHNASLESVREELRSLHPNDPQIVVLKHKVWRVKGIIQVKILSR

SEQ ID NO: 43007 - DNA, 1524 bp, Arabidopsis thaliana
  misc_feature (1)..(1524): Ceres Seq. ID no. 12603009
  misc_feature (1)..(1524): Ortholog of  Ceres SEQ ID NO 15176433 as cited in SEQ ID NO 59539
ggaaaaaatctctctttcgaataaaaaaaaaatctcagaatccaaaaatgggtcgtgtccgaaaatcagatttcggttccattgttcttgttctgtgttgtgtcctaaatagcttactctgtaatggaggcatcaccagtagatatgtcagaaaattagaagcaaccgttgatatgcctcttgatagcgatgtttttcgtgttccttgtggctacaatgctcctcaacaggtgcatataacacaaggagatgtagaaggaaaggcagtgatagtatcatgggtgacacaagaagcaaaaggatctaacaaagtcatttactggaaagagaatagcaccaaaaagcacaaagctcatggcaaaaccaatacttacaagttctacaattatacttctggttttatccatcattgccctatcagaaacttagagtatgacaccaagtactattatgtgttaggtgtgggacaaacggagcgtaagttttggttcttcactcctcctgagatcggtcctgatgttccctacacttttggtctcattggggatcttgggcagagttatgactcaaacataaccttaacacattatgagaataacccaacaaaagggcaagcggttttgttcgtcggcgatatctcatacgctgatacttatccggatcatgacaataggagatgggacagttggggaagatttgctgaaagaagcacagcttatcagccttggatttggactaccggaaaccatgaactcgattttgccccggagattggtgaaaacagaccgtttaagccgttcacgcataggtaccgaactccttaccgatcatcaggcagcaccgaaccattctggtactcgataaagagaggaccggcttacataatcgtgctagcttcatattcagcatatggaaaatacacaccacagtaccaatggctcgaagaggagttcccaaaggttaacagaacggaaactccgtggttgattgttctgatgcattcaccatggtacaacagctatgattaccattacatggaaggtgaaacaatgagggtaatgtatgaggcttggtttgtcaagtacaaagtagatgtagtttttgcaggtcatgtccacgcctacgaaagatcggaacgtgtatcaaacatagcttacaatgttgttaacggcatttgcactccagtcaaagatcaatcagctccagtctatatcaccattggtgatggaggcaatattgagggcttggctaccaaaatgactgagcctcagcctaagtactctgcctttagagaagcaagcttcgggcatgctatattctcgataaagaacaggacgcatgctcactatggatggcataggaaccatgatggttatgctgtggagggtgacagaatgtggttttataacagattttggcatcctgttgatgattctccttcttgtaattcttgagaatctatgaggaataggatttgttgtatctctatgattgaacaaccatccaaataaatgaattgtttga

SEQ ID NO: 43008 - protein, 483 aa, Arabidopsis thaliana
  peptide (1)..(483): Ceres Seq. ID no. 12603010
KKSLFRIKKKSQNPKMGRVRKSDFGSIVLVLCCVLNSLLCNGGITSRYVRKLEATVDMPLDSDVFRVPCGYNAPQQVHITQGDVEGKAVIVSWVTQEAKGSNKVIYWKENSTKKHKAHGKTNTYKFYNYTSGFIHHCPIRNLEYDTKYYYVLGVGQTERKFWFFTPPEIGPDVPYTFGLIGDLGQSYDSNITLTHYENNPTKGQAVLFVGDISYADTYPDHDNRRWDSWGRFAERSTAYQPWIWTTGNHELDFAPEIGENRPFKPFTHRYRTPYRSSGSTEPFWYSIKRGPAYIIVLASYSAYGKYTPQYQWLEEEFPKVNRTETPWLIVLMHSPWYNSYDYHYMEGETMRVMYEAWFVKYKVDVVFAGHVHAYERSERVSNIAYNVVNGICTPVKDQSAPVYITIGDGGNIEGLATKMTEPQPKYSAFREASFGHAIFSIKNRTHAHYGWHRNHDGYAVEGDRMWFYNRFWHPVDDSPSCNS

SEQ ID NO: 43009 - protein, 468 aa, Arabidopsis thaliana
  peptide (1)..(468): Ceres Seq. ID no. 12603011
MGRVRKSDFGSIVLVLCCVLNSLLCNGGITSRYVRKLEATVDMPLDSDVFRVPCGYNAPQQVHITQGDVEGKAVIVSWVTQEAKGSNKVIYWKENSTKKHKAHGKTNTYKFYNYTSGFIHHCPIRNLEYDTKYYYVLGVGQTERKFWFFTPPEIGPDVPYTFGLIGDLGQSYDSNITLTHYENNPTKGQAVLFVGDISYADTYPDHDNRRWDSWGRFAERSTAYQPWIWTTGNHELDFAPEIGENRPFKPFTHRYRTPYRSSGSTEPFWYSIKRGPAYIIVLASYSAYGKYTPQYQWLEEEFPKVNRTETPWLIVLMHSPWYNSYDYHYMEGETMRVMYEAWFVKYKVDVVFAGHVHAYERSERVSNIAYNVVNGICTPVKDQSAPVYITIGDGGNIEGLATKMTEPQPKYSAFREASFGHAIFSIKNRTHAHYGWHRNHDGYAVEGDRMWFYNRFWHPVDDSPSCNS

SEQ ID NO: 43010 - protein, 426 aa, Arabidopsis thaliana
  peptide (1)..(426): Ceres Seq. ID no. 12603012
MPLDSDVFRVPCGYNAPQQVHITQGDVEGKAVIVSWVTQEAKGSNKVIYWKENSTKKHKAHGKTNTYKFYNYTSGFIHHCPIRNLEYDTKYYYVLGVGQTERKFWFFTPPEIGPDVPYTFGLIGDLGQSYDSNITLTHYENNPTKGQAVLFVGDISYADTYPDHDNRRWDSWGRFAERSTAYQPWIWTTGNHELDFAPEIGENRPFKPFTHRYRTPYRSSGSTEPFWYSIKRGPAYIIVLASYSAYGKYTPQYQWLEEEFPKVNRTETPWLIVLMHSPWYNSYDYHYMEGETMRVMYEAWFVKYKVDVVFAGHVHAYERSERVSNIAYNVVNGICTPVKDQSAPVYITIGDGGNIEGLATKMTEPQPKYSAFREASFGHAIFSIKNRTHAHYGWHRNHDGYAVEGDRMWFYNRFWHPVDDSPSCNS

SEQ ID NO: 43011 - DNA, 1153 bp, Arabidopsis thaliana
  misc_feature (1)..(1153): Ceres Seq. ID no. 12326605
  misc_feature (1)..(1153): Ortholog of  Ceres SEQ ID NO 14303324 as cited in SEQ ID NO 54563
  misc_feature (1)..(1153): Ortholog of  Ceres SEQ ID NO 13584238 as cited in SEQ ID NO 64216
gacataacttgcaagctgttgagattttccatcctcaataactttattcttccatatctctcccatttcgctctctatttcacatccccatataacataatatacaatcacacatatcatttctatatagtatttaatggggagacagccatgctgtgacaagctaggggtgaagaaagggccgtggacggtggaggaagataagaagcttataaacttcatactaaccaatggccattgttgctggcgtgctttgccgaagctggccggtctccgtcgctgtggaaagagctgccgcctccggtggactaactatctccggcctgacttaaaacgaggccttctctcgcatgatgaagaacaacttgtcatagatcttcatgctaatctcggcaataagtggtctaagatagcttcaagattacctggaagaacagataacgaaataaaaaaccattggaatactcatatcaagaagaaacttcttaagatgggaatcgatcctatgacccatcaacccctaaatcaagaaccttctaatatcgataattccaaaaccattccgtccaatccagacgatgtctcagtggaaccaaagacaactaacacgaaatacgtggagataagtgtcacgacaacagaagaagaaagtagtagcacggttactgatcaaaacagttcgatggataatgaaaatcatctaattgacaacatttatgatgatgatgaattgtttagttacttatggtccgacgaaactactaaagatgaggcctcttggagtgatagtaactttggtgttggtggaacattatatgaccacaatatctccggcgccgatgcagattttccgatatggtcaccggaaagaatcaatgacgagaagatgtttttggattattgtcaagactttggtgttcatgattttgggttttgactgttcaccattgacatattggcaactctatggagatgaacacaagcattgagttgtcatgtttatacatacgtggcatatacatatatatatatgtacattatatgtaaacatatacacgcatacaaatcataaacatgtaaggataataaatccatgtaaatcagtaagggtgcaccatggttttcaagtattattaattagggtttggtaggt

SEQ ID NO: 43012 - protein, 266 aa, Arabidopsis thaliana
  peptide (1)..(266): Ceres Seq. ID no. 12326606
MGRQPCCDKLGVKKGPWTVEEDKKLINFILTNGHCCWRALPKLAGLRRCGKSCRLRWTNYLRPDLKRGLLSHDEEQLVIDLHANLGNKWSKIASRLPGRTDNEIKNHWNTHIKKKLLKMGIDPMTHQPLNQEPSNIDNSKTIPSNPDDVSVEPKTTNTKYVEISVTTTEEESSSTVTDQNSSMDNENHLIDNIYDDDELFSYLWSDETTKDEASWSDSNFGVGGTLYDHNISGADADFPIWSPERINDEKMFLDYCQDFGVHDFGF

SEQ ID NO: 43013 - protein, 148 aa, Arabidopsis thaliana
  peptide (1)..(148): Ceres Seq. ID no. 12326607
MGIDPMTHQPLNQEPSNIDNSKTIPSNPDDVSVEPKTTNTKYVEISVTTTEEESSSTVTDQNSSMDNENHLIDNIYDDDELFSYLWSDETTKDEASWSDSNFGVGGTLYDHNISGADADFPIWSPERINDEKMFLDYCQDFGVHDFGF

SEQ ID NO: 43014 - protein, 143 aa, Arabidopsis thaliana
  peptide (1)..(143): Ceres Seq. ID no. 12326608
MTHQPLNQEPSNIDNSKTIPSNPDDVSVEPKTTNTKYVEISVTTTEEESSSTVTDQNSSMDNENHLIDNIYDDDELFSYLWSDETTKDEASWSDSNFGVGGTLYDHNISGADADFPIWSPERINDEKMFLDYCQDFGVHDFGF

SEQ ID NO: 43015 - DNA, 1931 bp, Arabidopsis thaliana
  misc_feature (1)..(1931): Ceres Seq. ID no. 12326601
  misc_feature (1)..(1931): Ortholog of  Ceres SEQ ID NO 13596816 as cited in SEQ ID NO 62287
aatttttcactttctatttctctatatctatttttttatagatatatattttgtcttggttggattttgttctcgtgggttacttacttgagagaacctcgagacctgtcttgtctttatgcttcagaagcaaatcaaagcatctctccaagatttgaagctccatctatggctgcccttcttctccttttccttttcctcttcgcaagctctgctctctctcaagattctttgatcggtgtgaatattggtactgaagtgacaaacatgccaagtccaacacaagtagtagcactcctcaaatcacagaacatcaaccgcgtccgcctctatgacgcagaccgctcaatgcttctcgcgtttgctcacaccggggttcaagttataatctcagtacctaacgaccagcttctcggtatcagccaatcaaatgcaaccgcagccaattgggtgactagaaatgtagctgcatattaccctgcgaccaacattaccacaattgctgtcggatcagaagtcctaaccagcctaacaaacgcagcttctgtccttgtctcagccctcaaatacatacaagctgctctcgtcacggccaatctcgaccgtcagatcaaagtatcgacaccgcactcttcaaccatcattcttgattctttccctccttcgcaagctttcttcaacaagacttgggatccagttattgtccctctcctcaaattcctacagtccacaggatcgccattgctgctcaacgtttacccgtatttcgactatgttcagtccaatggagttataccgcttgactacgcgcttttccagcctctccaagccaacaaagaagctgtagacgccaacacattgttacattacacaaacgtttttgatgcaatcgtagacgctgcttattttgcaatgtcttatcttaacttcaccaacattccaatcgtggtcacagaatctggatggccatctaaaggaggcccttctgagcacgacgcaacggtagagaatgcaaacacttacaatagcaatttgatccagcatgtgatcaacaagactggaacgccaaaacacccgggaactgcagttactacatacatctacgagctttacaacgaggatacgaggccaggaccggtatctgagaagaactgggggctgttttatacaaacgggactccggtttacacattgcgtttagcgggtgcaggggcgattctggcaaatgatactacaaaccagacattttgtatagcgaaggaaaaggttgatagaaagatgcttcaagcagctcttgactgggcttgcggtccagggaaggtcgattgctcggcactgatgcagggagagtcatgttatgaacccgacgatgtggttgcacattctacttatgcgtttaatgcttattaccagaagatgggaaaagcttcaggaagctgtgatttcaaaggagttgctacagtcaccaccactgatccaagtcgaggaacatgcgtgttccctggaagtgcaaaaagcaatcagacacttggaaacaacacctcggcgttggccccctcagcgaactctacaacctctggatgtatcccaaagtactatcatcaccctcacgcatctttcggtgacttaacattactctcccttctactgatcattgccttagtattcttgtagaaactctgaaaagaacaacaactctcaattcttgtttctctaaattttaacttctttctttgcaacacttgagacaaaagagctcggtgggtttgttctctctgtgtctagttgtctacccagttttgttgatcatctccttttaacatggagttcattgagggtagcatgtaggttcggcttcaagatcatggatgattgtaactaatttcctgtgttgaaagcttgattctttcttttttatggctgaatatttc

SEQ ID NO: 43016 - protein, 557 aa, Arabidopsis thaliana
  peptide (1)..(557): Ceres Seq. ID no. 12326602
NFSLSISLYLFFYRYIFCLGWILFSWVTYLREPRDLSCLYASEANQSISPRFEAPSMAALLLLFLFLFASSALSQDSLIGVNIGTEVTNMPSPTQVVALLKSQNINRVRLYDADRSMLLAFAHTGVQVIISVPNDQLLGISQSNATAANWVTRNVAAYYPATNITTIAVGSEVLTSLTNAASVLVSALKYIQAALVTANLDRQIKVSTPHSSTIILDSFPPSQAFFNKTWDPVIVPLLKFLQSTGSPLLLNVYPYFDYVQSNGVIPLDYALFQPLQANKEAVDANTLLHYTNVFDAIVDAAYFAMSYLNFTNIPIVVTESGWPSKGGPSEHDATVENANTYNSNLIQHVINKTGTPKHPGTAVTTYIYELYNEDTRPGPVSEKNWGLFYTNGTPVYTLRLAGAGAILANDTTNQTFCIAKEKVDRKMLQAALDWACGPGKVDCSALMQGESCYEPDDVVAHSTYAFNAYYQKMGKASGSCDFKGVATVTTTDPSRGTCVFPGSAKSNQTLGNNTSALAPSANSTTSGCIPKYYHHPHASFGDLTLLSLLLIIALVFL

SEQ ID NO: 43017 - protein, 501 aa, Arabidopsis thaliana
  peptide (1)..(501): Ceres Seq. ID no. 12326603
MAALLLLFLFLFASSALSQDSLIGVNIGTEVTNMPSPTQVVALLKSQNINRVRLYDADRSMLLAFAHTGVQVIISVPNDQLLGISQSNATAANWVTRNVAAYYPATNITTIAVGSEVLTSLTNAASVLVSALKYIQAALVTANLDRQIKVSTPHSSTIILDSFPPSQAFFNKTWDPVIVPLLKFLQSTGSPLLLNVYPYFDYVQSNGVIPLDYALFQPLQANKEAVDANTLLHYTNVFDAIVDAAYFAMSYLNFTNIPIVVTESGWPSKGGPSEHDATVENANTYNSNLIQHVINKTGTPKHPGTAVTTYIYELYNEDTRPGPVSEKNWGLFYTNGTPVYTLRLAGAGAILANDTTNQTFCIAKEKVDRKMLQAALDWACGPGKVDCSALMQGESCYEPDDVVAHSTYAFNAYYQKMGKASGSCDFKGVATVTTTDPSRGTCVFPGSAKSNQTLGNNTSALAPSANSTTSGCIPKYYHHPHASFGDLTLLSLLLIIALVFL

SEQ ID NO: 43018 - protein, 468 aa, Arabidopsis thaliana
  peptide (1)..(468): Ceres Seq. ID no. 12326604
MPSPTQVVALLKSQNINRVRLYDADRSMLLAFAHTGVQVIISVPNDQLLGISQSNATAANWVTRNVAAYYPATNITTIAVGSEVLTSLTNAASVLVSALKYIQAALVTANLDRQIKVSTPHSSTIILDSFPPSQAFFNKTWDPVIVPLLKFLQSTGSPLLLNVYPYFDYVQSNGVIPLDYALFQPLQANKEAVDANTLLHYTNVFDAIVDAAYFAMSYLNFTNIPIVVTESGWPSKGGPSEHDATVENANTYNSNLIQHVINKTGTPKHPGTAVTTYIYELYNEDTRPGPVSEKNWGLFYTNGTPVYTLRLAGAGAILANDTTNQTFCIAKEKVDRKMLQAALDWACGPGKVDCSALMQGESCYEPDDVVAHSTYAFNAYYQKMGKASGSCDFKGVATVTTTDPSRGTCVFPGSAKSNQTLGNNTSALAPSANSTTSGCIPKYYHHPHASFGDLTLLSLLLIIALVFL

SEQ ID NO: 43019 - DNA, 1257 bp, Arabidopsis thaliana
  misc_feature (1)..(1257): Ceres Seq. ID no. 12558562
  misc_feature (1)..(1257): Ortholog of  Ceres SEQ ID NO 15168537 as cited in SEQ ID NO 57100
  misc_feature (1)..(1257): Ortholog of  Ceres SEQ ID NO 15178681 as cited in SEQ ID NO 63192
  misc_feature (1)..(1257): Ortholog of  Ceres SEQ ID NO 13579918 as cited in SEQ ID NO 64644
  misc_feature (1)..(1257): Ortholog of  Ceres SEQ ID NO 13654122 as cited in SEQ ID NO 68192
taggaagaagaagaataaactcttgttcccatgatcttcgtcgatgttctttggaaattgtttcctctatactcgtttggatcaggaagagactctctctcagagtccattttgcagatcattcccgagacaatggcttcttctaccactaaaatcctctgtgatgctggcgaatcagacctctgtagagacgattctgctgcatttctccttaagtttgtagccattgcctccattctactagctggagctgctggtgtagccatacctctcattggcaggaaccgccggtttcttcaaaccgagggaaatctctttgtagctgctaaagcctttgcagctggtgtcatactcgccaccggctttgtccatatgcttgcaggtggcacagaagctctgagtaatccgtgtttaccggattttccgtggtctaagtttccctttcccgggttctttgcaatggttgctgctttagctactctgcttgttgatttcatggggacacagtactatgagaggaagcaagagaggaatcaggctgctactgaagccgctgctggtagtgaagagattgctgttgttcctgtggttggggaaagagtgaccgataataaagtgtttggtgaagaagacggtggcgggattcacattgtcggcattcgtgcacatgctgctcaccataggcatagtcactctaatagtcatggtacatgtgatggacatgctcatggacattcacacggacatatgcacgggaattcagatgttgaaaatggagctaggcatgttgttgtttctcagatattggagctcgggattgtgtcgcactcaatcatcatcggtttatccctgggggtatcacagtctccatgcacgatcaggcctcttattgcagctctgtcatttcaccagttctttgaaggatttgcgctcggaggctgcatctctcaggcacagttcaggaacaaatcagcgaccataatggcttgcttctttgcgctaaccacaccattagggatcgggattggaactgcagtggcctcatctttcaactcgcatagccctggagctttggtcactgaggggatactggactcgctgtcagctggaatactggtgtacatggctctggtggacctcatcgcagctgattttctgagtaagaggatgagttgtaatttgaggcttcaagttgtgtcttatgtaatgttgttccttggagctggacttatgtctgctctcgccatttgggcttag

SEQ ID NO: 43020 - protein, 408 aa, Arabidopsis thaliana
  peptide (1)..(408): Ceres Seq. ID no. 12558563
MIFVDVLWKLFPLYSFGSGRDSLSESILQIIPETMASSTTKILCDAGESDLCRDDSAAFLLKFVAIASILLAGAAGVAIPLIGRNRRFLQTEGNLFVAAKAFAAGVILATGFVHMLAGGTEALSNPCLPDFPWSKFPFPGFFAMVAALATLLVDFMGTQYYERKQERNQAATEAAAGSEEIAVVPVVGERVTDNKVFGEEDGGGIHIVGIRAHAAHHRHSHSNSHGTCDGHAHGHSHGHMHGNSDVENGARHVVVSQILELGIVSHSIIIGLSLGVSQSPCTIRPLIAALSFHQFFEGFALGGCISQAQFRNKSATIMACFFALTTPLGIGIGTAVASSFNSHSPGALVTEGILDSLSAGILVYMALVDLIAADFLSKRMSCNLRLQVVSYVMLFLGAGLMSALAIWA

SEQ ID NO: 43021 - protein, 374 aa, Arabidopsis thaliana
  peptide (1)..(374): Ceres Seq. ID no. 12558564
MASSTTKILCDAGESDLCRDDSAAFLLKFVAIASILLAGAAGVAIPLIGRNRRFLQTEGNLFVAAKAFAAGVILATGFVHMLAGGTEALSNPCLPDFPWSKFPFPGFFAMVAALATLLVDFMGTQYYERKQERNQAATEAAAGSEEIAVVPVVGERVTDNKVFGEEDGGGIHIVGIRAHAAHHRHSHSNSHGTCDGHAHGHSHGHMHGNSDVENGARHVVVSQILELGIVSHSIIIGLSLGVSQSPCTIRPLIAALSFHQFFEGFALGGCISQAQFRNKSATIMACFFALTTPLGIGIGTAVASSFNSHSPGALVTEGILDSLSAGILVYMALVDLIAADFLSKRMSCNLRLQVVSYVMLFLGAGLMSALAIWA

SEQ ID NO: 43022 - protein, 294 aa, Arabidopsis thaliana
  peptide (1)..(294): Ceres Seq. ID no. 12558565
MLAGGTEALSNPCLPDFPWSKFPFPGFFAMVAALATLLVDFMGTQYYERKQERNQAATEAAAGSEEIAVVPVVGERVTDNKVFGEEDGGGIHIVGIRAHAAHHRHSHSNSHGTCDGHAHGHSHGHMHGNSDVENGARHVVVSQILELGIVSHSIIIGLSLGVSQSPCTIRPLIAALSFHQFFEGFALGGCISQAQFRNKSATIMACFFALTTPLGIGIGTAVASSFNSHSPGALVTEGILDSLSAGILVYMALVDLIAADFLSKRMSCNLRLQVVSYVMLFLGAGLMSALAIWA

SEQ ID NO: 43023 - DNA, 1421 bp, Arabidopsis thaliana
  misc_feature (1)..(1421): Ceres Seq. ID no. 12738411
  misc_feature (1)..(1421): Ortholog of  Ceres SEQ ID NO 13595164 as cited in SEQ ID NO 56222
  misc_feature (1)..(1421): Ortholog of  Ceres SEQ ID NO 13595665 as cited in SEQ ID NO 59902
  misc_feature (1)..(1421): Ortholog of  Ceres SEQ ID NO 14302438 as cited in SEQ ID NO 62982
  misc_feature (1)..(1421): Ortholog of  Ceres SEQ ID NO 13591068 as cited in SEQ ID NO 69043
  misc_feature (1)..(1421): Ortholog of  Ceres SEQ ID NO 13623041 as cited in SEQ ID NO 0
attaaaaattttagttatgaaacaatataaccaaaaaattgccaagattgttcttgaatcttacttgtgcattgtaaatagagtctgttagcaaactttgaccattgagtattttgtgatttgtgtctagattcttgaatcttattctatggttattggacttcataaatccattttgttctttagtagttggtacccaaatattgatttttcaatagtttcagaaaacagaccaacatggaagatcggtgcttgatcaagaacgatgtcactgaattggttggtaacacaccaatggtgtatctgaacaatgttgttgatggttgcgtggctcgtatcgctgcaaagcttgagatgatggagccttgttctagcgtcaaagacagaatcgcgtatagtatgatcaaagatgcagaagaaaaaggattgattactcccggaaagagtacattgatagagccaactgctggtaacaccgggattggtttagcttgcatgggagctgcaagaggctataaagtgatccttgtgatgccttcaactatgagcttagagagaagaatcattctgagggcactaggtgcagaccttcatctctcggaccagcgcataggccttaaaggaatgttggagaaaactgaagcgattttaagcaaaactcctggtggttacattccacaacaatttgaaaatcctgcaaaccccgagattcattaccgaaccacgggaccggaaatatggagagattcagccgggaaagtagatatattggtcgctggcgtagggactggtggaactgctactggagtagggaagttcctcaaggagcagaacaaagacatcaaggtttgtgtggtggaaccagtagaaagtccggtacttagcggaggtcaaccaggtccacatttgattcagggaattggctctggtatcgtcccattcaatttggacttaaccattgttgatgaaattattcaagtggcaggtgaagaggctattgaaacagccaagcttcttgccctcaaagaaggattactggtgggaatatcctctggagccgcagcagcggctgcgttaaaggttgcaaagcggccagaaaacgcggggaaactcattgtggtggtttttcctagtggaggagaacgttatttatcgactaaactgttcgattcgattagatatgaagcagagaatttgcctattgaatgaatgttggacgtgtgccggtttcgtgtgtaataagagacgttcgttccaagagtccaagatttcaatttgcttattactggtcaatgtgaaatgtataaaaagttgcatatttgattatgaataattttagttgactacttccattgcaattcttggtcgaaaacatgaattttaataaaacagaataatctacatgaacgtttcattgactc

SEQ ID NO: 43024 - protein, 323 aa, Arabidopsis thaliana
  peptide (1)..(323): Ceres Seq. ID no. 12738412
MEDRCLIKNDVTELVGNTPMVYLNNVVDGCVARIAAKLEMMEPCSSVKDRIAYSMIKDAEEKGLITPGKSTLIEPTAGNTGIGLACMGAARGYKVILVMPSTMSLERRIILRALGADLHLSDQRIGLKGMLEKTEAILSKTPGGYIPQQFENPANPEIHYRTTGPEIWRDSAGKVDILVAGVGTGGTATGVGKFLKEQNKDIKVCVVEPVESPVLSGGQPGPHLIQGIGSGIVPFNLDLTIVDEIIQVAGEEAIETAKLLALKEGLLVGISSGAAAAAALKVAKRPENAGKLIVVVFPSGGERYLSTKLFDSIRYEAENLPIE

SEQ ID NO: 43025 - protein, 304 aa, Arabidopsis thaliana
  peptide (1)..(304): Ceres Seq. ID no. 12738413
MVYLNNVVDGCVARIAAKLEMMEPCSSVKDRIAYSMIKDAEEKGLITPGKSTLIEPTAGNTGIGLACMGAARGYKVILVMPSTMSLERRIILRALGADLHLSDQRIGLKGMLEKTEAILSKTPGGYIPQQFENPANPEIHYRTTGPEIWRDSAGKVDILVAGVGTGGTATGVGKFLKEQNKDIKVCVVEPVESPVLSGGQPGPHLIQGIGSGIVPFNLDLTIVDEIIQVAGEEAIETAKLLALKEGLLVGISSGAAAAAALKVAKRPENAGKLIVVVFPSGGERYLSTKLFDSIRYEAENLPIE

SEQ ID NO: 43026 - protein, 284 aa, Arabidopsis thaliana
  peptide (1)..(284): Ceres Seq. ID no. 12738414
MMEPCSSVKDRIAYSMIKDAEEKGLITPGKSTLIEPTAGNTGIGLACMGAARGYKVILVMPSTMSLERRIILRALGADLHLSDQRIGLKGMLEKTEAILSKTPGGYIPQQFENPANPEIHYRTTGPEIWRDSAGKVDILVAGVGTGGTATGVGKFLKEQNKDIKVCVVEPVESPVLSGGQPGPHLIQGIGSGIVPFNLDLTIVDEIIQVAGEEAIETAKLLALKEGLLVGISSGAAAAAALKVAKRPENAGKLIVVVFPSGGERYLSTKLFDSIRYEAENLPIE

SEQ ID NO: 43027 - DNA, 1239 bp, Arabidopsis thaliana
  misc_feature (1)..(1239): Ceres Seq. ID no. 13494022
  misc_feature (1)..(1239): Ortholog of  Ceres SEQ ID NO 14315223 as cited in SEQ ID NO 52527
  misc_feature (1)..(1239): Ortholog of  Ceres SEQ ID NO 14307085 as cited in SEQ ID NO 54749
atcttttcttacaaagactttttgacatctccccctccagctattatatagtctccttttttcttttctgcattcacataatattgcccctatatagtttacacaacatcatacccaccaacatatataatcttgatcatagagagataaacagaggccgctatcaagaacaagactaagaacaagacttcactaggagtacaagtatgggaagagcaccgtgttgtgacaaagcaaacgtgaagaaagggccttggtctcctgaggaagatgcaaaactcaaatcttacattgaaaatagtggcaccggaggcaattggatcgctttgcctcaaaagattggtttaaagagatgtggaaagagttgcaggctgaggtggcttaactatcttagaccaaacatcaaacacggtggcttctctgaggaagaagaaaacatcatttgtagcctttaccttacaattggtagcaggtggtctataatcgctgctcaattgccgggacgaacagacaacgatataaaaaactattggaacacgaggctcaagaagaaactcattaacaaacaacgcaaggagcttcaagaagcttgtatggagcagcaagagatgatggtgatgatgaagagacaacaccaacaacaacaaatccaaacttcttttatgatgagacaagaccaaacaatgttcacatggccactacatcatcataatgttcaagttccagctcttttcatgaatcaaaccaactcgttttgcgaccaagaagatgttaagccagtgctcatcaagaacatggtcaagatcgaagatcaagaactggagaaaacaaaccctcatcatcatcaagattcaatgacaaacgcttttgatcatctctctttctctcaactcttgttagatcctaatcataaccacttaggatcaggagagggtttctccatgaactctatcttgagcgccaacacaaactctccattgcttaacacaagtaatgataatcagtggttcgggaatttccaggccgaaaccgtaaacttgttctcaggagcctccacaagtacttcggcagatcaaagcactataagttgggaagacataagctctcttgtttattctgattcaaagcaatttttttaattataataatatattattcttaagatgaaacgtacatcattattattaattgggggtacgtaacgtatatatggaataacgatctagtttgtttaaattt

SEQ ID NO: 43028 - protein, 310 aa, Arabidopsis thaliana
  peptide (1)..(310): Ceres Seq. ID no. 15222911
MGRAPCCDKANVKKGPWSPEEDAKLKSYIENSGTGGNWIALPQKIGLKRCGKSCRLRWLNYLRPNIKHGGFSEEEENIICSLYLTIGSRWSIIAAQLPGRTDNDIKNYWNTRLKKKLINKQRKELQEACMEQQEMMVMMKRQHQQQQIQTSFMMRQDQTMFTWPLHHHNVQVPALFMNQTNSFCDQEDVKPVLIKNMVKIEDQELEKTNPHHHQDSMTNAFDHLSFSQLLLDPNHNHLGSGEGFSMNSILSANTNSPLLNTSNDNQWFGNFQAETVNLFSGASTSTSADQSTISWEDISSLVYSDSKQFF

SEQ ID NO: 43029 - protein, 181 aa, Arabidopsis thaliana
  peptide (1)..(181): Ceres Seq. ID no. 15222912
MEQQEMMVMMKRQHQQQQIQTSFMMRQDQTMFTWPLHHHNVQVPALFMNQTNSFCDQEDVKPVLIKNMVKIEDQELEKTNPHHHQDSMTNAFDHLSFSQLLLDPNHNHLGSGEGFSMNSILSANTNSPLLNTSNDNQWFGNFQAETVNLFSGASTSTSADQSTISWEDISSLVYSDSKQFF

SEQ ID NO: 43030 - protein, 176 aa, Arabidopsis thaliana
  peptide (1)..(176): Ceres Seq. ID no. 15222913
MMVMMKRQHQQQQIQTSFMMRQDQTMFTWPLHHHNVQVPALFMNQTNSFCDQEDVKPVLIKNMVKIEDQELEKTNPHHHQDSMTNAFDHLSFSQLLLDPNHNHLGSGEGFSMNSILSANTNSPLLNTSNDNQWFGNFQAETVNLFSGASTSTSADQSTISWEDISSLVYSDSKQFF

SEQ ID NO: 43031 - DNA, 1499 bp, Arabidopsis thaliana
  misc_feature (1)..(1499): Ceres Seq. ID no. 12330711
  misc_feature (1)..(1499): Ortholog of  Ceres SEQ ID NO 13656435 as cited in SEQ ID NO 65853
cttagcagatgcttttgggaaaaaaaatatataccaaaataaaagatctgcatctgtcttcttcttcttcttcatttcctctaaatttaattacccattttttccgataaatttttgttgaggaagaatttttgttgtaaagagagtttaattaaattatgccttcaatagaagatgagctgtttccgtcaacgccgggtaaattcaaaattgaccggtcaaaccgtcagctccaccgttgtttcgcttctacgagcaccatgtttctttgggctctcttcctcatcgctctcaccgcttcttacttgagtttccaaagcttcgtcgattccggtagccgttatctaaccgcttcttggggcggcatccagtgggagaaacaggttcgtacctccgctcagatccatcgctccggcggtatctccgtccttgttaccggcgctaccggattcgtcggtagccacgtgtcacttgccttgaggaaacgcggcgatggtgttgttggacttgataatttcaacaattactacgatccgtcgttgaaacgtgctcgtagatctctgttgtcgtcgagagggatcttcgtcgttgaaggagatctaaacgacgcgaagctgttagcaaagcttttcgatgtggttgctttcactcacgtgatgcatctcgctgctcaagctggtgttagatacgctttggagaatcctcaatcgtatgttcatagcaacatcgccggacttgtgaatcttctcgagatttgcaaagcggcgaatcctcagccggcgatagtttgggcttcatcgagctccgtttatggactcaacgagaaagttccattctctgaatctgaccggacggatcaaccggcgagtctctacgccgcaacgaaaaaagccggcgaagaaatcacccacacttataaccatatttacggtcttgccattaccggtttaagattcttcacggtttacggaccatggggtagaccggatatggcttacttctccttcaccagaaacatcctacaaggtaaaccgatcacaatctaccggggcaaaaaccgggtcgatttagcccgggatttcacatacatcgacgatatagtgaaaggatgtttaggatctctggattcatcgggtaaaagtaccgggtcgggtggtaaaaaacgtggagcagcaccgtaccggatatttaacctgggaaacacatctccggttacagtaccgattctggtggatatattggagaagcatttaaaggtgaaagcgaagaggaacttcgtggagatgccaggaaacggcgacgtaccgttcacacatgccaatattagctcagcccgaaatgaattcgggtataaaccgacaaccgatttggaaaccgggttgaagaagttcgttagatggtatctttcttattacggatacaatactaaagccaagcttgtacattaaccgtgactattattattatttttaatgaaattatttttttctttctcccct

SEQ ID NO: 43032 - protein, 429 aa, Arabidopsis thaliana
  peptide (1)..(429): Ceres Seq. ID no. 12330712
MPSIEDELFPSTPGKFKIDRSNRQLHRCFASTSTMFLWALFLIALTASYLSFQSFVDSGSRYLTASWGGIQWEKQVRTSAQIHRSGGISVLVTGATGFVGSHVSLALRKRGDGVVGLDNFNNYYDPSLKRARRSLLSSRGIFVVEGDLNDAKLLAKLFDVVAFTHVMHLAAQAGVRYALENPQSYVHSNIAGLVNLLEICKAANPQPAIVWASSSSVYGLNEKVPFSESDRTDQPASLYAATKKAGEEITHTYNHIYGLAITGLRFFTVYGPWGRPDMAYFSFTRNILQGKPITIYRGKNRVDLARDFTYIDDIVKGCLGSLDSSGKSTGSGGKKRGAAPYRIFNLGNTSPVTVPILVDILEKHLKVKAKRNFVEMPGNGDVPFTHANISSARNEFGYKPTTDLETGLKKFVRWYLSYYGYNTKAKLVH

SEQ ID NO: 43033 - protein, 395 aa, Arabidopsis thaliana
  peptide (1)..(395): Ceres Seq. ID no. 12330713
MFLWALFLIALTASYLSFQSFVDSGSRYLTASWGGIQWEKQVRTSAQIHRSGGISVLVTGATGFVGSHVSLALRKRGDGVVGLDNFNNYYDPSLKRARRSLLSSRGIFVVEGDLNDAKLLAKLFDVVAFTHVMHLAAQAGVRYALENPQSYVHSNIAGLVNLLEICKAANPQPAIVWASSSSVYGLNEKVPFSESDRTDQPASLYAATKKAGEEITHTYNHIYGLAITGLRFFTVYGPWGRPDMAYFSFTRNILQGKPITIYRGKNRVDLARDFTYIDDIVKGCLGSLDSSGKSTGSGGKKRGAAPYRIFNLGNTSPVTVPILVDILEKHLKVKAKRNFVEMPGNGDVPFTHANISSARNEFGYKPTTDLETGLKKFVRWYLSYYGYNTKAKLVH

SEQ ID NO: 43034 - protein, 263 aa, Arabidopsis thaliana
  peptide (1)..(263): Ceres Seq. ID no. 12330714
MHLAAQAGVRYALENPQSYVHSNIAGLVNLLEICKAANPQPAIVWASSSSVYGLNEKVPFSESDRTDQPASLYAATKKAGEEITHTYNHIYGLAITGLRFFTVYGPWGRPDMAYFSFTRNILQGKPITIYRGKNRVDLARDFTYIDDIVKGCLGSLDSSGKSTGSGGKKRGAAPYRIFNLGNTSPVTVPILVDILEKHLKVKAKRNFVEMPGNGDVPFTHANISSARNEFGYKPTTDLETGLKKFVRWYLSYYGYNTKAKLVH

SEQ ID NO: 43035 - DNA, 1149 bp, Arabidopsis thaliana
  misc_feature (1)..(1149): Ceres Seq. ID no. 12324746
  misc_feature (1)..(1149): Ortholog of  Ceres SEQ ID NO 13596090 as cited in SEQ ID NO 68377
aacttttccttttcttcttcttcttctttatctttctcacttctcctttctccatcgttctatcattttctcctttccttcacctcaagatctcaaaaacacaaaaagagaaatcaatcaaaaccttagggttttctactaatttatctgtgtgatgttaagagaatcatcatcatcttcgtcgtcatgggaggagtaacttcatcaatcgctgcaaaattcgcttttttcccgccatcaccaccgtcttatggatttgtttccgacgttgaccgattatacataacagaagtacctcgccgtgatgatgtagatgtattgaagctaaagactcgtcgtggtaacgagattgtagctatttatattaaacatcctaaagctaatggtacgcttttgtattcacatggtaacgctgctgatttgggtcaaatgtttgagctttttatcgaacttagtaatcgtctccgacttaatctcatggggtatgattactctggttatggtcagtctactggaaaggcaagtgaatgtaatacctatgctgatatagatgcagcatatacttgcctcaaggaacattatggtgtaaaagatgatcaactgatattatatggtcagtctgttggtagtggaccaacgattgatttagcttcacgcacgcctaatttgcgaggagtggttttgcacagccctattctctctgggatgagagttttgtatccggttaaacgtacctattggtttgacatttacaaggggactgcagatgaagtggttgattgttctcatggaaaacaactttgggaactttcaaaagaaaagtatgagcctttatgggtatctggaggaggacactgcaatctagaactctatccagagttcataaaacatctgaagaaatacgtaatttctatttccaagggaccaagaactggttcgaacaagactgcaacgacggatgcagccaaaaaacagagcaagcctgcagagaacgggcgtgctgatacgtttcaacttggctgttgccttccagaagtttctagaaacagtgtagacagtcagctggagaaatctaagaagactagtaaacccgagaagtctcgtatgagcattgataggtttagaaggaaaaaaggttcagtctggtga

SEQ ID NO: 43036 - protein, 320 aa, Arabidopsis thaliana
  peptide (1)..(320): Ceres Seq. ID no. 12324747
MGGVTSSIAAKFAFFPPSPPSYGFVSDVDRLYITEVPRRDDVDVLKLKTRRGNEIVAIYIKHPKANGTLLYSHGNAADLGQMFELFIELSNRLRLNLMGYDYSGYGQSTGKASECNTYADIDAAYTCLKEHYGVKDDQLILYGQSVGSGPTIDLASRTPNLRGVVLHSPILSGMRVLYPVKRTYWFDIYKGTADEVVDCSHGKQLWELSKEKYEPLWVSGGGHCNLELYPEFIKHLKKYVISISKGPRTGSNKTATTDAAKKQSKPAENGRADTFQLGCCLPEVSRNSVDSQLEKSKKTSKPEKSRMSIDRFRRKKGSVW

SEQ ID NO: 43037 - protein, 239 aa, Arabidopsis thaliana
  peptide (1)..(239): Ceres Seq. ID no. 12324748
MFELFIELSNRLRLNLMGYDYSGYGQSTGKASECNTYADIDAAYTCLKEHYGVKDDQLILYGQSVGSGPTIDLASRTPNLRGVVLHSPILSGMRVLYPVKRTYWFDIYKGTADEVVDCSHGKQLWELSKEKYEPLWVSGGGHCNLELYPEFIKHLKKYVISISKGPRTGSNKTATTDAAKKQSKPAENGRADTFQLGCCLPEVSRNSVDSQLEKSKKTSKPEKSRMSIDRFRRKKGSVW

SEQ ID NO: 43038 - protein, 223 aa, Arabidopsis thaliana
  peptide (1)..(223): Ceres Seq. ID no. 12324749
MGYDYSGYGQSTGKASECNTYADIDAAYTCLKEHYGVKDDQLILYGQSVGSGPTIDLASRTPNLRGVVLHSPILSGMRVLYPVKRTYWFDIYKGTADEVVDCSHGKQLWELSKEKYEPLWVSGGGHCNLELYPEFIKHLKKYVISISKGPRTGSNKTATTDAAKKQSKPAENGRADTFQLGCCLPEVSRNSVDSQLEKSKKTSKPEKSRMSIDRFRRKKGSVW

SEQ ID NO: 43039 - DNA, 1192 bp, Arabidopsis thaliana
  misc_feature (1)..(1192): Ceres Seq. ID no. 14302709
  misc_feature (1)..(1192): Ortholog of  Ceres SEQ ID NO 14305750 as cited in SEQ ID NO 52458
  misc_feature (1)..(1192): Ortholog of  Ceres SEQ ID NO 14314252 as cited in SEQ ID NO 57492
  misc_feature (1)..(1192): Ortholog of  Ceres SEQ ID NO 12608276 as cited in SEQ ID NO 57871
  misc_feature (1)..(1192): Ortholog of  Ceres SEQ ID NO 13598492 as cited in SEQ ID NO 63882
  misc_feature (1)..(1192): Ortholog of  Ceres SEQ ID NO 13657914 as cited in SEQ ID NO 66230
  misc_feature (1)..(1192): Ortholog of  Ceres SEQ ID NO 13595877 as cited in SEQ ID NO 67702
actcatctctaacgtttctttctatctctaatccaagcaacaatatggattccgtaatcgctttcgacagatctccgatgtttcgagtctacaagagtggccgcattgagcgtctcttaggagaaacaaccgtcccaccatctcttacaccacaaaacggtgtcgtctccaaagatatcatccattcaccggagaaaaacctctccctccgcatctacctaccggagaaagtcactgttaaaaagctcccaatcctcatctacttccacggtggtggtttcatcatagaaacagctttttctccaccctaccacactttcctcacatccaccgtcgcggccgctaactgcttagcaatatcagtaaactatcgccgtgcaccggagtttccggtacctattccgtacgaagattcatgggattcactcaaatgggtgttaactcatatcacaggaaccggaccggaaacttggataaacaaacacggcgatttcggaaaagtgtttctcgccggagatagcgccggtggaaacatatctcatcatctaacgatgcgagcgaaaaaagagaagctttgtgattctttaatatcagggataatcttgattcatccatatttttggagtaagactccaattgatgagtttgaggttagagacgtggggaagacgaaaggtgttgaaggaagttggagagtcgcaagtccgaatagtaaacaaggagttgatgatccatggctcaacgttgtcggatcggatccatccggattaggttgcgggcgggttttggtaatggtagctggagatgatctgtttgtgagacaaggttggtgttacgcggagaagctgaagaagagtggatgggaaggtgaagttgaggtaatggaggctaaaaatgaaggtcatgtttttcatttgaagaatcctaatagtgataatgctcgtcaagtcgtgaagaaacttgaagagtttattaataagtaatattaatgagtacgtttgtcgaaggagataacaataactaaagaataaattggtgtatttgtcactgattacatatagaattatgctatcacatttagggttaaagccaagaggagtcagttaaagtttcagttacttttctttcaagtaactgatagaaagacgattaattgtattagtttgtggtaaataaatggtttggtttgaat

SEQ ID NO: 43040 - protein, 326 aa, Arabidopsis thaliana
  peptide (1)..(326): Ceres Seq. ID no. 14302710
SSLTFLSISNPSNNMDSVIAFDRSPMFRVYKSGRIERLLGETTVPPSLTPQNGVVSKDIIHSPEKNLSLRIYLPEKVTVKKLPILIYFHGGGFIIETAFSPPYHTFLTSTVAAANCLAISVNYRRAPEFPVPIPYEDSWDSLKWVLTHITGTGPETWINKHGDFGKVFLAGDSAGGNISHHLTMRAKKEKLCDSLISGIILIHPYFWSKTPIDEFEVRDVGKTKGVEGSWRVASPNSKQGVDDPWLNVVGSDPSGLGCGRVLVMVAGDDLFVRQGWCYAEKLKKSGWEGEVEVMEAKNEGHVFHLKNPNSDNARQVVKKLEEFINK

SEQ ID NO: 43041 - protein, 312 aa, Arabidopsis thaliana
  peptide (1)..(312): Ceres Seq. ID no. 14302711
MDSVIAFDRSPMFRVYKSGRIERLLGETTVPPSLTPQNGVVSKDIIHSPEKNLSLRIYLPEKVTVKKLPILIYFHGGGFIIETAFSPPYHTFLTSTVAAANCLAISVNYRRAPEFPVPIPYEDSWDSLKWVLTHITGTGPETWINKHGDFGKVFLAGDSAGGNISHHLTMRAKKEKLCDSLISGIILIHPYFWSKTPIDEFEVRDVGKTKGVEGSWRVASPNSKQGVDDPWLNVVGSDPSGLGCGRVLVMVAGDDLFVRQGWCYAEKLKKSGWEGEVEVMEAKNEGHVFHLKNPNSDNARQVVKKLEEFINK

SEQ ID NO: 43042 - protein, 301 aa, Arabidopsis thaliana
  peptide (1)..(301): Ceres Seq. ID no. 14302712
MFRVYKSGRIERLLGETTVPPSLTPQNGVVSKDIIHSPEKNLSLRIYLPEKVTVKKLPILIYFHGGGFIIETAFSPPYHTFLTSTVAAANCLAISVNYRRAPEFPVPIPYEDSWDSLKWVLTHITGTGPETWINKHGDFGKVFLAGDSAGGNISHHLTMRAKKEKLCDSLISGIILIHPYFWSKTPIDEFEVRDVGKTKGVEGSWRVASPNSKQGVDDPWLNVVGSDPSGLGCGRVLVMVAGDDLFVRQGWCYAEKLKKSGWEGEVEVMEAKNEGHVFHLKNPNSDNARQVVKKLEEFINK

SEQ ID NO: 43043 - DNA, 1307 bp, Arabidopsis thaliana
  misc_feature (1)..(1307): Ceres Seq. ID no. 13647064
  misc_feature (1)..(1307): Ortholog of  Ceres SEQ ID NO 14302817 as cited in SEQ ID NO 58209
tggtgagaaactcgatggcgaggaggcgacgttcatcggcggcggagagtttgaaacggcggaacgacggatacgagtcactgtgtcaagtcgtacaacaagattcagatcggagactcatcaccattttcgtaatcttcttcattgtgattcccgccgtttcgattgctgtgtacaaagtcaaattcgctgatcgagtcatccaaacggaatcatcaatacgtcaaaagggaatcgttaaaactgatattaatttccaagaaatcctcactgaacattccaaggcttcagagaattcaactaggcactatgattatccagtgttagcttacattactccatggaactctaaaggctatgatatggcaaagatattcaactcaaagtttacacatttatcgccggtatggtacgacctgaagagccaagggtctggattggttttggaagggagacataatgctgataagggatggattcaagagcttcggtcaagaggcaatgcactgatattaccaagagttgttctagaagcaattcctggggagatgcttaacaaaaaaaaactaagagagaaagctatcagtcttattgtcacagagtgcaaggaaatggaatacaatggtatcgtgttagagtcttggtcaaggtgggcagcttatggcgttttgcatgaccctgatttgcggaaaatggcactgaaattcgtaaaacaacttggagacgctcttcactcaacgagctcaccaagaaacaaccagcaacatatgcagttcatgtatgtcgttggtccgcctcgttcagagaagctccaaatgtacgattttgggccagaagatcttcaattcttgaaagattcggttgatgggttctctcttatgacctatgatttctcaaatccccagaaccctggccccaatgctcctgtcaagtggatagatttaactctcaagctcctgcttgggtcatccaacaacatagactcaaacatagccaggaaggttcttcttggtatcaacttttacggcaacgattttgtaatctctggagattcaggaggtggaggagcaatcaccggaagggattacctcgcattactccagaaacacaagccaactttccgttgggataaagagagcggcgaacatcttttcatgtatagagatgataagaacatcaagcatgctgttttctatcctacattgatgtcaatccttctacggcttgagaatgctcgtctctggggaatcggcatttcaatctgggaaatcggacaaggtttagattatttctttgatctattgtaa

SEQ ID NO: 43044 - protein, 434 aa, Arabidopsis thaliana
  peptide (1)..(434): Ceres Seq. ID no. 13647065
VRNSMARRRRSSAAESLKRRNDGYESLCQVVQQDSDRRLITIFVIFFIVIPAVSIAVYKVKFADRVIQTESSIRQKGIVKTDINFQEILTEHSKASENSTRHYDYPVLAYITPWNSKGYDMAKIFNSKFTHLSPVWYDLKSQGSGLVLEGRHNADKGWIQELRSRGNALILPRVVLEAIPGEMLNKKKLREKAISLIVTECKEMEYNGIVLESWSRWAAYGVLHDPDLRKMALKFVKQLGDALHSTSSPRNNQQHMQFMYVVGPPRSEKLQMYDFGPEDLQFLKDSVDGFSLMTYDFSNPQNPGPNAPVKWIDLTLKLLLGSSNNIDSNIARKVLLGINFYGNDFVISGDSGGGGAITGRDYLALLQKHKPTFRWDKESGEHLFMYRDDKNIKHAVFYPTLMSILLRLENARLWGIGISIWEIGQGLDYFFDLL

SEQ ID NO: 43045 - protein, 430 aa, Arabidopsis thaliana
  peptide (1)..(430): Ceres Seq. ID no. 13647066
MARRRRSSAAESLKRRNDGYESLCQVVQQDSDRRLITIFVIFFIVIPAVSIAVYKVKFADRVIQTESSIRQKGIVKTDINFQEILTEHSKASENSTRHYDYPVLAYITPWNSKGYDMAKIFNSKFTHLSPVWYDLKSQGSGLVLEGRHNADKGWIQELRSRGNALILPRVVLEAIPGEMLNKKKLREKAISLIVTECKEMEYNGIVLESWSRWAAYGVLHDPDLRKMALKFVKQLGDALHSTSSPRNNQQHMQFMYVVGPPRSEKLQMYDFGPEDLQFLKDSVDGFSLMTYDFSNPQNPGPNAPVKWIDLTLKLLLGSSNNIDSNIARKVLLGINFYGNDFVISGDSGGGGAITGRDYLALLQKHKPTFRWDKESGEHLFMYRDDKNIKHAVFYPTLMSILLRLENARLWGIGISIWEIGQGLDYFFDLL

SEQ ID NO: 43046 - protein, 314 aa, Arabidopsis thaliana
  peptide (1)..(314): Ceres Seq. ID no. 13647067
MAKIFNSKFTHLSPVWYDLKSQGSGLVLEGRHNADKGWIQELRSRGNALILPRVVLEAIPGEMLNKKKLREKAISLIVTECKEMEYNGIVLESWSRWAAYGVLHDPDLRKMALKFVKQLGDALHSTSSPRNNQQHMQFMYVVGPPRSEKLQMYDFGPEDLQFLKDSVDGFSLMTYDFSNPQNPGPNAPVKWIDLTLKLLLGSSNNIDSNIARKVLLGINFYGNDFVISGDSGGGGAITGRDYLALLQKHKPTFRWDKESGEHLFMYRDDKNIKHAVFYPTLMSILLRLENARLWGIGISIWEIGQGLDYFFDLL

SEQ ID NO: 43047 - DNA, 1141 bp, Arabidopsis thaliana
  misc_feature (1)..(1141): Ceres Seq. ID no. 12395056
  misc_feature (1)..(1141): Ortholog of  Ceres SEQ ID NO 13594727 as cited in SEQ ID NO 52169
  misc_feature (1)..(1141): Ortholog of  Ceres SEQ ID NO 13596474 as cited in SEQ ID NO 62169
  misc_feature (1)..(1141): Ortholog of  Ceres SEQ ID NO 13598714 as cited in SEQ ID NO 62656
  misc_feature (1)..(1141): Ortholog of  Ceres SEQ ID NO 13596969 as cited in SEQ ID NO 63375
  misc_feature (1)..(1141): Ortholog of  Ceres SEQ ID NO 13597519 as cited in SEQ ID NO 64759
  misc_feature (1)..(1141): Ortholog of  Ceres SEQ ID NO 13597870 as cited in SEQ ID NO 64982
  misc_feature (1)..(1141): Ortholog of  Ceres SEQ ID NO 13595926 as cited in SEQ ID NO 67778
  misc_feature (1)..(1141): Ortholog of  Ceres SEQ ID NO 12567001 as cited in SEQ ID NO 0
aagtcatcttctctctctttttttagtgtgtgcaaagtcatcttctcttttaatatttacctaaaattccaaacaaaagagaacgttatgaaaccaaagagcaaagttgcagaatctacagctgcatcatgttttctcgtcatgagcttgttatgcagctgcattattggtgaccaaatggagactaataatgaaggcttgtcttacagttactacgagaaaacttgtcccaaagtcgaagagatagtgagatcttcactttcatcaatgtttatacttgatcctacttctcctgcagccttgctaaggcttatgtttcatgactgccaagttcagggatgtgacgcatctatcctactcgagccaattagagaccaacagttcaccgagcttgattcagccaagaacttcggaatcagaaagagggacctggttggctctatcaaaacctcactagagcttgagtgtcccaagcaagtctcatgctctgacgtcatcatcctcgccgccagagacgccgtggctctcacgggaggcccactcatctccgtgccattaggacgaaaagactccctctccactccaagcaaacacgtggcagactctgagcttcctccctccactgctgacgttgacactaccttaagcctattcgctaacaaaggcatgaccatcgaagagtccgtggccatcatgggtgcacatacgataggagtcacacattgcaacaacgtattatcgcgtttcgataacgcaaacgcgacaagcgagaacatggatccacgttttcaaacgttcttgcgtgttgcttgtccagagttttctccaacttctcaagctgccgaagccacatttgtccccaacgatcaaacttcggtgatcttcgatacagcttattacgatgatgccatcgcgggacgtggcaatcttaggattgactcggagattggagctgatccacgtacacgtccatttgtggaagcgtttgcagctgatcaagaccgtttcttcaacgccttctcttccgcgtttgtaaaattgtcgtcttacaaagtgttaaccgggaatgaaggagtaattagaagcgtgtgtgacaaggttgattgatgtatatttataattatcaaatgttaaaaatatt

SEQ ID NO: 43048 - protein, 368 aa, Arabidopsis thaliana
  peptide (1)..(368): Ceres Seq. ID no. 12395057
KSSSLSFFSVCKVIFSFNIYLKFQTKENVMKPKSKVAESTAASCFLVMSLLCSCIIGDQMETNNEGLSYSYYEKTCPKVEEIVRSSLSSMFILDPTSPAALLRLMFHDCQVQGCDASILLEPIRDQQFTELDSAKNFGIRKRDLVGSIKTSLELECPKQVSCSDVIILAARDAVALTGGPLISVPLGRKDSLSTPSKHVADSELPPSTADVDTTLSLFANKGMTIEESVAIMGAHTIGVTHCNNVLSRFDNANATSENMDPRFQTFLRVACPEFSPTSQAAEATFVPNDQTSVIFDTAYYDDAIAGRGNLRIDSEIGADPRTRPFVEAFAADQDRFFNAFSSAFVKLSSYKVLTGNEGVIRSVCDKVD

SEQ ID NO: 43049 - protein, 339 aa, Arabidopsis thaliana
  peptide (1)..(339): Ceres Seq. ID no. 12395058
MKPKSKVAESTAASCFLVMSLLCSCIIGDQMETNNEGLSYSYYEKTCPKVEEIVRSSLSSMFILDPTSPAALLRLMFHDCQVQGCDASILLEPIRDQQFTELDSAKNFGIRKRDLVGSIKTSLELECPKQVSCSDVIILAARDAVALTGGPLISVPLGRKDSLSTPSKHVADSELPPSTADVDTTLSLFANKGMTIEESVAIMGAHTIGVTHCNNVLSRFDNANATSENMDPRFQTFLRVACPEFSPTSQAAEATFVPNDQTSVIFDTAYYDDAIAGRGNLRIDSEIGADPRTRPFVEAFAADQDRFFNAFSSAFVKLSSYKVLTGNEGVIRSVCDKVD

SEQ ID NO: 43050 - protein, 321 aa, Arabidopsis thaliana
  peptide (1)..(321): Ceres Seq. ID no. 12395059
MSLLCSCIIGDQMETNNEGLSYSYYEKTCPKVEEIVRSSLSSMFILDPTSPAALLRLMFHDCQVQGCDASILLEPIRDQQFTELDSAKNFGIRKRDLVGSIKTSLELECPKQVSCSDVIILAARDAVALTGGPLISVPLGRKDSLSTPSKHVADSELPPSTADVDTTLSLFANKGMTIEESVAIMGAHTIGVTHCNNVLSRFDNANATSENMDPRFQTFLRVACPEFSPTSQAAEATFVPNDQTSVIFDTAYYDDAIAGRGNLRIDSEIGADPRTRPFVEAFAADQDRFFNAFSSAFVKLSSYKVLTGNEGVIRSVCDKVD

SEQ ID NO: 43051 - DNA, 1111 bp, Arabidopsis thaliana
  misc_feature (1)..(1111): Ceres Seq. ID no. 12370933
  misc_feature (1)..(1111): Ortholog of  Ceres SEQ ID NO 13598735 as cited in SEQ ID NO 64586
gcttagaattattgattgcattgcaagaaacaagactaatgatgacccaaaaaccacgaactgtgatctgcgtcggagacatccatggaaacatatcaaagctcaataaactctggcttaatcttcaatccgatatccaaaactcagatttcagctcagctctcgtcatcttcctcggcgactactgcgatcgtggaccggagactcgaaaagtcatcgacttcttgatctctttgccggagaaacatcccgatcagacccatgtctttcttgccggaaaccacgactttgcttttgctggcttcttgggtttgttacctcgcccttcagatgggtctgagtttaaggaaacgtggaaagagtactcaaaaagtgaggaaagagaaggatggtataaaggtgaagggtttgagaatatgcatctccaaagcaggagatgggcgggaaagattagggttcagttcgattattccgcatatggagtgttgtataatggatcaatatacgatgcggcgtctacttttgaatcttatggcgttcctcatggatcttctgatttgataaaggcagtacctgagagtcacaagaaattcttgaccaatatggtttgggtacataaagaggatgatgtttgtatagaaacagaggaaggccttacgcattgtaagttgattgccgtacatgctggtctagagacaaagaataacgtagaagaacagcttaaactattgagagataaagacacaagcatcccaagaatacaacctctaactggtcggaaaaccgtttgggggatcccacaggaactggatgataaaaagactattgttgttagcggccaccatgggaaacttcacatcgatggcttgagattgatcatcgatgaaggtggtggatatactgatacacctttggctgcaattgttcttccttctaagaagattatccgcgacaccgataatttttccaattaagtatatcatgtcttcatattaaaattgaaacttctagtagtttttgtgattgttctgttgttactttttaattagtgtttcggtcttttccgctacttgtataacttgataatttttttccaaaattagaaaatggt

SEQ ID NO: 43052 - protein, 323 aa, Arabidopsis thaliana
  peptide (1)..(323): Ceres Seq. ID no. 12370934
LELLIALQETRLMMTQKPRTVICVGDIHGNISKLNKLWLNLQSDIQNSDFSSALVIFLGDYCDRGPETRKVIDFLISLPEKHPDQTHVFLAGNHDFAFAGFLGLLPRPSDGSEFKETWKEYSKSEEREGWYKGEGFENMHLQSRRWAGKIRVQFDYSAYGVLYNGSIYDAASTFESYGVPHGSSDLIKAVPESHKKFLTNMVWVHKEDDVCIETEEGLTHCKLIAVHAGLETKNNVEEQLKLLRDKDTSIPRIQPLTGRKTVWGIPQELDDKKTIVVSGHHGKLHIDGLRLIIDEGGGYTDTPLAAIVLPSKKIIRDTDNFSN

SEQ ID NO: 43053 - protein, 311 aa, Arabidopsis thaliana
  peptide (1)..(311): Ceres Seq. ID no. 12370935
MMTQKPRTVICVGDIHGNISKLNKLWLNLQSDIQNSDFSSALVIFLGDYCDRGPETRKVIDFLISLPEKHPDQTHVFLAGNHDFAFAGFLGLLPRPSDGSEFKETWKEYSKSEEREGWYKGEGFENMHLQSRRWAGKIRVQFDYSAYGVLYNGSIYDAASTFESYGVPHGSSDLIKAVPESHKKFLTNMVWVHKEDDVCIETEEGLTHCKLIAVHAGLETKNNVEEQLKLLRDKDTSIPRIQPLTGRKTVWGIPQELDDKKTIVVSGHHGKLHIDGLRLIIDEGGGYTDTPLAAIVLPSKKIIRDTDNFSN

SEQ ID NO: 43054 - protein, 310 aa, Arabidopsis thaliana
  peptide (1)..(310): Ceres Seq. ID no. 12370936
MTQKPRTVICVGDIHGNISKLNKLWLNLQSDIQNSDFSSALVIFLGDYCDRGPETRKVIDFLISLPEKHPDQTHVFLAGNHDFAFAGFLGLLPRPSDGSEFKETWKEYSKSEEREGWYKGEGFENMHLQSRRWAGKIRVQFDYSAYGVLYNGSIYDAASTFESYGVPHGSSDLIKAVPESHKKFLTNMVWVHKEDDVCIETEEGLTHCKLIAVHAGLETKNNVEEQLKLLRDKDTSIPRIQPLTGRKTVWGIPQELDDKKTIVVSGHHGKLHIDGLRLIIDEGGGYTDTPLAAIVLPSKKIIRDTDNFSN

SEQ ID NO: 43055 - DNA, 1408 bp, Arabidopsis thaliana
  misc_feature (1)..(1408): Ceres Seq. ID no. 13646047
  misc_feature (1)..(1408): Ortholog of  Ceres SEQ ID NO 14316382 as cited in SEQ ID NO 57756
attgatctttgtcgcagtatttattaagattttatctctatcagacggctcttttgattaatatttttccgactcttatttcttatcttctttgctcagaaacttctctcaggcgaattcaagtttcatagttttggtctagtttttgtccaccgatctatctctttagttgaaacttatcagaatggctcgtccacaagaccctccacgtggtttcttcccttttggaaaccccttcaaaaatctatcttcgaagaactcggtactctcctcaaagcttctcccactcctgaacaattttgagaccaacttagcatcttctattagtaagcttgtccctaaggaaaagagcgatatcctgactgtctcatggatgaaacaagctatggaatctctttgcgagacacataatggtatcaagacccttataaccgatcttgagcttcctgtatcagattgggaggataaatgggttgatgtctatcttgacattagtgtgaagcttcttgatctctgcaatgcctttagctctgagcttacccgtctcaaccaaggtcatctcttactccagtttgctctgcataacttggaggccaactctcctcagaatctgtcgaaagctcagtcatcactagacagttggaagcaacacattgtctccaagaacccgagaatagaaaattgccgtgcaatcttgagcagccttgttcagaccttgaatctccccaaggtgaaaaactcggccaaagggaaagtcttgatgagagctctatatggtgtaaaggttaagaccttatacatctctggtgtttttgctgcagcgttctcaggttcatcgcagaatctgatgtaccttacagtctcaaacgagcttccatgggcacaatcattcatggaagtgcagaacaccatgaacgcagaaatcaagaacatatttttgtcagacgggttaacggttctgaaagagctagaggcagttgcttcaggtgtcaagaaactctaccctgcgatccaacaaggatcaatagatcccatatcgctgcagccactgaaggactcggtcacagaattatcgaatgggatagatcttgtttcgaaagaagtggattgtttcttcaagattctgttatcggggagagacacattactagagaacctaaggtcgatgggtgcatcaaccctacaggcaacatcgccaaaaaaggctgccggaaaaaattacagaggattctgataaactataaatgtttgtacagatggttttacttcaagtgttccatcttcttggtattgaatgtattattaggtttttgtgcaatcgtagtcgtttgtatgagatgctttgaaagtagtagttgtataagtaaaggttttaccaacttatctatatatattatgaatatctttg

SEQ ID NO: 43056 - protein, 349 aa, Arabidopsis thaliana; identical to SEQ ID NO: 23433
  peptide (1)..(349): Ceres Seq. ID no. 13646048

SEQ ID NO: 43057 - protein, 286 aa, Arabidopsis thaliana; identical to SEQ ID NO: 23434
  peptide (1)..(286): Ceres Seq. ID no. 13646049

SEQ ID NO: 43058 - protein, 282 aa, Arabidopsis thaliana; identical to SEQ ID NO: 23435
  peptide (1)..(282): Ceres Seq. ID no. 13646050

SEQ ID NO: 43059 - DNA, 1556 bp, Arabidopsis thaliana
  misc_feature (1)..(1556): Ceres Seq. ID no. 13592131
  misc_feature (1)..(1556): Ortholog of  Ceres SEQ ID NO 14314280 as cited in SEQ ID NO 57429
  misc_feature (1)..(1556): Ortholog of  Ceres SEQ ID NO 13595870 as cited in SEQ ID NO 62101
  misc_feature (1)..(1556): Ortholog of  Ceres SEQ ID NO 13590241 as cited in SEQ ID NO 63878
  misc_feature (1)..(1556): Ortholog of  Ceres SEQ ID NO 13657939 as cited in SEQ ID NO 66349
aatttaggtgatatcatataatgcttcgcgtgagggtttctgagattctgatcgacgaaaactaatctctctcctttttcttctcatctccttactagagatctctgtcttcgataatttgtttcaatcactgagaaaatggcggccgtaggagtagattcgaggcgtcctgagacagcgatggaggaaacctgtaacgtgaaaggagcggcggcgaaacaaggggaagggcttaagcagtactatctccagcacatccatgagctccagcgccagcttcgacagaagactaataacctcaatcgccttgaagctcaaaggaatgaactcaattctcgagtgagaatgctcagagaagagttacagctccttcaagaacctgggtcctatgtgggagaagtggtaaaagttatgggaaagaacaaggtcttggttaaggttcatccagaggggaagtatgttgttgatattgacaaaagtatagacattacgaaaatcactccatcaacgagagttgctcttcgtaatgatagctatgttctccacctggttctgccaagtaaagtagatcccttggttaaccttatgaaagttgagaaggttccagactccacctatgacatgattggtggtcttgaccagcagattaaggaaataaaggaggtcattgagctgccaatcaagcatcctgaattgtttgagtctcttggaattgcgcagccaaagggtgtgttgttatacggtccacctggaactgggaagacactattggctcgggctgttgcacatcacactgactgtactttcataagagtttctggttccgagcttgtccagaaatacattggagaaggttctagaatggtcagagaactttttgtgatggcaagggagcatgcaccatcaatcatcttcatggatgaaatcgatagtattgggtctgctcgtatggaatctggaagtggaaatggtgacagtgaggtgcaacggaccatgctcgagcttctcaatcaacttgacggttttgaagcgtcaaacaaaatcaaggttttgatggctacaaatcgtattgatattctggatcaagctcttctcaggcctggaagaattgataggaaaattgaatttcctaatcctaatgaagagtcacgttttgacatcttgaagattcactcgaggaaaatgaatttgatgcgtggaatcgatctgaaaaagattgcagagaagatgaatggcgcttcaggtgctgagctgaaggctgtgtgcacggaggcgggaatgtttgctctgcgtgagaggagagtacacgtgacacaagaagactttgagatggcggtggccaaggtaatgaagaaagacacggagaagaacatgtctctgcgtaagctgtggaagtaggaatctctcatggaaagactttctttactttactgtttgttgtttgattctgaaaccttttttcggttgtctcatgaaaacattttagaacaaagtttttactatctagacacgagtttatctagtatgcgatttgaggtcaatggaaggaaattccc

SEQ ID NO: 43060 - protein, 419 aa, Arabidopsis thaliana
  peptide (1)..(419): Ceres Seq. ID no. 13592132
MAAVGVDSRRPETAMEETCNVKGAAAKQGEGLKQYYLQHIHELQRQLRQKTNNLNRLEAQRNELNSRVRMLREELQLLQEPGSYVGEVVKVMGKNKVLVKVHPEGKYVVDIDKSIDITKITPSTRVALRNDSYVLHLVLPSKVDPLVNLMKVEKVPDSTYDMIGGLDQQIKEIKEVIELPIKHPELFESLGIAQPKGVLLYGPPGTGKTLLARAVAHHTDCTFIRVSGSELVQKYIGEGSRMVRELFVMAREHAPSIIFMDEIDSIGSARMESGSGNGDSEVQRTMLELLNQLDGFEASNKIKVLMATNRIDILDQALLRPGRIDRKIEFPNPNEESRFDILKIHSRKMNLMRGIDLKKIAEKMNGASGAELKAVCTEAGMFALRERRVHVTQEDFEMAVAKVMKKDTEKNMSLRKLWK

SEQ ID NO: 43061 - protein, 405 aa, Arabidopsis thaliana
  peptide (1)..(405): Ceres Seq. ID no. 13592133
MEETCNVKGAAAKQGEGLKQYYLQHIHELQRQLRQKTNNLNRLEAQRNELNSRVRMLREELQLLQEPGSYVGEVVKVMGKNKVLVKVHPEGKYVVDIDKSIDITKITPSTRVALRNDSYVLHLVLPSKVDPLVNLMKVEKVPDSTYDMIGGLDQQIKEIKEVIELPIKHPELFESLGIAQPKGVLLYGPPGTGKTLLARAVAHHTDCTFIRVSGSELVQKYIGEGSRMVRELFVMAREHAPSIIFMDEIDSIGSARMESGSGNGDSEVQRTMLELLNQLDGFEASNKIKVLMATNRIDILDQALLRPGRIDRKIEFPNPNEESRFDILKIHSRKMNLMRGIDLKKIAEKMNGASGAELKAVCTEAGMFALRERRVHVTQEDFEMAVAKVMKKDTEKNMSLRKLWK

SEQ ID NO: 43062 - protein, 350 aa, Arabidopsis thaliana
  peptide (1)..(350): Ceres Seq. ID no. 13592134
MLREELQLLQEPGSYVGEVVKVMGKNKVLVKVHPEGKYVVDIDKSIDITKITPSTRVALRNDSYVLHLVLPSKVDPLVNLMKVEKVPDSTYDMIGGLDQQIKEIKEVIELPIKHPELFESLGIAQPKGVLLYGPPGTGKTLLARAVAHHTDCTFIRVSGSELVQKYIGEGSRMVRELFVMAREHAPSIIFMDEIDSIGSARMESGSGNGDSEVQRTMLELLNQLDGFEASNKIKVLMATNRIDILDQALLRPGRIDRKIEFPNPNEESRFDILKIHSRKMNLMRGIDLKKIAEKMNGASGAELKAVCTEAGMFALRERRVHVTQEDFEMAVAKVMKKDTEKNMSLRKLWK

SEQ ID NO: 43063 - DNA, 1399 bp, Arabidopsis thaliana
  misc_feature (1)..(1399): Ceres Seq. ID no. 13490972
  misc_feature (1)..(1399): Ortholog of  Ceres SEQ ID NO 13659033 as cited in SEQ ID NO 66372
  misc_feature (1)..(1399): Ortholog of  Ceres SEQ ID NO 12625899 as cited in SEQ ID NO 69079
agcttccttttttgttttccacgaaaaagcaaaagaatgggttctcttcttcctcttcttggcatctcagtagtctccgccattttctttctgttgcttcaacaaccagaacaatcttcttcagccattatactgagcttgaagaaacgccatggaagctcctctggtagtagtggtaaccagtacagttcaagcagaccatcagctggtttccaagggaacaggagcacgtgctctctcttcctcggcacgtgggttcgtgataactcttatcctctctataaaccggcggattgtcccggcgtcgttgagcctgagttcgattgtcagatgtacggtcgtcctgactctgactacctcaagtatcgatggcaacctcagaattgcaatttgcccacgttcaatggtgctcagtttctgttgaaaatgaagggcaaaaccataatgtttgcgggtgattcattggggaagaatcaatgggagtctttgatctgccttattgtttcatctgcaccgtccactcggacagaaatgaccagaggcttgcctctctccaccttcagattcttggattatgggataacaatgtcattttacaaagctccgttcttggtggacatagatgctgttcaaggcaagcgtgtgttgaagctggatgagatctctggtaatgccaatgcttggcatgacgctgatctcctcatcttcaacactggtcactggtggagccacaccggatctatgcaaggatgggacttgattcaatcaggcaattcttattaccaagacatggaccgttttgtggcaatggagaaagcacttycgtacttgggcgtatttgggtcgaaactcacgttgatagatcccgaacacaagtcctcttcctctccatttctccaacacacgacaacccgagtgactgggcggcatcatcgtcttcaggatccaagaactgctacggagaaacagaaccgatcacaggaacagcttatccagtgagctcctacacagatcagctaagatcagtgatcgttgaagtgcttcacgggatgcacaaaccggcttttcttctcgacataacgctcctctcttcactcagaaaagacggtcacccgtcagtatacagcggtctcattagcggttcacaaaggtctagaccagaccagtctgcagattgtagccattggtgtttgcctggtctacctgatacatggaaccagttgttgtatacgcttctcatctattagcttctttttaattctcttccatcaaatttattcggttagtaatattttaacacattcgaagagagaatcttaagattaatcacggaatcagtcaattgtataaactttttggggaaattttctttttaatgattataatttttattccatgc

SEQ ID NO: 43064 - protein, 332 aa, Arabidopsis thaliana
  peptide (1)..(332): Ceres Seq. ID no. 15222863
  misc_feature (275)..(275): Xaa is any aa, unknown or other
SFLFCFPRKSKRMGSLLPLLGISVVSAIFFLLLQQPEQSSSAIILSLKKRHGSSSGSSGNQYSSSRPSAGFQGNRSTCSLFLGTWVRDNSYPLYKPADCPGVVEPEFDCQMYGRPDSDYLKYRWQPQNCNLPTFNGAQFLLKMKGKTIMFAGDSLGKNQWESLICLIVSSAPSTRTEMTRGLPLSTFRFLDYGITMSFYKAPFLVDIDAVQGKRVLKLDEISGNANAWHDADLLIFNTGHWWSHTGSMQGWDLIQSGNSYYQDMDRFVAMEKALXYLGVFGSKLTLIDPEHKSSSSPFLQHTTTRVTGRHHRLQDPRTATEKQNRSQEQLIQ

SEQ ID NO: 43065 - protein, 320 aa, Arabidopsis thaliana
  peptide (1)..(320): Ceres Seq. ID no. 15222864
  misc_feature (263)..(263): Xaa is any aa, unknown or other
MGSLLPLLGISVVSAIFFLLLQQPEQSSSAIILSLKKRHGSSSGSSGNQYSSSRPSAGFQGNRSTCSLFLGTWVRDNSYPLYKPADCPGVVEPEFDCQMYGRPDSDYLKYRWQPQNCNLPTFNGAQFLLKMKGKTIMFAGDSLGKNQWESLICLIVSSAPSTRTEMTRGLPLSTFRFLDYGITMSFYKAPFLVDIDAVQGKRVLKLDEISGNANAWHDADLLIFNTGHWWSHTGSMQGWDLIQSGNSYYQDMDRFVAMEKALXYLGVFGSKLTLIDPEHKSSSSPFLQHTTTRVTGRHHRLQDPRTATEKQNRSQEQLIQ

SEQ ID NO: 43066 - protein, 222 aa, Arabidopsis thaliana
  peptide (1)..(222): Ceres Seq. ID no. 15222865
  misc_feature (165)..(165): Xaa is any aa, unknown or other
MYGRPDSDYLKYRWQPQNCNLPTFNGAQFLLKMKGKTIMFAGDSLGKNQWESLICLIVSSAPSTRTEMTRGLPLSTFRFLDYGITMSFYKAPFLVDIDAVQGKRVLKLDEISGNANAWHDADLLIFNTGHWWSHTGSMQGWDLIQSGNSYYQDMDRFVAMEKALXYLGVFGSKLTLIDPEHKSSSSPFLQHTTTRVTGRHHRLQDPRTATEKQNRSQEQLIQ

SEQ ID NO: 43067 - DNA, 657 bp, Arabidopsis thaliana
  misc_feature (1)..(657): Ceres Seq. ID no. 12422265
  misc_feature (1)..(657): Ortholog of  Ceres SEQ ID NO 12584812 as cited in SEQ ID NO 62672
gaaccctaaaaaccccaggtgagaagaacggagagagagagagagatgtcgttcatgtatgagaagagcaatacatggagatggctagtgatgaagacgcgagattcgagatccttcttcttcacgttcgctgctttatgtggtgtcattcctggcgttattggctatggagttatgcaggtcaccaattccagtaaccctgagctcgaagcccgcctccgtaaatctgctcgcccagatactctcatgatgggtaaagtaaaccaagagaggctagctgaatatcttggtgagttgaaacagaagcaggatacaaacgacagatacgttgctgctcttaggggagagactcttaccaggaagccttatcaaagaatccaaccaatgccaaagccagatgacacggtgacaaccaaaactcagtaaggatgaattattttaagagtcaatgttagtgaatgcctctcactcgaatcttttgtcgatacaaaaatggcgtgtttcctggccgtaatatcttttgtttttgaaaccggcatctagcgacacaacttttgtgctatgcaaacggctacaatgtcaatcacttcaaaccttttgttatgatgaataaaatgtaaaacttatgttttgtacaatgcttcttcattcttgttt

SEQ ID NO: 43068 - protein, 126 aa, Arabidopsis thaliana
  peptide (1)..(126): Ceres Seq. ID no. 12422266
MSFMYEKSNTWRWLVMKTRDSRSFFFTFAALCGVIPGVIGYGVMQVTNSSNPELEARLRKSARPDTLMMGKVNQERLAEYLGELKQKQDTNDRYVAALRGETLTRKPYQRIQPMPKPDDTVTTKTQ

SEQ ID NO: 43069 - protein, 123 aa, Arabidopsis thaliana
  peptide (1)..(123): Ceres Seq. ID no. 12422267
MYEKSNTWRWLVMKTRDSRSFFFTFAALCGVIPGVIGYGVMQVTNSSNPELEARLRKSARPDTLMMGKVNQERLAEYLGELKQKQDTNDRYVAALRGETLTRKPYQRIQPMPKPDDTVTTKTQ

SEQ ID NO: 43070 - protein, 111 aa, Arabidopsis thaliana
  peptide (1)..(111): Ceres Seq. ID no. 12422268
MKTRDSRSFFFTFAALCGVIPGVIGYGVMQVTNSSNPELEARLRKSARPDTLMMGKVNQERLAEYLGELKQKQDTNDRYVAALRGETLTRKPYQRIQPMPKPDDTVTTKTQ

SEQ ID NO: 43071 - DNA, 1347 bp, Arabidopsis thaliana
  misc_feature (1)..(1347): Ceres Seq. ID no. 12326484
  misc_feature (1)..(1347): Ortholog of  Ceres SEQ ID NO 13596816 as cited in SEQ ID NO 62287
acgaataagaaaagaagagaaacatcaaacatctttggtttgcttccctcgtacccgttcttcatacaagtatgatcatctgctgtctctatatagacatacatacaaaaaaaacttgtataagatttgaaactaaaatattaaatttatcctctattttgcaggcacgcctttaattatggattgtcatagaaagtcgttcttgttgaagtttttgtgcgtggcatttctgttaaactacagcaatgttggctttgtagacgcagcaacaaacattggcttgaactacggcctccttggagacaacctcccgcctccatctgaagttatcaacctctacaagtccttaagtgttaccaatattcggatcttcgacacgactacggatgtccttaacgcctttcgagggaatcgcgatattggagttatggtaggcgtgaagaaccaagacttagaggctctttcggtcagcgaagacgctgttaacacctggttcgtgacaaacattgagccttacttagctgatgtcaacatcacgttcattgctgtcgggaacgaagtcatcccaggggaaatcggctcttatgtgctacccgtcatgaaatctctcaccaacattgtcaagtcgaggagtctcccgatcttgatcagcaccacggtggctatgaccaaccttggccagtcgtatccaccttcggccggagatttcatacctcaagcgcgtgaacaacttaccccggtgctgaagtttttgtctcaaacaaatacgcctatcctcgtcaacatctacccctacttcgcatatgctgctgatcctatcaacattcagcttgattatgccatcttcaacaccaacaaggttgtggtccaagttatacaaacatgttcgatgtgatatttgatgctttcgtatgggcaatggagaaagagggcgtgaaggatttaccaatggtggtaacagagaccggatggccatctgctggtaacggaaacttaacaactccagatatcgcatctatatacaataccaattttgttaaacatgtggaaagcggtaaagggacgccaaagagaccaaagagtggcattagtggatttctatttgcgacgttcaatgagaatcaaaagccagcgggaaccgaacaaaattttgggttatataatccaacagatatgaagcccatctacaagatgttttgatttttagattcttgattttatagacaatcccaaatcattagtaaattaatgatgctctaatagttgtaatagagcgggataaaatcaagatctacaacaacattcattttatatgttgtatgatcttcttaaataaaaaaacttaag

SEQ ID NO: 43072 - protein, 238 aa, Arabidopsis thaliana
  peptide (1)..(238): Ceres Seq. ID no. 12326485
MDCHRKSFLLKFLCVAFLLNYSNVGFVDAATNIGLNYGLLGDNLPPPSEVINLYKSLSVTNIRIFDTTTDVLNAFRGNRDIGVMVGVKNQDLEALSVSEDAVNTWFVTNIEPYLADVNITFIAVGNEVIPGEIGSYVLPVMKSLTNIVKSRSLPILISTTVAMTNLGQSYPPSAGDFIPQAREQLTPVLKFLSQTNTPILVNIYPYFAYAADPINIQLDYAIFNTNKVVVQVIQTCSM

SEQ ID NO: 43073 - protein, 155 aa, Arabidopsis thaliana
  peptide (1)..(155): Ceres Seq. ID no. 12326486
MVGVKNQDLEALSVSEDAVNTWFVTNIEPYLADVNITFIAVGNEVIPGEIGSYVLPVMKSLTNIVKSRSLPILISTTVAMTNLGQSYPPSAGDFIPQAREQLTPVLKFLSQTNTPILVNIYPYFAYAADPINIQLDYAIFNTNKVVVQVIQTCSM

SEQ ID NO: 43074 - DNA, 1107 bp, Arabidopsis thaliana
  misc_feature (1)..(1107): Ceres Seq. ID no. 12355533
  misc_feature (1)..(1107): Ortholog of  Ceres SEQ ID NO 13595755 as cited in SEQ ID NO 58146
atcgtaaactataatcggcgtctctccggactcacacctcatcgaaatttggccatctcatctggcttcttcccctccggcgttggataaccatcattacttctcgcgccggcttcgagtggaaaatatggatcctcgtcaattcgaacacaccgttgttgctgataatgatattcacagcattgttatgtcatatcttctgcacaactgcttcaacgaaactgcggactcacttgcttcttccactggagttaagcagcctgcaattgatcgtgataacatggagagaagaaaacaaataatacattttatactggagaggaaggcgttgaaggcttttgaactaactgaacaactagcacaagacttgcttgagaaaaacaaggatttgcaattcgatcttctatgccttcattttgtggagctaatctgtgctgggaactgcaccgaagctctcaaatttggtaagacaagattggctccttttgggaaggtcaaaaaatatgtagaaaagcttgaagacgtaatggcattgctcgcttatgaagaccctgagaaatccccaatgttccatcttttgagctctgaataccgccaacaagttgctgataatctgaaccgcacaattcttgaacacacaaaccacccgagctacacaccaatggaaaggatcatacaacaggtgacagttgtgagacaatacttgactgaggagaatggcaaagatgcgtttcctccattctctctgaaggattctctcaaaggctaagatcgcaggactactccaaagtttgctaggaggaggatatgctaagcattgtcatgtaaatacaaaaagaccttgctcctctctaaagtttgcaaggttagtcttccatggccacaggcggggtttcagtttgctgttacaggagatcaatattgtgaaggacagtttcggcttggtttggtttggtttggttcagttctctaccagaagattgtttcatcaactttgtgtgagtttagtcgataaatctgtaatccatatctttggaatacacatttctctttgtaactatcgtttatgttttgatagaatacttgcaaattcaaggttttattttc

SEQ ID NO: 43075 - protein, 213 aa, Arabidopsis thaliana
  peptide (1)..(213): Ceres Seq. ID no. 12355534
MDPRQFEHTVVADNDIHSIVMSYLLHNCFNETADSLASSTGVKQPAIDRDNMERRKQIIHFILERKALKAFELTEQLAQDLLEKNKDLQFDLLCLHFVELICAGNCTEALKFGKTRLAPFGKVKKYVEKLEDVMALLAYEDPEKSPMFHLLSSEYRQQVADNLNRTILEHTNHPSYTPMERIIQQVTVVRQYLTEENGKDAFPPFSLKDSLKG

SEQ ID NO: 43076 - protein, 193 aa, Arabidopsis thaliana
  peptide (1)..(193): Ceres Seq. ID no. 12355535
MSYLLHNCFNETADSLASSTGVKQPAIDRDNMERRKQIIHFILERKALKAFELTEQLAQDLLEKNKDLQFDLLCLHFVELICAGNCTEALKFGKTRLAPFGKVKKYVEKLEDVMALLAYEDPEKSPMFHLLSSEYRQQVADNLNRTILEHTNHPSYTPMERIIQQVTVVRQYLTEENGKDAFPPFSLKDSLKG

SEQ ID NO: 43077 - protein, 162 aa, Arabidopsis thaliana
  peptide (1)..(162): Ceres Seq. ID no. 12355536
MERRKQIIHFILERKALKAFELTEQLAQDLLEKNKDLQFDLLCLHFVELICAGNCTEALKFGKTRLAPFGKVKKYVEKLEDVMALLAYEDPEKSPMFHLLSSEYRQQVADNLNRTILEHTNHPSYTPMERIIQQVTVVRQYLTEENGKDAFPPFSLKDSLKG

SEQ ID NO: 43078 - DNA, 1139 bp, Arabidopsis thaliana
  misc_feature (1)..(1139): Ceres Seq. ID no. 13491553
  misc_feature (1)..(1139): Ortholog of  Ceres SEQ ID NO 14312901 as cited in SEQ ID NO 57146
aaaacgttactgtcactaaatgaaatctatttttctttcttaaattttgctctgacaaatatttttgattgcgtcattttctactttggaaatgtctttgatttagcatttcagttcgctcaaaacatcaaatcttaccttctttagctttcacattagattctggtaattattagcacaaaaaaaagataagccagaatacgaaacaaccaaaaaaagaggagaattctttttttttttttctttccgatgcctccgaccaataattaccgaatctccggcgaaccaccgtctactacgccgtctcatccaccgccaaaaccgaaaacaaggattctctctctattcctcgttggtgtaatcatgttttcaatcttctttctcttcctcgttcttatcggtatcgcctctgttcttatcctccctctcctcctctcttctctccatcgtcaccaccgacgtcgtcgtcgtaatcgccgacaagaatcctcagatgggttatcttcaagattcgtgaaaaagcttcctcaattcaaattctccgaacctagcacatacacacggtacgagagcgattgtgtggtttgttttgatggattcagacaaggacaatggtgtcggaatcttcctggttgtggacacgtgtttcatcgaaagtgtgtggacacttggttgctcaaagcctcgacgtgtcctatttgcagagctagggttagattgtgggaggaagatccacaagaaggagaattatggagatgttttggtcatagaagaagtagtttgctagatttgtaatattgtgtggttatgtagacgtggactcagtctaatggatgataagaatctccaaaactgaagctacgaagaggtacaatacaagccaaggactctttcctccatagagaagtagcgggtcgatcttatggtaatatataagcactaagcagatgggcgtttgatcatataaaccctcactaccattaccaaaaagcaatagccaagagctttttttttcattttctttttgaaagccatggatcggttttcgttcttgaatgttataatggaggttgcgggtattctaaatgaatcccgcaaactctcctcaagaacaaaaagttgatgttctcagtcttggt

SEQ ID NO: 43079 - protein, 181 aa, Arabidopsis thaliana
  peptide (1)..(181): Ceres Seq. ID no. 13491554
MPPTNNYRISGEPPSTTPSHPPPKPKTRILSLFLVGVIMFSIFFLFLVLIGIASVLILPLLLSSLHRHHRRRRRNRRQESSDGLSSRFVKKLPQFKFSEPSTYTRYESDCVVCFDGFRQGQWCRNLPGCGHVFHRKCVDTWLLKASTCPICRARVRLWEEDPQEGELWRCFGHRRSSLLDL

SEQ ID NO: 43080 - protein, 143 aa, Arabidopsis thaliana
  peptide (1)..(143): Ceres Seq. ID no. 13491555
MFSIFFLFLVLIGIASVLILPLLLSSLHRHHRRRRRNRRQESSDGLSSRFVKKLPQFKFSEPSTYTRYESDCVVCFDGFRQGQWCRNLPGCGHVFHRKCVDTWLLKASTCPICRARVRLWEEDPQEGELWRCFGHRRSSLLDL

SEQ ID NO: 43081 - DNA, 912 bp, Arabidopsis thaliana
  misc_feature (1)..(912): Ceres Seq. ID no. 12326948
  misc_feature (1)..(912): Ortholog of  Ceres SEQ ID NO 13596375 as cited in SEQ ID NO 68048
aacctaaaacgcagagtgtgttgaagacgacggagacggcgacggcgagaagcaatgacgactgaggaaaataaaacaagcagaaataggaagaggaagagacagagaaaccctaaaccttctaaagaagaacctatcgagacgacaccgaagaatcaaaacgagaaaaagaatcaaagagataccaaaaaccaacaacatggaggttcttcagctccatcgaaacgacctaaaccttccaatttcctcgatgcgcttagagagagattatctggtgggcaatttaggatgctcaatgagaaactctacacttgctctggaaaagaagctttagactactttaaagaagatccacaaatgtttgatatgtatcatacagggtatcaacaacaaatgtcaaattggcctgagcttcctgttaactccattattaattggctattgtctaatagctcttctttagttgtggctgattttggctgtggtgatgcaaggattgctaaaagtgtgaagaacaaagttttctcctttgatcttgtctcaaagaacccctctgttattgcctgcgatatgtcaaatacttcacttgagtcttcatcagtggatgttgcagttttctgtctttcattaatgggaacaaactattctagttatatcaaagaagcacatcgagttcttcgtccaagtggtatgcttcttatagcggaagtaaagagcaggtttgatccaaacaatggaggagcagacccaaaagactttgtgaaagccgtttgtgatcttggatttacttcggttttaaaggacttctccaataagatgttcatcttattccatttcaagaaaaaggttagtgaaacatacttcctttcaggagcagatgaattcaaatcagaagataataaagtggcctga

SEQ ID NO: 43082 - protein, 285 aa, Arabidopsis thaliana
  peptide (1)..(285): Ceres Seq. ID no. 12326949
MTTEENKTSRNRKRKRQRNPKPSKEEPIETTPKNQNEKKNQRDTKNQQHGGSSAPSKRPKPSNFLDALRERLSGGQFRMLNEKLYTCSGKEALDYFKEDPQMFDMYHTGYQQQMSNWPELPVNSIINWLLSNSSSLVVADFGCGDARIAKSVKNKVFSFDLVSKNPSVIACDMSNTSLESSSVDVAVFCLSLMGTNYSSYIKEAHRVLRPSGMLLIAEVKSRFDPNNGGADPKDFVKAVCDLGFTSVLKDFSNKMFILFHFKKKVSETYFLSGADEFKSEDNKVA

SEQ ID NO: 43083 - protein, 207 aa, Arabidopsis thaliana
  peptide (1)..(207): Ceres Seq. ID no. 12326950
MLNEKLYTCSGKEALDYFKEDPQMFDMYHTGYQQQMSNWPELPVNSIINWLLSNSSSLVVADFGCGDARIAKSVKNKVFSFDLVSKNPSVIACDMSNTSLESSSVDVAVFCLSLMGTNYSSYIKEAHRVLRPSGMLLIAEVKSRFDPNNGGADPKDFVKAVCDLGFTSVLKDFSNKMFILFHFKKKVSETYFLSGADEFKSEDNKVA

SEQ ID NO: 43084 - protein, 184 aa, Arabidopsis thaliana
  peptide (1)..(184): Ceres Seq. ID no. 12326951
MFDMYHTGYQQQMSNWPELPVNSIINWLLSNSSSLVVADFGCGDARIAKSVKNKVFSFDLVSKNPSVIACDMSNTSLESSSVDVAVFCLSLMGTNYSSYIKEAHRVLRPSGMLLIAEVKSRFDPNNGGADPKDFVKAVCDLGFTSVLKDFSNKMFILFHFKKKVSETYFLSGADEFKSEDNKVA

SEQ ID NO: 43085 - DNA, 1476 bp, Arabidopsis thaliana
  misc_feature (1)..(1476): Ceres Seq. ID no. 13504920
  misc_feature (1)..(1476): Ortholog of  Ceres SEQ ID NO 15170752 as cited in SEQ ID NO 52719
gtaatgatatgaactttacaaaagaaaattgtcaatttcgaaaaatgttgagcacaagctctgatcttcatggccgtcttctccgattatcagaaccaatagcagagattcttagacgtacacagtacacaccgcaagagagcagcaaagtatccaccaaagatatactcttgtccttgttaccaaacacttcgtcttctcgtctcgccaatgaagaatcgatcaaaagtctcgcgcttgcttgtgcccttctcgcttcttcacgttcatccactcacgaacttctctcatggattccagaaaacctctctgtcatgggggaatctacattttgggagatttcaagggattgtttcagtgatttttctagcaacagtaatgctgagaagcttgtggaattggtagaggatagtgagaagatcgaaatgttgccgatagttttgccggagttaaaagatggaatcgaaaagagttcacttggtaaaggcagtgatgcagaggatgtttcagctgcaatggctagaacacctgttggttatgctatacttgctgctcaccagctcaggtggtttgttactcaggttaaaaaaccgaatttggtgaaattttgtaacttggtggttccttgtgctttgacagcacttgatcattggtctcctgaagtcaaagggcagggtatgataacctttgttcatcttgctaaaaatgtgagttccggtgatcttggtttgtatggagatgtggttcttgatgcgtgttgccagaatatagcttccgatgatgagatttggatacatgtggtagagttatctgtgcttcttgttactaaaatccacccaaataatcctcgaagcccgtggtatgagaagatcatgaatgagatgctcgggcatttggaacgccaaccaagaaataaggagcgacgtatcacttggctaagatttgttgagccactcttgaactctctagggcttttcttacttgctcattttcgacgtatcttccctcttttctttcagtggatgcattcagacgacgccgaaacagttctgttggttcttgagagactggagacagttgtgaggttgacgtggattagacactcacctgtgttcccaagattggtggatgagcttgtttccttgtacaaagagtcatcgatgcgtaaggatcgcgatgatattagacctcttatcctccgtatcttgatgctactccgccagtgcaaaggtctacggtttgagtcagcgtggagtcaataccaggaggatccaaatctgagtactgttagtcaacatatatggactagttcaagttgatctcaagagcgtatgtttgactaaaacagccatttttttttctaattttcgatattagtttggtctaggcctagtgatgcaagtaattactggcgaatcctcgaatttttgtaagcatttggctcttgactcttcttaagctaatctgatttgatac

SEQ ID NO: 43086 - protein, 438 aa, Arabidopsis thaliana
  peptide (1)..(438): Ceres Seq. ID no. 13504921
NDMNFTKENCQFRKMLSTSSDLHGRLLRLSEPIAEILRRTQYTPQESSKVSTKDILLSLLPNTSSSRLANEESIKSLALACALLASSRSSTHELLSWIPENLSVMGESTFWEISRDCFSDFSSNSNAEKLVELVEDSEKIEMLPIVLPELKDGIEKSSLGKGSDAEDVSAAMARTPVGYAILAAHQLRWFVTQVKKPNLVKFCNLVVPCALTALDHWSPEVKGQGMITFVHLAKNVSSGDLGLYGDVVLDACCQNIASDDEIWIHVVELSVLLVTKIHPNNPRSPWYEKIMNEMLGHLERQPRNKERRITWLRFVEPLLNSLGLFLLAHFRRIFPLFFQWMHSDDAETVLLVLERLETVVRLTWIRHSPVFPRLVDELVSLYKESSMRKDRDDIRPLILRILMLLRQCKGLRFESAWSQYQEDPNLSTVSQHIWTSSS

SEQ ID NO: 43087 - protein, 436 aa, Arabidopsis thaliana
  peptide (1)..(436): Ceres Seq. ID no. 13504922
MNFTKENCQFRKMLSTSSDLHGRLLRLSEPIAEILRRTQYTPQESSKVSTKDILLSLLPNTSSSRLANEESIKSLALACALLASSRSSTHELLSWIPENLSVMGESTFWEISRDCFSDFSSNSNAEKLVELVEDSEKIEMLPIVLPELKDGIEKSSLGKGSDAEDVSAAMARTPVGYAILAAHQLRWFVTQVKKPNLVKFCNLVVPCALTALDHWSPEVKGQGMITFVHLAKNVSSGDLGLYGDVVLDACCQNIASDDEIWIHVVELSVLLVTKIHPNNPRSPWYEKIMNEMLGHLERQPRNKERRITWLRFVEPLLNSLGLFLLAHFRRIFPLFFQWMHSDDAETVLLVLERLETVVRLTWIRHSPVFPRLVDELVSLYKESSMRKDRDDIRPLILRILMLLRQCKGLRFESAWSQYQEDPNLSTVSQHIWTSSS

SEQ ID NO: 43088 - protein, 424 aa, Arabidopsis thaliana
  peptide (1)..(424): Ceres Seq. ID no. 13504923
MLSTSSDLHGRLLRLSEPIAEILRRTQYTPQESSKVSTKDILLSLLPNTSSSRLANEESIKSLALACALLASSRSSTHELLSWIPENLSVMGESTFWEISRDCFSDFSSNSNAEKLVELVEDSEKIEMLPIVLPELKDGIEKSSLGKGSDAEDVSAAMARTPVGYAILAAHQLRWFVTQVKKPNLVKFCNLVVPCALTALDHWSPEVKGQGMITFVHLAKNVSSGDLGLYGDVVLDACCQNIASDDEIWIHVVELSVLLVTKIHPNNPRSPWYEKIMNEMLGHLERQPRNKERRITWLRFVEPLLNSLGLFLLAHFRRIFPLFFQWMHSDDAETVLLVLERLETVVRLTWIRHSPVFPRLVDELVSLYKESSMRKDRDDIRPLILRILMLLRQCKGLRFESAWSQYQEDPNLSTVSQHIWTSSS

SEQ ID NO: 43089 - DNA, 1644 bp, Arabidopsis thaliana
  misc_feature (1)..(1644): Ceres Seq. ID no. 12337218
  misc_feature (1)..(1644): Ortholog of  Ceres SEQ ID NO 13663328 as cited in SEQ ID NO 66678
  misc_feature (1)..(1644): Ortholog of  Ceres SEQ ID NO 13624495 as cited in SEQ ID NO 0
ctggattttctagagatttgtgacaaatgtcaaatgggttgttgaatcttcacgtgtcctcttttctcctcttatctcatctaatttgtttctttagttttgttcaactcaagcacatccgagaaagtcatcgtctttgaacatcaaattgcgttttgtttgtcaaatgacttaagttcttgatctttttcttgtaggggttttttctctgcactccacggtcatggcttcgtctacggctcagagcaagaagcagtttaagaggtctatgactaagaaatcacattcatggtggtgggatagtcacaattgtcccaagaactcaaaatggcttgcagagaatctagaaaagatggatgatcgagtgaaccacatgttaaaactgattgaagaagacgcagactcttttgccaagaaagctcagatgtatttccagaagcgtcccgagttaattcagcttgtcgaggaattttaccgcatgtatcgtgcattggctgaacgttatgatcaagctagtggtgagctacagaagaaccatacatctgagatccagtcacagagctctcttgagttatcatctcctaccaaagagaagttgagtcgccgtcaatctggccataaagaagaggaagattcatcatctttgacagattccggttctgattctgatcattcctctgccaatgatgaagacggtgacgaggcattgatccgtagaatggctgaacttgagcttgagcttcaagagacgaaacagaagctccttctccagcaggaaagtgttgatggtgacaacaatgttgatctccttcacaaaattactacatatgagggagagcttaaagaagctaatgagaagatgcgaatgcacgaagacgagattgctaatctgaagaatcagcttcagagctgcatgtcctttgacgcagaggatcaacttggtactgcagaaaagagtcttgatttggataaagaggacactgaagcagatgcagaagctacaaaagtgctagccttggaggaagagctgagtatcgcgaaagagaagcttcagcactttgagaaagagacttattctctgaaaaatgagctcgagattagtaaagctgctgaggataagctgaagagcttacaacatgagctcgagttggccaagaaagacgttgagacccaacgaaacaagctcaacgcagagaagaaagaagtcttgaagttgcaggagagattggcaatggtgaaaactagtttacaggatagagataacgagataagggcattgaaaactgcggtttcagacgctgaacagaagatattccccgaaaaagcacagatcaagggagaaatgtcgaagatgcttgaagaacgaagccaacttggagagcaactgagagagctggaatcacatataaggctgatcaaggaagagaaagctgaaacagaggagaagcttagaggaggaactgagaaaatcagcgtaatgagagacgagagcaatgtgctaagagaagagattgggaagagagaagagacgataaaggaaacggaaaagcatatggaggagcttcatatggagcaagtgaggctgagaagacggtcgagtgagcttacggaagaagtggaaaggacgagagtgtctgcatcggg

SEQ ID NO: 43090 - protein, 473 aa, Arabidopsis thaliana
  peptide (1)..(473): Ceres Seq. ID no. 12337219
MASSTAQSKKQFKRSMTKKSHSWWWDSHNCPKNSKWLAENLEKMDDRVNHMLKLIEEDADSFAKKAQMYFQKRPELIQLVEEFYRMYRALAERYDQASGELQKNHTSEIQSQSSLELSSPTKEKLSRRQSGHKEEEDSSSLTDSGSDSDHSSANDEDGDEALIRRMAELELELQETKQKLLLQQESVDGDNNVDLLHKITTYEGELKEANEKMRMHEDEIANLKNQLQSCMSFDAEDQLGTAEKSLDLDKEDTEADAEATKVLALEEELSIAKEKLQHFEKETYSLKNELEISKAAEDKLKSLQHELELAKKDVETQRNKLNAEKKEVLKLQERLAMVKTSLQDRDNEIRALKTAVSDAEQKIFPEKAQIKGEMSKMLEERSQLGEQLRELESHIRLIKEEKAETEEKLRGGTEKISVMRDESNVLREEIGKREETIKETEKHMEELHMEQVRLRRRSSELTEEVERTRVSAS

SEQ ID NO: 43091 - protein, 458 aa, Arabidopsis thaliana
  peptide (1)..(458): Ceres Seq. ID no. 12337220
MTKKSHSWWWDSHNCPKNSKWLAENLEKMDDRVNHMLKLIEEDADSFAKKAQMYFQKRPELIQLVEEFYRMYRALAERYDQASGELQKNHTSEIQSQSSLELSSPTKEKLSRRQSGHKEEEDSSSLTDSGSDSDHSSANDEDGDEALIRRMAELELELQETKQKLLLQQESVDGDNNVDLLHKITTYEGELKEANEKMRMHEDEIANLKNQLQSCMSFDAEDQLGTAEKSLDLDKEDTEADAEATKVLALEEELSIAKEKLQHFEKETYSLKNELEISKAAEDKLKSLQHELELAKKDVETQRNKLNAEKKEVLKLQERLAMVKTSLQDRDNEIRALKTAVSDAEQKIFPEKAQIKGEMSKMLEERSQLGEQLRELESHIRLIKEEKAETEEKLRGGTEKISVMRDESNVLREEIGKREETIKETEKHMEELHMEQVRLRRRSSELTEEVERTRVSAS

SEQ ID NO: 43092 - protein, 430 aa, Arabidopsis thaliana
  peptide (1)..(430): Ceres Seq. ID no. 12337221
MDDRVNHMLKLIEEDADSFAKKAQMYFQKRPELIQLVEEFYRMYRALAERYDQASGELQKNHTSEIQSQSSLELSSPTKEKLSRRQSGHKEEEDSSSLTDSGSDSDHSSANDEDGDEALIRRMAELELELQETKQKLLLQQESVDGDNNVDLLHKITTYEGELKEANEKMRMHEDEIANLKNQLQSCMSFDAEDQLGTAEKSLDLDKEDTEADAEATKVLALEEELSIAKEKLQHFEKETYSLKNELEISKAAEDKLKSLQHELELAKKDVETQRNKLNAEKKEVLKLQERLAMVKTSLQDRDNEIRALKTAVSDAEQKIFPEKAQIKGEMSKMLEERSQLGEQLRELESHIRLIKEEKAETEEKLRGGTEKISVMRDESNVLREEIGKREETIKETEKHMEELHMEQVRLRRRSSELTEEVERTRVSAS

SEQ ID NO: 43093 - DNA, 1374 bp, Arabidopsis thaliana
  misc_feature (1)..(1374): Ceres Seq. ID no. 13576763
  misc_feature (1)..(1374): Ortholog of  Ceres SEQ ID NO 13597715 as cited in SEQ ID NO 65577
  misc_feature (1)..(1374): Ortholog of  Ceres SEQ ID NO 15178668 as cited in SEQ ID NO 68301
agggcagttcactggtgcatgggtttgtggaagagaagttgtgcggctgttatatatatcagagaagcgccttcaacaaccgcctcttagggcgtataaaatcagaaacagaaacgagacaagaattaattctctcgtccaaatttcttctgggcagaaaccaacatttatccttatccgattcttctagggtttcggaagatctaaccagaaccttcgcaacaagatggataagtatcagagagttgagaagccgaaggcggatacgccgattgctgagaatgagattcgtatcaccagtatgggtagggcacggaactacatcacctatgcgatggctcttcttcaggaaaacaaatcgaatgaagttatcttcaaggctatgggaagagctatcaacaagagtgtgaccatagttgagctgattaagagaaggattcctggtcttcatcagatcacatctattggatcaacggacattacagatacctgggaacctacagaggaaggccttcaaacaattgagaccacgaggcatgtgtcgatgataaccataacactttccaaggagcagttgaacacatcctcagttgggtaccagtgtccgattcctattgagatggtgaagccattggctgagattgactacgaagggcaagacggatctcctagaggcagaggaggaagaagaggtagaggaggaagaggaaggggaaggggaagaggtggtagaggaaatggacctgcgaatgttgagtatgatgatggaggaaggggaagaggtggcagaggaaacggatatgtgaacaatgagtatgatgatggaggaaggggaagaggcggcagaggaagtggatatgggaatgtgaacaatgagtataatgatggaggtatggagcaggaccggtcatatggcagaggacgcgggcgtgggagaggaggtggacgtggtggtcgaggaagaggaggttacaatggccccccaccaccttactatgaagctcaacaagatggaggagactatggatacaacaatgttgctcctccagcagaccatggatatgatggtcctccgcctcagggacgtggacgtggccgtggaaggggaggtcgtggaagaggaggaggccgtggtggattcaacagatcaaatggagcacctatccaggctgctgcatgagcgaccagggtcattgaatgaagttggatctttcttacattctcatgtttttgtctctgttcttcaaagcaacttgttgccgtagaataatctttcgttcatgtcgctttaggttatatatatcctcatttattttatcatggatcttggattttcaagtttttattccttcaagagttttctagttttgtcat

SEQ ID NO: 43094 - protein, 317 aa, Arabidopsis thaliana
  peptide (1)..(317): Ceres Seq. ID no. 13576764
MDKYQRVEKPKADTPIAENEIRITSMGRARNYITYAMALLQENKSNEVIFKAMGRAINKSVTIVELIKRRIPGLHQITSIGSTDITDTWEPTEEGLQTIETTRHVSMITITLSKEQLNTSSVGYQCPIPIEMVKPLAEIDYEGQDGSPRGRGGRRGRGGRGRGRGRGGRGNGPANVEYDDGGRGRGGRGNGYVNNEYDDGGRGRGGRGSGYGNVNNEYNDGGMEQDRSYGRGRGRGRGGGRGGRGRGGYNGPPPPYYEAQQDGGDYGYNNVAPPADHGYDGPPPQGRGRGRGRGGRGRGGGRGGFNRSNGAPIQAAA

SEQ ID NO: 43095 - protein, 292 aa, Arabidopsis thaliana
  peptide (1)..(292): Ceres Seq. ID no. 13576765
MGRARNYITYAMALLQENKSNEVIFKAMGRAINKSVTIVELIKRRIPGLHQITSIGSTDITDTWEPTEEGLQTIETTRHVSMITITLSKEQLNTSSVGYQCPIPIEMVKPLAEIDYEGQDGSPRGRGGRRGRGGRGRGRGRGGRGNGPANVEYDDGGRGRGGRGNGYVNNEYDDGGRGRGGRGSGYGNVNNEYNDGGMEQDRSYGRGRGRGRGGGRGGRGRGGYNGPPPPYYEAQQDGGDYGYNNVAPPADHGYDGPPPQGRGRGRGRGGRGRGGGRGGFNRSNGAPIQAAA

SEQ ID NO: 43096 - protein, 281 aa, Arabidopsis thaliana
  peptide (1)..(281): Ceres Seq. ID no. 13576766
MALLQENKSNEVIFKAMGRAINKSVTIVELIKRRIPGLHQITSIGSTDITDTWEPTEEGLQTIETTRHVSMITITLSKEQLNTSSVGYQCPIPIEMVKPLAEIDYEGQDGSPRGRGGRRGRGGRGRGRGRGGRGNGPANVEYDDGGRGRGGRGNGYVNNEYDDGGRGRGGRGSGYGNVNNEYNDGGMEQDRSYGRGRGRGRGGGRGGRGRGGYNGPPPPYYEAQQDGGDYGYNNVAPPADHGYDGPPPQGRGRGRGRGGRGRGGGRGGFNRSNGAPIQAAA

SEQ ID NO: 43097 - DNA, 1106 bp, Arabidopsis thaliana
  misc_feature (1)..(1106): Ceres Seq. ID no. 13489460
  misc_feature (1)..(1106): Ortholog of  Ceres SEQ ID NO 13654802 as cited in SEQ ID NO 62664
tctttttgtcgactgcttcttcacgccgtcgaggaattcttctccaccaacgaatccggcgacgtcttatcaccaccttgtcgaatctttagttgatgttgtttaaaggttttagctaataagggcatgaaacggatctgctcggtttcaagtgttcaacttttttccagaagtttcagagctttagcatcgccacgttccttgaactatcccctgcagtgtatcaagcgttcatcagttcggatggagagtagcaactgttcttctggtgtcagaaccgagagtagtgtgaagccaagaggagcattgatagttctagaaggtcttgatcgcagcgggaaatcaacacagtgtgctaagctactctctttcttgaatggtttaggacatccgaccgagctctggagattccccgatagagagacgagtgtcggtcagatgatatccgcgtatctttctaataagtcgcagttagatgatcacacaattcatctccttttcagcgccaatcgttgggagaaaaggtcgttgatggaggaaaagctaaaaacaggaactacgcttatcgtggatcgttattcgtattctggtgttgcattctcatcagctaaaggtctcgatatcgaatggtgcaaggctcccgaaatcgggttactggctccagattctgtactttacctggacatttcacctgaaagagctgctgagagaggtggatatggagatgagaggtatgagcgagtggagtttcagaagaaagttgcagacttttatcaaacccttggcgattctttcatggaagataatcaatgccagtgatgccatggaggaagtagagaagaagattcaacaagtggtattagatcaagtcaaagaatgtactgaaggaaagcctctgtctctcctatggtcgtcatagaacgttttcgagtcatagcacttgcaagtttagtgattttgaaggaacttttgttgaagtttatactatgttgtgccatctaagcccattaacaggcccaaaagtttagtttatgtcgtcactcatgacatcttaatcgattattttggtgtaaactaattgagcgtcattaagtaaaggacaaatc

SEQ ID NO: 43098 - protein, 230 aa, Arabidopsis thaliana
  peptide (1)..(230): Ceres Seq. ID no. 13489461
MKRICSVSSVQLFSRSFRALASPRSLNYPLQCIKRSSVRMESSNCSSGVRTESSVKPRGALIVLEGLDRSGKSTQCAKLLSFLNGLGHPTELWRFPDRETSVGQMISAYLSNKSQLDDHTIHLLFSANRWEKRSLMEEKLKTGTTLIVDRYSYSGVAFSSAKGLDIEWCKAPEIGLLAPDSVLYLDISPERAAERGGYGDERYERVEFQKKVADFYQTLGDSFMEDNQCQ

SEQ ID NO: 43099 - protein, 191 aa, Arabidopsis thaliana
  peptide (1)..(191): Ceres Seq. ID no. 13489462
MESSNCSSGVRTESSVKPRGALIVLEGLDRSGKSTQCAKLLSFLNGLGHPTELWRFPDRETSVGQMISAYLSNKSQLDDHTIHLLFSANRWEKRSLMEEKLKTGTTLIVDRYSYSGVAFSSAKGLDIEWCKAPEIGLLAPDSVLYLDISPERAAERGGYGDERYERVEFQKKVADFYQTLGDSFMEDNQCQ

SEQ ID NO: 43100 - protein, 126 aa, Arabidopsis thaliana
  peptide (1)..(126): Ceres Seq. ID no. 13489463
MISAYLSNKSQLDDHTIHLLFSANRWEKRSLMEEKLKTGTTLIVDRYSYSGVAFSSAKGLDIEWCKAPEIGLLAPDSVLYLDISPERAAERGGYGDERYERVEFQKKVADFYQTLGDSFMEDNQCQ

SEQ ID NO: 43101 - DNA, 1299 bp, Arabidopsis thaliana
  misc_feature (1)..(1299): Ceres Seq. ID no. 13592877
  misc_feature (1)..(1299): Ortholog of  Ceres SEQ ID NO 13598387 as cited in SEQ ID NO 62757
  misc_feature (1)..(1299): Ortholog of  Ceres SEQ ID NO 13662984 as cited in SEQ ID NO 64419
attacctagaacatcctaatcgaaaagagtgagagaagaagattagaaacgacgatatatacggagaatctcaggatttcgatcctgtttttgttttttctacttttggtactctccatggcgacggagcgtcatcattttgagcttgctaaaggcatcaatggccttgataagatcgttctccgcgagtctcgcggccgctctgcagaggtatacttgtatggaagtcatgtaacttcttggaagaatgagaacggagaggagttacttcacctcagtagcaaggccatattcaagcccccgaaaccaatacgtggagggattcccctatgttttccacaattcagtaactttggtacactcgaatcacatggctttgctagaaataggatctgggaagtcgaggctaacccacctccgttgccattaaattcttgttctagtgcttttgttgacctgatcctaaggccaactgaagacgatctgaaaatctggcctaacaattttgagttcaggctgaggatagccttggggaccgaaggagaattaactctgacatctcgtatcaggaacaccaactctgatggaaagccgtttacattcacatttgcttatcacacctatttctctgtctcagacatcagtgaagtacgggttgaaggattggaaacgttggattatcttgacaacttgaaggacagagaacgttttaccgaacaaggcgatgcgataacttttgaatccgaagttgacaagatttatctaagcacgccaacaaagattgctattttggatcacgagaaaaagaggactttcgttattcgcaaggacgggcttgctgatgctgtggtgtggaatccttgggataagaaatcaaagacgatctctgacttgggagatgaagactataagcatatgctttgtgtggaagctgcggctatcgagagaccgatcacattgaaacccggtgaagaatggaaaggaagactcgaactctctgcagttccttctagttactccagtggacagcttgaccccaagaaagtccttgagtgactctttcaaactccaaaaacagcatctttctcccctctttaattgcagtactataaagaaacgagtgaaggagagcttaaagatcatcggatatactatttaaagaaactgagatattgaataaaaattgttgcttcttagttctcttttgtaaccacagacaataacgatttgcgaactgcgaaccaagcatgcctggtctagcatttgtctggtcagagtccaaaaggaattacaactttt

SEQ ID NO: 43102 - protein, 312 aa, Arabidopsis thaliana
  peptide (1)..(312): Ceres Seq. ID no. 15221176
MATERHHFELAKGINGLDKIVLRESRGRSAEVYLYGSHVTSWKNENGEELLHLSSKAIFKPPKPIRGGIPLCFPQFSNFGTLESHGFARNRIWEVEANPPPLPLNSCSSAFVDLILRPTEDDLKIWPNNFEFRLRIALGTEGELTLTSRIRNTNSDGKPFTFTFAYHTYFSVSDISEVRVEGLETLDYLDNLKDRERFTEQGDAITFESEVDKIYLSTPTKIAILDHEKKRTFVIRKDGLADAVVWNPWDKKSKTISDLGDEDYKHMLCVEAAAIERPITLKPGEEWKGRLELSAVPSSYSSGQLDPKKVLE

SEQ ID NO: 43103 - DNA, 1239 bp, Arabidopsis thaliana
  misc_feature (1)..(1239): Ceres Seq. ID no. 12481861
  misc_feature (1)..(1239): Ortholog of  Ceres SEQ ID NO 15171606 as cited in SEQ ID NO 57214
  misc_feature (1)..(1239): Ortholog of  Ceres SEQ ID NO 13596921 as cited in SEQ ID NO 62368
  misc_feature (1)..(1239): Ortholog of  Ceres SEQ ID NO 13600673 as cited in SEQ ID NO 0
atgagcccaaaaaaagatgctgtttctaaaccaactccaatttcagtacccgtttcgagacgatccgatatacccgggtctctctacgtcgacactgacatgggtttctctgggtcaccacttcccatgccactagacatcttacaagggaatccaattccaccttttttatccaagacttttgatttggttgatgacccgactcttgacccggtcatctcttggggactgaccggagctagcttcgtagtttgggatcctctagagtttgccagaatcatacttccaaggaatttcaaacacaacaatttctccagcttcgtcagacagcttaacacttatggatttcgaaagattgatactgacaagtgggaattcgctaacgaggctttccttagaggcaagaagcatcttctgaagaacattcatcgtcgtcgatcaccacaatccaaccaaacttgctgcagtagcactagccaaagccaagggtcacctactgaggttggaggagagattgagaagctgaggaaagagcggcgtgcattgatggaggaaatggttgagcttcagcagcaaagcagaggcacagctcgacatgtggacactgtaaaccagaggctgaaagctgcagagcaacgtcagaagcaattgctctctttcttggctaagttgtttcagaaccggggtttcttggaacgcctgaagaacttcaaaggaaaagaaaaaggaggagctcttggattggaaaaggcgagaaagaagttcatcaagcaccaccagcagcctcaagattctccaacaggaggggaggtggtgaagtatgaagctgatgattgggagagattgctaatgtatgacgaagagactgagaacaccaagggtttaggagggatgacttcaagcgatccaaaaggcaagaacttgatgtatccatcagaagaagagatgagcaaaccagattacttgatgtccttcccatctcctgaaggacttattaaacaagaagagacgacatggagcatgggtttcgatactacaataccgagtttcagcaacaccgatgcatggggaaacacaatggactataatgatgtctcagagtttggttttgctgcagaaacaacaagtgatggtttgcctgatgtctgctgggaacaatttgctgcaggaatcacagagactggattcaactggccaactggtgatgatgatgataatacgccaatgaatgatccttag

SEQ ID NO: 43104 - protein, 412 aa, Arabidopsis thaliana
  peptide (1)..(412): Ceres Seq. ID no. 12481862
MSPKKDAVSKPTPISVPVSRRSDIPGSLYVDTDMGFSGSPLPMPLDILQGNPIPPFLSKTFDLVDDPTLDPVISWGLTGASFVVWDPLEFARIILPRNFKHNNFSSFVRQLNTYGFRKIDTDKWEFANEAFLRGKKHLLKNIHRRRSPQSNQTCCSSTSQSQGSPTEVGGEIEKLRKERRALMEEMVELQQQSRGTARHVDTVNQRLKAAEQRQKQLLSFLAKLFQNRGFLERLKNFKGKEKGGALGLEKARKKFIKHHQQPQDSPTGGEVVKYEADDWERLLMYDEETENTKGLGGMTSSDPKGKNLMYPSEEEMSKPDYLMSFPSPEGLIKQEETTWSMGFDTTIPSFSNTDAWGNTMDYNDVSEFGFAAETTSDGLPDVCWEQFAAGITETGFNWPTGDDDDNTPMNDP

SEQ ID NO: 43105 - protein, 379 aa, Arabidopsis thaliana
  peptide (1)..(379): Ceres Seq. ID no. 12481863
MGFSGSPLPMPLDILQGNPIPPFLSKTFDLVDDPTLDPVISWGLTGASFVVWDPLEFARIILPRNFKHNNFSSFVRQLNTYGFRKIDTDKWEFANEAFLRGKKHLLKNIHRRRSPQSNQTCCSSTSQSQGSPTEVGGEIEKLRKERRALMEEMVELQQQSRGTARHVDTVNQRLKAAEQRQKQLLSFLAKLFQNRGFLERLKNFKGKEKGGALGLEKARKKFIKHHQQPQDSPTGGEVVKYEADDWERLLMYDEETENTKGLGGMTSSDPKGKNLMYPSEEEMSKPDYLMSFPSPEGLIKQEETTWSMGFDTTIPSFSNTDAWGNTMDYNDVSEFGFAAETTSDGLPDVCWEQFAAGITETGFNWPTGDDDDNTPMNDP

SEQ ID NO: 43106 - protein, 370 aa, Arabidopsis thaliana
  peptide (1)..(370): Ceres Seq. ID no. 12481864
MPLDILQGNPIPPFLSKTFDLVDDPTLDPVISWGLTGASFVVWDPLEFARIILPRNFKHNNFSSFVRQLNTYGFRKIDTDKWEFANEAFLRGKKHLLKNIHRRRSPQSNQTCCSSTSQSQGSPTEVGGEIEKLRKERRALMEEMVELQQQSRGTARHVDTVNQRLKAAEQRQKQLLSFLAKLFQNRGFLERLKNFKGKEKGGALGLEKARKKFIKHHQQPQDSPTGGEVVKYEADDWERLLMYDEETENTKGLGGMTSSDPKGKNLMYPSEEEMSKPDYLMSFPSPEGLIKQEETTWSMGFDTTIPSFSNTDAWGNTMDYNDVSEFGFAAETTSDGLPDVCWEQFAAGITETGFNWPTGDDDDNTPMNDP

SEQ ID NO: 43107 - DNA, 1523 bp, Arabidopsis thaliana
  misc_feature (1)..(1523): Ceres Seq. ID no. 13489464
  misc_feature (1)..(1523): Ortholog of  Ceres SEQ ID NO 15177750 as cited in SEQ ID NO 57772
  misc_feature (1)..(1523): Ortholog of  Ceres SEQ ID NO 13596581 as cited in SEQ ID NO 62420
  misc_feature (1)..(1523): Ortholog of  Ceres SEQ ID NO 13591273 as cited in SEQ ID NO 65904
  misc_feature (1)..(1523): Ortholog of  Ceres SEQ ID NO 13623086 as cited in SEQ ID NO 0
gaagaacctctgtttcttcctcttcttcttcagggtcggtgttaggtgatgaagctccgtttttttcgttttcgtcttcttcttcttcaaggtctcttcgttttgtgcttgaagtaagaaaatttgggagaacaatgtcggcttcttcttcctcctttgaacaacctcaagtcataacctgcaacgcggcggtggcatggcgtgctggtgagccattggttatggaggaagttgaagtgagtccacctcaaccacttgagatcagaattaaagttgtatgtacatctctctgtcgtagtgatctctctgcttgggaatctcagtctcttttgcctcgaatatttggccatgaagctgcaggtatagtggagagcattggagaaggtgtaactgagtttgaaaaaggagatcatgtgcttgctgtattcactggagaatgtgggtcatgtcggcattgcatatctgggaaaagtaacatgtgtcaggttcttggaatggagaggaaaggtttgatgcatagtgatcagaagacacgcttctccatcaaaggcaaacctgtttaccattactgcgcggtttctagtttcagcgagtacactgtggttcactctggctgtgctgtcaaagtcgatccactggcacctctgcataaaatttgtcttctaagctgtggagtagctgcaggtcttggtgcagcatggaatgttgctgatgtacaaaaaggttcaagtgttgtgatatttggtcttggaactgtcggtctttctgttgctcaaggtgccaaacttagaggagcagctcaaatacttggggttgatataaatcctgctaaggctgaacaagcaaagacatttggtgtcacggatttcatcaattcaaatgacctctctgaacctataccccaggtgatcaaaagaatgacaggaggaggtgcagatttctcatttgaatgtgttggtgatacaggaatagctacaactgctttacaatcgtgctcggatggatggggaatgacggttactctaggtgtaccgaaagctaagcctgaagtttcagctcattacggacttttcctttctgggaaatctttaaaagggactctttttggtggttggaagcctaaatctgatcttccttcactcattgacaagtacatgaacaaggagattatgatcgatgaatttattacgcataacctgtcatttgatgaaatcaacaaagcttttgttcttatgagagaaggaaaatgtttgcgttgtgttcttcacatgccaaagtaatgtctcggaaaacacatgtcacagattcaagaaagattaacgagagctctgtatattctacagctgagttgttgtataaaacaaaagtgatggttttctatagggttatgagacttttttttttcttttggtttgttgtgaagtgatcgttcatacattataaagatggattctcacatgatgaatcaaacgagttcctagaaccaaggacattgatcttaaattgataacagtgtttcaagt

SEQ ID NO: 43108 - protein, 425 aa, Arabidopsis thaliana
  peptide (1)..(425): Ceres Seq. ID no. 13489465
RTSVSSSSSSGSVLGDEAPFFSFSSSSSSRSLRFVLEVRKFGRTMSASSSSFEQPQVITCNAAVAWRAGEPLVMEEVEVSPPQPLEIRIKVVCTSLCRSDLSAWESQSLLPRIFGHEAAGIVESIGEGVTEFEKGDHVLAVFTGECGSCRHCISGKSNMCQVLGMERKGLMHSDQKTRFSIKGKPVYHYCAVSSFSEYTVVHSGCAVKVDPLAPLHKICLLSCGVAAGLGAAWNVADVQKGSSVVIFGLGTVGLSVAQGAKLRGAAQILGVDINPAKAEQAKTFGVTDFINSNDLSEPIPQVIKRMTGGGADFSFECVGDTGIATTALQSCSDGWGMTVTLGVPKAKPEVSAHYGLFLSGKSLKGTLFGGWKPKSDLPSLIDKYMNKEIMIDEFITHNLSFDEINKAFVLMREGKCLRCVLHMPK

SEQ ID NO: 43109 - protein, 381 aa, Arabidopsis thaliana
  peptide (1)..(381): Ceres Seq. ID no. 13489466
MSASSSSFEQPQVITCNAAVAWRAGEPLVMEEVEVSPPQPLEIRIKVVCTSLCRSDLSAWESQSLLPRIFGHEAAGIVESIGEGVTEFEKGDHVLAVFTGECGSCRHCISGKSNMCQVLGMERKGLMHSDQKTRFSIKGKPVYHYCAVSSFSEYTVVHSGCAVKVDPLAPLHKICLLSCGVAAGLGAAWNVADVQKGSSVVIFGLGTVGLSVAQGAKLRGAAQILGVDINPAKAEQAKTFGVTDFINSNDLSEPIPQVIKRMTGGGADFSFECVGDTGIATTALQSCSDGWGMTVTLGVPKAKPEVSAHYGLFLSGKSLKGTLFGGWKPKSDLPSLIDKYMNKEIMIDEFITHNLSFDEINKAFVLMREGKCLRCVLHMPK

SEQ ID NO: 43110 - protein, 352 aa, Arabidopsis thaliana; identical to SEQ ID NO: 36865
  peptide (1)..(352): Ceres Seq. ID no. 13489467

SEQ ID NO: 43111 - DNA, 2188 bp, Arabidopsis thaliana
  misc_feature (1)..(2188): Ceres Seq. ID no. 12574396
  misc_feature (1)..(2188): Ortholog of  Ceres SEQ ID NO 13591098 as cited in SEQ ID NO 64770
agggccgctcgctcccaccaaaggacaaatctctctcccgcactcatctctgttcattggttcctcccaaaaaatatcaatcaaatcggaataaactatacgaatcctccaatataaagctccaccctttctctttctatctctctctctccattgttgactgtctctcttccctcgtaaacatcgctgtctctaaagatggcctctctctcaggcctatactcttcttctccatctctcaaacctgccaaaaaccattcctttaaagcattgccggcgcaatctcgagattccttctctttcccacatacctccaaacccaccaatctaccgttgactctctcctcggctcgttctgtggcacgcgacatttctcatgcggattcgaagaaagagcttcttaaggatccggatgcgttgtggaagcgatacctcgattggttttatcagcagaaagagcttgggttgtatctggatattagtcgggtcggatttaccgatgagtttgtggctgaaatggagccaaggtttcaagctgcgtttaaggctatggaggatcttgaaaaagggtctatagcgaatcctgatgaaggaagaatggttggacattactggcttaggaactctaagctcgcacctaagcctactttaaagaccttgatcgagaacacacttgattctatttgcgctttctccgacgacataatctctggaaagccaccatcttctcctgagggtcgttttactcagatactttctgttggcattggaggctcggctcttggacctcaatttgtcgctgaggccttggctcctgataatcctccattgaagataagattcattgacaacaccgaccctgctggaattgatcatcagattgcacaacttgggccagagctggcctcgactttagtagttgtcatctcaaagagtggaggtactcctgaaactagaaatggactactggaagtgcagaaagcattccgtgaagctggtctgaatttcgcaaaacagggtgttgcaataacccaagagaactcattactggataatacggcaagaattgaaggttggctagctagatttcctatgtacgactgggtgggtggaagaacatcaataatgtctgcagttggtctgcttccagcagcactacaggggattaatgttagggagatgcttactggtgctgctttaatggatgaggctactaggacaacttcgatcaagaataaccctgcagcgctcttagctatgtgttggtactgggcttccaatggcgttggttccaaggatatggttgtccttccttacaaggatagcttattgctatttagtcggtatctgcagcagctggtcatggaatcactaggaaaggagtttgatcttgacggtaacactgttaatcaagggttaactgtgtatggaaataagggaagcacagatcagcacgcctacattcaacagctgagagatggtgtgcacaatttctttgcaaccttcatagaagtgttacgggacagaccccctggtcacgattgggagcttgagccaggtgtcacttgtggagactatctctttgggatgctacagggaactagatctgctttatatgcaaacggtagagaatccatcagtgttacaatccaggaagtgacaccaacatctgttggggctattatagctctttatgaaagagctgttggtttatatgcctcaattgtgaacataaatgcttaccaccaacccggtgtggaagctgggaaaaaggcagcagcagaagttctcgccctgcaaaagcgggtattgtcagttcttaatgaagccacttgtaaagatccggtagagccattgacactggaagagatagctgatcgttgtcatgctcctgaggaaatagaaatgatatacaagatcatagcgcacatgtctgcaaacgacagagttctgatagcagaaggaaactgtggatcgccacgaagtatcaaagtgtatttgggcgagtgcaatgtggatgacctgtacgcataacaaaacccaacactttctcaaactccaaactctcattctctccattccttatttctttctgccatgtctatgattttgaaaaagaaaaagattgcaataagagccaggaaacacttgtgtacttgttttgaaataaagataatttcagaatgct

SEQ ID NO: 43112 - protein, 611 aa, Arabidopsis thaliana
  peptide (1)..(611): Ceres Seq. ID no. 12574397
MASLSGLYSSSPSLKPAKNHSFKALPAQSRDSFSFPHTSKPTNLPLTLSSARSVARDISHADSKKELLKDPDALWKRYLDWFYQQKELGLYLDISRVGFTDEFVAEMEPRFQAAFKAMEDLEKGSIANPDEGRMVGHYWLRNSKLAPKPTLKTLIENTLDSICAFSDDIISGKPPSSPEGRFTQILSVGIGGSALGPQFVAEALAPDNPPLKIRFIDNTDPAGIDHQIAQLGPELASTLVVVISKSGGTPETRNGLLEVQKAFREAGLNFAKQGVAITQENSLLDNTARIEGWLARFPMYDWVGGRTSIMSAVGLLPAALQGINVREMLTGAALMDEATRTTSIKNNPAALLAMCWYWASNGVGSKDMVVLPYKDSLLLFSRYLQQLVMESLGKEFDLDGNTVNQGLTVYGNKGSTDQHAYIQQLRDGVHNFFATFIEVLRDRPPGHDWELEPGVTCGDYLFGMLQGTRSALYANGRESISVTIQEVTPTSVGAIIALYERAVGLYASIVNINAYHQPGVEAGKKAAAEVLALQKRVLSVLNEATCKDPVEPLTLEEIADRCHAPEEIEMIYKIIAHMSANDRVLIAEGNCGSPRSIKVYLGECNVDDLYA

SEQ ID NO: 43113 - protein, 505 aa, Arabidopsis thaliana
  peptide (1)..(505): Ceres Seq. ID no. 12574398
MEPRFQAAFKAMEDLEKGSIANPDEGRMVGHYWLRNSKLAPKPTLKTLIENTLDSICAFSDDIISGKPPSSPEGRFTQILSVGIGGSALGPQFVAEALAPDNPPLKIRFIDNTDPAGIDHQIAQLGPELASTLVVVISKSGGTPETRNGLLEVQKAFREAGLNFAKQGVAITQENSLLDNTARIEGWLARFPMYDWVGGRTSIMSAVGLLPAALQGINVREMLTGAALMDEATRTTSIKNNPAALLAMCWYWASNGVGSKDMVVLPYKDSLLLFSRYLQQLVMESLGKEFDLDGNTVNQGLTVYGNKGSTDQHAYIQQLRDGVHNFFATFIEVLRDRPPGHDWELEPGVTCGDYLFGMLQGTRSALYANGRESISVTIQEVTPTSVGAIIALYERAVGLYASIVNINAYHQPGVEAGKKAAAEVLALQKRVLSVLNEATCKDPVEPLTLEEIADRCHAPEEIEMIYKIIAHMSANDRVLIAEGNCGSPRSIKVYLGECNVDDLYA

SEQ ID NO: 43114 - protein, 494 aa, Arabidopsis thaliana
  peptide (1)..(494): Ceres Seq. ID no. 12574399
MEDLEKGSIANPDEGRMVGHYWLRNSKLAPKPTLKTLIENTLDSICAFSDDIISGKPPSSPEGRFTQILSVGIGGSALGPQFVAEALAPDNPPLKIRFIDNTDPAGIDHQIAQLGPELASTLVVVISKSGGTPETRNGLLEVQKAFREAGLNFAKQGVAITQENSLLDNTARIEGWLARFPMYDWVGGRTSIMSAVGLLPAALQGINVREMLTGAALMDEATRTTSIKNNPAALLAMCWYWASNGVGSKDMVVLPYKDSLLLFSRYLQQLVMESLGKEFDLDGNTVNQGLTVYGNKGSTDQHAYIQQLRDGVHNFFATFIEVLRDRPPGHDWELEPGVTCGDYLFGMLQGTRSALYANGRESISVTIQEVTPTSVGAIIALYERAVGLYASIVNINAYHQPGVEAGKKAAAEVLALQKRVLSVLNEATCKDPVEPLTLEEIADRCHAPEEIEMIYKIIAHMSANDRVLIAEGNCGSPRSIKVYLGECNVDDLYA

SEQ ID NO: 43115 - DNA, 1881 bp, Arabidopsis thaliana
  misc_feature (1)..(1881): Ceres Seq. ID no. 13593398
  misc_feature (1)..(1881): Ortholog of  Ceres SEQ ID NO 15169670 as cited in SEQ ID NO 62085
aagtgattgtccgtctccgtcttcatcttcttcctctctctcacgcagctgctttgattaactcttcaggtccagcttaagagttttgtgaagatggtcttagtgctatacgagacagcggcggggtttgccctctttaaagttaaagatgaaggaaagatggctaacgtcgaggatttgtgtaaagagttcgacactccagactcagcacgaaagatggttaagctaaaagcttttgagaagtttgacaatacatctgaagctctcgaagctgtggctaaattgctggagggagctccaagcaaaggtctgcgcaagtttttgaaagctaattgtcaaggtgaaaccttggctgtggctgattcaaagcttgggaatgttatcaaggagaaactgaaaattgattgcattcacaacaatgctgttatggagcttctacgtggtgttagaagtcagtttactgaactcatatctgggttgggtgatcaagacttggctcctatgagcttgggtctgtctcacagtctcgccagatataagctaaagtttagttctgacaaggtggataccatgattatccaagctattggtctgcttgatgatcttgacaaagagctgaacacatacgccatgagggttagagaatggtatggatggcattttcccgagcttgctaagatcatatcagacaatatcctatatgccaaatctgttaaattgatgggaaaccgagttaatgctgctaagctagacttctccgagatcttagcagatgaaattgaggcagatcttaaggacgcagctgtgatatccatgggaacagaagtcagtgacttagacttgttgcacatccgtgaactctgtgaccaggttctctctctttctgagtacagagctcagctttacgattacctaaagagcagaatgaacactattgctcccaatctgactgccctggtaggagagcttgttggtgctcgtcttatttcccatggaggtagtttattgaacctctccaagcaacctgggagcacggttcagatactcggagccgaaaaagctctctttagagctcttaagacaaaacacgccacacccaagtacggtttgatttttcacgcatctctggttggtcaagcagcaccaaagcacaagggaaagatctcgcggtctttagctgctaaaactgttcttgctattagggttgatgctcttggtgatagccaagataacactatgggccttgaaaaccgagctaagcttgaagcgcggttgagaaatcttgaaggaaaagatttaggtcgtctgtctggttcatctaaaggcaaacctaagattgaagtctataacaaggataaaaagatgggatcaggcggtcttatcactcctgctaagacttacaacactgctgcagattctcttcttggggaaacctcagctaaatctgaggagccatcaaagaagaaagataagaaaaagaagaagaaggtagaagaagagaaacccgaagaggaagagccatcagagaaaaagaagaagaagaaagctgaagcagaaactgaagccgtagtagaggttgcaaaggaggagaagaagaagaataagaagaagagaaagcatgaggaagaagaaacaacggagacaccagccaagaagaaggataagaaagagaagaaaaagaagagtaaggactgagggagagaaaccgattttgagaaatctcttgagtgtaagattaataactgtttttgttgaattgcattttatctagaggaataggtgttttaagatgaaacttaaattttctgaaatcgtcattttgaatgatggattcatatttaaatccttttcacccgaactttatttttgttctagccttcc

SEQ ID NO: 43116 - protein, 533 aa, Arabidopsis thaliana
  peptide (1)..(533): Ceres Seq. ID no. 13593399
MVLVLYETAAGFALFKVKDEGKMANVEDLCKEFDTPDSARKMVKLKAFEKFDNTSEALEAVAKLLEGAPSKGLRKFLKANCQGETLAVADSKLGNVIKEKLKIDCIHNNAVMELLRGVRSQFTELISGLGDQDLAPMSLGLSHSLARYKLKFSSDKVDTMIIQAIGLLDDLDKELNTYAMRVREWYGWHFPELAKIISDNILYAKSVKLMGNRVNAAKLDFSEILADEIEADLKDAAVISMGTEVSDLDLLHIRELCDQVLSLSEYRAQLYDYLKSRMNTIAPNLTALVGELVGARLISHGGSLLNLSKQPGSTVQILGAEKALFRALKTKHATPKYGLIFHASLVGQAAPKHKGKISRSLAAKTVLAIRVDALGDSQDNTMGLENRAKLEARLRNLEGKDLGRLSGSSKGKPKIEVYNKDKKMGSGGLITPAKTYNTAADSLLGETSAKSEEPSKKKDKKKKKKVEEEKPEEEEPSEKKKKKKAEAETEAVVEVAKEEKKKNKKKRKHEEEETTETPAKKKDKKEKKKKSKD

SEQ ID NO: 43117 - protein, 511 aa, Arabidopsis thaliana
  peptide (1)..(511): Ceres Seq. ID no. 13593400
MANVEDLCKEFDTPDSARKMVKLKAFEKFDNTSEALEAVAKLLEGAPSKGLRKFLKANCQGETLAVADSKLGNVIKEKLKIDCIHNNAVMELLRGVRSQFTELISGLGDQDLAPMSLGLSHSLARYKLKFSSDKVDTMIIQAIGLLDDLDKELNTYAMRVREWYGWHFPELAKIISDNILYAKSVKLMGNRVNAAKLDFSEILADEIEADLKDAAVISMGTEVSDLDLLHIRELCDQVLSLSEYRAQLYDYLKSRMNTIAPNLTALVGELVGARLISHGGSLLNLSKQPGSTVQILGAEKALFRALKTKHATPKYGLIFHASLVGQAAPKHKGKISRSLAAKTVLAIRVDALGDSQDNTMGLENRAKLEARLRNLEGKDLGRLSGSSKGKPKIEVYNKDKKMGSGGLITPAKTYNTAADSLLGETSAKSEEPSKKKDKKKKKKVEEEKPEEEEPSEKKKKKKAEAETEAVVEVAKEEKKKNKKKRKHEEEETTETPAKKKDKKEKKKKSKD

SEQ ID NO: 43118 - protein, 492 aa, Arabidopsis thaliana
  peptide (1)..(492): Ceres Seq. ID no. 13593401
MVKLKAFEKFDNTSEALEAVAKLLEGAPSKGLRKFLKANCQGETLAVADSKLGNVIKEKLKIDCIHNNAVMELLRGVRSQFTELISGLGDQDLAPMSLGLSHSLARYKLKFSSDKVDTMIIQAIGLLDDLDKELNTYAMRVREWYGWHFPELAKIISDNILYAKSVKLMGNRVNAAKLDFSEILADEIEADLKDAAVISMGTEVSDLDLLHIRELCDQVLSLSEYRAQLYDYLKSRMNTIAPNLTALVGELVGARLISHGGSLLNLSKQPGSTVQILGAEKALFRALKTKHATPKYGLIFHASLVGQAAPKHKGKISRSLAAKTVLAIRVDALGDSQDNTMGLENRAKLEARLRNLEGKDLGRLSGSSKGKPKIEVYNKDKKMGSGGLITPAKTYNTAADSLLGETSAKSEEPSKKKDKKKKKKVEEEKPEEEEPSEKKKKKKAEAETEAVVEVAKEEKKKNKKKRKHEEEETTETPAKKKDKKEKKKKSKD

SEQ ID NO: 43119 - DNA, 1262 bp, Arabidopsis thaliana
  misc_feature (1)..(1262): Ceres Seq. ID no. 12331049
  misc_feature (1)..(1262): Ortholog of  Ceres SEQ ID NO 13596090 as cited in SEQ ID NO 68377
aaaaaccttttgacaaaaaccagatattctctcccatttccctcaatcatccaaaccacgcgccgcctctaatctctcacgcgccgcggtccgatttcaatttctccatcccctcttctcgtttattcatcaagatctcacaaaatccaaacttaactatagggtttcaattacttcgatcaaaaggtatctaatttatgaattagtattcatcatcatgggaggtgttacatcatcgatcgctgctaaatttgctttctttccaccaacgccaccgtcgtatgaggttatagccgacgatagctgcggtggacgtttatacataccggagattcctcgccgtgatgatgttgatatattgaagcttcgtactcgttgtggtaatgagatcgttgctgtttatgtgaaacattcaaaagctaatggcacgcttttgtattctcatggtaacgctgctgatttgggtcaaatgtttgagcttttcgttgagcttagcaatcgccttcgcgtcaatcttatggggtatgattactctggttatggtcagtctactggacaggctagcgagtgtaatacatatgctgatatagaggcatcatataaatgcctcaaggaaaagtacggtgtaaaagacgatcaactgatagtatatggtcaatctgttggtagtggacctacggttgatctagcttcacgcacacctaacttaagaggcgtggttttacagtgtcctatcctgtctgggatgagggttttgtatcctgtgaaatgtacatattggtttgacatttacaagaatattgacaagatcggctcagttacctgtcctgtattagtaatccatggtactgcggatgaagtagttgattggtctcacggaaaacggctctgggaactcagcaaagagaagtatgaacctttgtggataagtggaggtggacactgtgaccttgaactctatccagatttcatcagacatctgaagaaatttgttgtatcacttggcaacaaacaagcagagcaagctcccacatagcgagatagctgatatgtttgaaatgggttattttcagagaaggctagacagttggctacagaaagttcaaaagaaagtaataagcctgagagattcaagatgagagtggtaataggtttagtcattaaaagataaaaaaaggtctagtctggtgacacaatgggtcaatctggaatgtaaacagtatagtacatttcgtgaataaatgtattttctgctttcatgc

SEQ ID NO: 43120 - protein, 272 aa, Arabidopsis thaliana
  peptide (1)..(272): Ceres Seq. ID no. 12331050
MGGVTSSIAAKFAFFPPTPPSYEVIADDSCGGRLYIPEIPRRDDVDILKLRTRCGNEIVAVYVKHSKANGTLLYSHGNAADLGQMFELFVELSNRLRVNLMGYDYSGYGQSTGQASECNTYADIEASYKCLKEKYGVKDDQLIVYGQSVGSGPTVDLASRTPNLRGVVLQCPILSGMRVLYPVKCTYWFDIYKNIDKIGSVTCPVLVIHGTADEVVDWSHGKRLWELSKEKYEPLWISGGGHCDLELYPDFIRHLKKFVVSLGNKQAEQAPT

SEQ ID NO: 43121 - protein, 188 aa, Arabidopsis thaliana
  peptide (1)..(188): Ceres Seq. ID no. 12331051
MFELFVELSNRLRVNLMGYDYSGYGQSTGQASECNTYADIEASYKCLKEKYGVKDDQLIVYGQSVGSGPTVDLASRTPNLRGVVLQCPILSGMRVLYPVKCTYWFDIYKNIDKIGSVTCPVLVIHGTADEVVDWSHGKRLWELSKEKYEPLWISGGGHCDLELYPDFIRHLKKFVVSLGNKQAEQAPT

SEQ ID NO: 43122 - protein, 172 aa, Arabidopsis thaliana
  peptide (1)..(172): Ceres Seq. ID no. 12331052
MGYDYSGYGQSTGQASECNTYADIEASYKCLKEKYGVKDDQLIVYGQSVGSGPTVDLASRTPNLRGVVLQCPILSGMRVLYPVKCTYWFDIYKNIDKIGSVTCPVLVIHGTADEVVDWSHGKRLWELSKEKYEPLWISGGGHCDLELYPDFIRHLKKFVVSLGNKQAEQAPT

SEQ ID NO: 43123 - DNA, 1075 bp, Arabidopsis thaliana; identical to SEQ ID NO: 30168
  misc_feature (1)..(1075): Ceres Seq. ID no. 12605070
  misc_feature (1)..(1075): Ortholog of  Ceres SEQ ID NO 14304626 as cited in SEQ ID NO 52955

SEQ ID NO: 43124 - protein, 300 aa, Arabidopsis thaliana; identical to SEQ ID NO: 30169
  peptide (1)..(300): Ceres Seq. ID no. 12605071

SEQ ID NO: 43125 - protein, 265 aa, Arabidopsis thaliana; identical to SEQ ID NO: 30170
  peptide (1)..(265): Ceres Seq. ID no. 12605072

SEQ ID NO: 43126 - DNA, 1710 bp, Arabidopsis thaliana
  misc_feature (1)..(1710): Ceres Seq. ID no. 12603017
  misc_feature (1)..(1710): Ortholog of  Ceres SEQ ID NO 14302255 as cited in SEQ ID NO 65021
aacgctgtgcataagcattctctttctgtggacgaaactaaacctgagagaaaaagccagaagaaccaaactcagaccgagagatagagattgagggagagctctagctctgtagaaaagaaggattcattcatcatatccagaaatggctctaaagtttaaccctttggtggcatctcagccttacaaattcccttcctcgactcgtccgccaactccttctttcagatctcccaagttcctctgcctcgcttcttcttctccggctctcagctccggccccaaggaggttgagagtttgaagaaaccatttacgccacccagggaagtgcatgttcaagtcttgcactccatgccacctcaaaagatcgagatcttcaaatctatggaaaactgggccgaggagaaccttctgattcacctcaaggatgtggagaagtcttggcaaccccaggatttcttgcctgaccctgcatcagatgggtttgaagatcaggtaagagagttaagagagagggctagagagctccctgatgattactttgttgttttggtgggggacatgatcacagaagaagcacttccgacctatcaaactatgttgaacactttggatggagttagggatgaaacaggtgctagtcctacttcatgggctatttggaccagagcttggactgcagaagaaaaccgacatggcgatcttctgaataaatacctttacttgtctggtcgtgttgacatgaggcagatcgaaaagaccattcagtacttgattggatctggaatggatccgcggacagagaataacccctaccttggcttcatctatacgtcattccaagaaagagcgacattcatctctcacggaaacacagcccgccaagccaaagagcacggggacatcaaactagcccaaatatgtggcacaatagctgcagacgagaagcgtcatgaaacagcatacaccaagatagttgaaaagctctttgagattgatcctgatggtactgtcatggcttttgcagacatgatgagaaagaaaatctcaatgcctgctcacttgatgtatgatgggcgcaacgacaacctctttgacaacttctcttccgtggctcagaggctcggtgtttacaccgccaaagactatgcagacattcttgagtttctggttggtaggtggaaaatccaggacttaaccgggctttcaggtgaaggaaacaaagcacaagactatttatgcgggttggctccaaggatcaagagattggatgagagagctcaagcaagagccaagaaaggacccaagattcctttcagttggatacacgacagagaagtgcagctctaaaaggacaaagacaaaaacaaaaacctatcctcccggttcctcatttcatctgtctgctcttaaaattggtgtagattactatggttttctgataatgttggtgggtctagttacaaagttgagatgcagtgatttagtagctttgtttttcccagtcactatatgtttggtctttggtccgttagcacacttgtagtagttaaaacagtttaagtatggtctgtactcagtcttcctcttctctgtggagttttgtttaagttcaggttagttttgttttgtctctctgttttttcccctgtttctcgacaaacaactcatgtggctttttagcaattttgatggatgatcatgatgaa

SEQ ID NO: 43127 - protein, 401 aa, Arabidopsis thaliana
  peptide (1)..(401): Ceres Seq. ID no. 12603018
MALKFNPLVASQPYKFPSSTRPPTPSFRSPKFLCLASSSPALSSGPKEVESLKKPFTPPREVHVQVLHSMPPQKIEIFKSMENWAEENLLIHLKDVEKSWQPQDFLPDPASDGFEDQVRELRERARELPDDYFVVLVGDMITEEALPTYQTMLNTLDGVRDETGASPTSWAIWTRAWTAEENRHGDLLNKYLYLSGRVDMRQIEKTIQYLIGSGMDPRTENNPYLGFIYTSFQERATFISHGNTARQAKEHGDIKLAQICGTIAADEKRHETAYTKIVEKLFEIDPDGTVMAFADMMRKKISMPAHLMYDGRNDNLFDNFSSVAQRLGVYTAKDYADILEFLVGRWKIQDLTGLSGEGNKAQDYLCGLAPRIKRLDERAQARAKKGPKIPFSWIHDREVQL

SEQ ID NO: 43128 - protein, 332 aa, Arabidopsis thaliana
  peptide (1)..(332): Ceres Seq. ID no. 12603019
MPPQKIEIFKSMENWAEENLLIHLKDVEKSWQPQDFLPDPASDGFEDQVRELRERARELPDDYFVVLVGDMITEEALPTYQTMLNTLDGVRDETGASPTSWAIWTRAWTAEENRHGDLLNKYLYLSGRVDMRQIEKTIQYLIGSGMDPRTENNPYLGFIYTSFQERATFISHGNTARQAKEHGDIKLAQICGTIAADEKRHETAYTKIVEKLFEIDPDGTVMAFADMMRKKISMPAHLMYDGRNDNLFDNFSSVAQRLGVYTAKDYADILEFLVGRWKIQDLTGLSGEGNKAQDYLCGLAPRIKRLDERAQARAKKGPKIPFSWIHDREVQL

SEQ ID NO: 43129 - protein, 321 aa, Arabidopsis thaliana
  peptide (1)..(321): Ceres Seq. ID no. 12603020
MENWAEENLLIHLKDVEKSWQPQDFLPDPASDGFEDQVRELRERARELPDDYFVVLVGDMITEEALPTYQTMLNTLDGVRDETGASPTSWAIWTRAWTAEENRHGDLLNKYLYLSGRVDMRQIEKTIQYLIGSGMDPRTENNPYLGFIYTSFQERATFISHGNTARQAKEHGDIKLAQICGTIAADEKRHETAYTKIVEKLFEIDPDGTVMAFADMMRKKISMPAHLMYDGRNDNLFDNFSSVAQRLGVYTAKDYADILEFLVGRWKIQDLTGLSGEGNKAQDYLCGLAPRIKRLDERAQARAKKGPKIPFSWIHDREVQL

SEQ ID NO: 43130 - DNA, 621 bp, Arabidopsis thaliana
  misc_feature (1)..(621): Ceres Seq. ID no. 13488277
  misc_feature (1)..(621): Ortholog of  Ceres SEQ ID NO 13598157 as cited in SEQ ID NO 61570
acacaacacatcaaaagcttgataaagagagagtttttagggttttcttgtacctattataagaaatactctaactgaaactttacttcttcatcaatggcttattctaaggttgcccttctcctcgtcttcaatgtcatcttcttcactttcgtcagctcgacttcggtcccttgtccaccaccaccgcccaagagctaccacaagaagcccgcaacgccatctcttaaacccacttgtaaagacgctcttaaacttaaggtatgtgctaacgtgttggatgtggttaaggtttctctaccaccaacgtccaactgttgcgctcttatcaaaggtctagttgatcttgaagccgcggtctgtctttgcactgccctaaaggctaatgttcttggtatcaaccttaatgttcccatttctttgaacgttgtcctaaaccattgtggtaagaaggttccatctggtttcaaatgtgcctagagattacacattttaaattgaggttctatataccatatttcattcttgtttttcaaattccgcgtttgatgatatctttatctattgttgtaatttgttatatgtttcatatatcaatgaaataaagtgtttcctttttcg

SEQ ID NO: 43131 - protein, 127 aa, Arabidopsis thaliana
  peptide (1)..(127): Ceres Seq. ID no. 13488278
MAYSKVALLLVFNVIFFTFVSSTSVPCPPPPPKSYHKKPATPSLKPTCKDALKLKVCANVLDVVKVSLPPTSNCCALIKGLVDLEAAVCLCTALKANVLGINLNVPISLNVVLNHCGKKVPSGFKCA

SEQ ID NO: 43132 - protein, 68 aa, Arabidopsis thaliana
  peptide (1)..(68): Ceres Seq. ID no. 13488279
MSSSSLSSARLRSLVHHHRPRATTRSPQRHLLNPLVKTLLNLRYVLTCWMWLRFLYHQRPTVALLSKV

SEQ ID NO: 43133 - DNA, 1167 bp, Arabidopsis thaliana
  misc_feature (1)..(1167): Ceres Seq. ID no. 12394595
  misc_feature (1)..(1167): Ortholog of  Ceres SEQ ID NO 13594655 as cited in SEQ ID NO 51843
  misc_feature (1)..(1167): Ortholog of  Ceres SEQ ID NO 13637562 as cited in SEQ ID NO 53674
  misc_feature (1)..(1167): Ortholog of  Ceres SEQ ID NO 13595851 as cited in SEQ ID NO 56559
  misc_feature (1)..(1167): Ortholog of  Ceres SEQ ID NO 15173454 as cited in SEQ ID NO 57898
  misc_feature (1)..(1167): Ortholog of  Ceres SEQ ID NO 13598755 as cited in SEQ ID NO 69032
acagaatcagatctttgtatcgtcaatggctccttcttttatgtaaggatctatgttcttatccggaatttagagtctttattgagtttgatcgattttgggattataagtttcgcaaaattcatgttttttacattaagtctattcgatttcagctgtattgggaatttaagtttttctgtggcttgattctattgagacagttttgtagaagatcgtccagctccgcttgatgctacttctgatccaccgtctctcttcgacggaaccacaaggttgtacacaagctacgtttgcccatttgctcaacgagtttggatcactcgtaacttcaagggtttgcaagaaaagattaaacttgttcctttggatcttgggaataggcctgcttggtacaaggagaaagtatatctagagaacaaggtgccagcgcttgagcacaatggaaaaatcattggggagagtctggatttgattaaatatcttgataacacttttgaagggccttctctttaccccgaggatcatgcaaaaagagagtttggcgacgagttgctcaagtatactgatactttcgttaaaactatgtatgtgtctctcaaaggagacccctctaaagaaaccgcacctgtgttagattatctggaaaatgctctgtataagttcgatgacgggccgttcttcctcggtcagttaagcttggttgatatcgcttatatcccgttcattgaaaggttccaaactgtactcgatgaattatttaagtgcgacattactgccgaacgtcccaaactatcggcatggattgaggaaattaacaagagcgatggctatgcacagacgaaaatggatcctaaggagattgtggaggttttcaagaaaaaattcatgtaactgtaagcaagcacgaagcagtaaagtgtatgagaccaaaccaccttgtacgaacaggtggtctttggatatgaagaaataagatgtgtacttgaacctgatgatgcaataagatttgtactttacatgatgcagcaacagcttaatctgtattctagtgttgatcaaattatcaaccattgacattgttaatatattactgtatgatagtaatactatcaaaatctcacacattaagaaccagatgatgcaataaggataaggtgtatagtc

SEQ ID NO: 43134 - protein, 102 aa, Arabidopsis thaliana
  peptide (1)..(102): Ceres Seq. ID no. 12394596
MYVSLKGDPSKETAPVLDYLENALYKFDDGPFFLGQLSLVDIAYIPFIERFQTVLDELFKCDITAERPKLSAWIEEINKSDGYAQTKMDPKEIVEVFKKKFM

SEQ ID NO: 43135 - protein, 76 aa, Arabidopsis thaliana
  peptide (1)..(76): Ceres Seq. ID no. 12394597
RIRSLYRQWLLLLCKDLCSYPEFRVFIEFDRFWDYKFRKIHVFYIKSIRFQLYWEFKFFCGLILLRQFCRRSSSSA

SEQ ID NO: 43136 - protein, 74 aa, Arabidopsis thaliana
  peptide (1)..(74): Ceres Seq. ID no. 12394598
MNYLSATLLPNVPNYRHGLRKLTRAMAMHRRKWILRRLWRFSRKNSCNCKQARSSKVYETKPPCTNRWSLDMKK

SEQ ID NO: 43137 - DNA, 811 bp, Arabidopsis thaliana; identical to SEQ ID NO: 36378
  misc_feature (1)..(811): Ceres Seq. ID no. 12579903
  misc_feature (1)..(811): Ortholog of  Ceres SEQ ID NO 12626028 as cited in SEQ ID NO 69063

SEQ ID NO: 43138 - protein, 213 aa, Arabidopsis thaliana; identical to SEQ ID NO: 36379
  peptide (1)..(213): Ceres Seq. ID no. 12579904

SEQ ID NO: 43139 - protein, 190 aa, Arabidopsis thaliana; identical to SEQ ID NO: 36380
  peptide (1)..(190): Ceres Seq. ID no. 12579905

SEQ ID NO: 43140 - protein, 161 aa, Arabidopsis thaliana; identical to SEQ ID NO: 36381
  peptide (1)..(161): Ceres Seq. ID no. 12579906

SEQ ID NO: 43141 - DNA, 1945 bp, Arabidopsis thaliana
  misc_feature (1)..(1945): Ceres Seq. ID no. 12370319
  misc_feature (1)..(1945): Ortholog of  Ceres SEQ ID NO 12623695 as cited in SEQ ID NO 61286
tttttttccccattttcttactctcttgccctttcttctctcactctccggcgactgttacgagtttttaacacttccgtcgtcttctcagttgttgttgttgtttatgacaagatcttgttctatccattaaaaccaaagaaatggaggaaggtcataaagaaccattggtgctaagagttgaaggatcacattgttctttatcagagatggatgattttgatctaactcgggctttagagaagccgaggcagctaaagatcgaacggaagagatcgtttgacgaaaggtcgatgagcgagttatcgactggctatgtaagacaagatagcattttagaaatggctcattctccgaagtaggtcaatggtggacactcctctctctgttaggaactctttcgagcctcatccgatggttgctgaggcttgggaagctttgagaaggtcaatggtgttctttcgtgggtcaacccgttggtaccattgcagcttatgaccatgcctccgaggaggtcttgaactatgatcaggtgtttgtacgtgactttgtaccaagtgcattggcgtttctgatgaatggagagcccgatatagtgaaaaacttcttgctcaagacacttcagcttcaaggttgggagaaacgggttgaccggttcaagcttggggaaggcgttatgccagcgagtttcaaggtgcttcatgatccagttcgtaaaaccgacacaattattgcggattttggagaaagcgctataggaagagtagcaccggtggattcaggattctggtggatcatacttctccgtgcttacacgaaatctacgggagatttgactttatctgagacaccagagtgtcagaggggaatgaggcttatactctctctttgcttatccgaaggttttgatactttccctacgcttctttgtgctgacggttgttctatggttgataggagaatgggtgtttatggatatccaatagagattcaagctctgtttttcatggcattgagatgcgccttgtcgatgcttaaaccagacgaggaaggtcgagatttcatagaaaggattgtgaagagacttcacgcgctgagtttccatatgcgcagttacttttggcttgactttcaacaactcaacgatatctataggtacaagacagaggagtactcacacaccgcggtgaacaagttcaacgtgatgccggactcgataccagactgggttttcgactttatgcctctccgtggaggatattttgtcggcaatgtaagcccggcccgtatggatttcaggtggttttccttaggaaattgtgtctccatcctttcttccttggcaactccggatcagtcaatggctattatggacctcctcgagcaccgttgggaggagctagtaggcgagatgccgctcaagatatgttacccttgcatcgaaagccacgagtggcggattgttaccggttgtgatcctaaaaacacgaggtggagttaccacaacggtggatcttggccagtattgctgtggacgctgacggaggcatgcatcaagactggacggcctcaaatagcgagacgtgcgattgatctaattgaatcacggctacaccgagattgctggccggaatactatgatggtaagcaaggaaggtacgttggaaaacaagcaaggaagtaccagacttggtcaatcgcgggttacttggttgcgaaaatgatgcttgaagatccttcacatattggaatgatctctcttgaagaagacaaacagatgaaacctgttatcaagagatctgcttcatggacttgctgaattttgtttcttgttttgtattataatgtcatttgattaagcattcaaaagacctttaatcagcgagagagtagttctgtttgtatttctctttgatccaactatggtttattttcacttgaggct

SEQ ID NO: 43142 - protein, 414 aa, Arabidopsis thaliana
  peptide (1)..(414): Ceres Seq. ID no. 12370320
MNGEPDIVKNFLLKTLQLQGWEKRVDRFKLGEGVMPASFKVLHDPVRKTDTIIADFGESAIGRVAPVDSGFWWIILLRAYTKSTGDLTLSETPECQRGMRLILSLCLSEGFDTFPTLLCADGCSMVDRRMGVYGYPIEIQALFFMALRCALSMLKPDEEGRDFIERIVKRLHALSFHMRSYFWLDFQQLNDIYRYKTEEYSHTAVNKFNVMPDSIPDWVFDFMPLRGGYFVGNVSPARMDFRWFSLGNCVSILSSLATPDQSMAIMDLLEHRWEELVGEMPLKICYPCIESHEWRIVTGCDPKNTRWSYHNGGSWPVLLWTLTEACIKTGRPQIARRAIDLIESRLHRDCWPEYYDGKQGRYVGKQARKYQTWSIAGYLVAKMMLEDPSHIGMISLEEDKQMKPVIKRSASWTC

SEQ ID NO: 43143 - protein, 380 aa, Arabidopsis thaliana
  peptide (1)..(380): Ceres Seq. ID no. 12370321
MPASFKVLHDPVRKTDTIIADFGESAIGRVAPVDSGFWWIILLRAYTKSTGDLTLSETPECQRGMRLILSLCLSEGFDTFPTLLCADGCSMVDRRMGVYGYPIEIQALFFMALRCALSMLKPDEEGRDFIERIVKRLHALSFHMRSYFWLDFQQLNDIYRYKTEEYSHTAVNKFNVMPDSIPDWVFDFMPLRGGYFVGNVSPARMDFRWFSLGNCVSILSSLATPDQSMAIMDLLEHRWEELVGEMPLKICYPCIESHEWRIVTGCDPKNTRWSYHNGGSWPVLLWTLTEACIKTGRPQIARRAIDLIESRLHRDCWPEYYDGKQGRYVGKQARKYQTWSIAGYLVAKMMLEDPSHIGMISLEEDKQMKPVIKRSASWTC

SEQ ID NO: 43144 - protein, 316 aa, Arabidopsis thaliana
  peptide (1)..(316): Ceres Seq. ID no. 12370322
MRLILSLCLSEGFDTFPTLLCADGCSMVDRRMGVYGYPIEIQALFFMALRCALSMLKPDEEGRDFIERIVKRLHALSFHMRSYFWLDFQQLNDIYRYKTEEYSHTAVNKFNVMPDSIPDWVFDFMPLRGGYFVGNVSPARMDFRWFSLGNCVSILSSLATPDQSMAIMDLLEHRWEELVGEMPLKICYPCIESHEWRIVTGCDPKNTRWSYHNGGSWPVLLWTLTEACIKTGRPQIARRAIDLIESRLHRDCWPEYYDGKQGRYVGKQARKYQTWSIAGYLVAKMMLEDPSHIGMISLEEDKQMKPVIKRSASWTC

SEQ ID NO: 43145 - DNA, 1216 bp, Arabidopsis thaliana
  misc_feature (1)..(1216): Ceres Seq. ID no. 12330754
  misc_feature (1)..(1216): Ortholog of  Ceres SEQ ID NO 14314331 as cited in SEQ ID NO 57390
atcaccggcgatataggtttacgcgtcggagagatggttgagagagaggaccgagtttctttggaactcagcgaagaaattatacagagcatggaacctggcgccgttttcagagactataattgcaggatcagctcaattgactttcacaaaacttcgacttgtatggtgacagctagcgacgatgactcaattcgtctctatgatgttgccagcgccacatgtctgaagacaattaatagcaaaaagtatggtgttgatcttgtttgcttcacttctcatcctactactgtcatctactcttccagaaacggatgggacgactctctgaggcttctctctttgcacgataataagtacttgcgctacttcaaaggacatcatgacagagttgtttcgcttagcttgtgttctggtggggaatgcttcatctccggttcccttgatcgtactgttttgctttgggatcaaagggtcgagaaatgccagggtctcttacgagtccaaggaaggcctgctgcagcatatgatgatcaagggttaatttttgcaattgcctttggtggctacataagaatgtttgatgcccgtatgtacgaaaagggtccttttgaaatattttccgttggtggtgatctttctgaggcaaacgttgtgaaatttagtaatgatggaaggctcatgctgcttacaaccatggatggttttattcatgtgcttgactcgtttcgtggaactcttctgtccacatttagtgtgaaaccagtagctggagaatctacattggatgcagcctttagtcctgaagggatgtttgttgtttcaggttcaggtgatggtagtacccatgcatggggtgtaaggagcggaaaacaggtacatagttggatgggtttagggagtgagcccccagtcattaaatggggtccaggaagtcccatgtttgtgacaggctcttccgaacttgcttttgttatacccgacttatcgaaattgccagcttatgccattcggaaataggacgactatcacgtctgtgccatgtaaatgaggcctcatttggccttttggtttcagactttgttgtgggttatgccggtaacttatcccttgcactctgattaatatatatttgggtcttgtaacatgaagataaaccccaagtctttctaatgttgtaattcgtgtaatttacaagtttgactgtttctgactg

SEQ ID NO: 43146 - protein, 339 aa, Arabidopsis thaliana
  peptide (1)..(339): Ceres Seq. ID no. 12330755
ITGDIGLRVGEMVEREDRVSLELSEEIIQSMEPGAVFRDYNCRISSIDFHKTSTCMVTASDDDSIRLYDVASATCLKTINSKKYGVDLVCFTSHPTTVIYSSRNGWDDSLRLLSLHDNKYLRYFKGHHDRVVSLSLCSGGECFISGSLDRTVLLWDQRVEKCQGLLRVQGRPAAAYDDQGLIFAIAFGGYIRMFDARMYEKGPFEIFSVGGDLSEANVVKFSNDGRLMLLTTMDGFIHVLDSFRGTLLSTFSVKPVAGESTLDAAFSPEGMFVVSGSGDGSTHAWGVRSGKQVHSWMGLGSEPPVIKWGPGSPMFVTGSSELAFVIPDLSKLPAYAIRK

SEQ ID NO: 43147 - protein, 328 aa, Arabidopsis thaliana
  peptide (1)..(328): Ceres Seq. ID no. 12330756
MVEREDRVSLELSEEIIQSMEPGAVFRDYNCRISSIDFHKTSTCMVTASDDDSIRLYDVASATCLKTINSKKYGVDLVCFTSHPTTVIYSSRNGWDDSLRLLSLHDNKYLRYFKGHHDRVVSLSLCSGGECFISGSLDRTVLLWDQRVEKCQGLLRVQGRPAAAYDDQGLIFAIAFGGYIRMFDARMYEKGPFEIFSVGGDLSEANVVKFSNDGRLMLLTTMDGFIHVLDSFRGTLLSTFSVKPVAGESTLDAAFSPEGMFVVSGSGDGSTHAWGVRSGKQVHSWMGLGSEPPVIKWGPGSPMFVTGSSELAFVIPDLSKLPAYAIRK

SEQ ID NO: 43148 - protein, 309 aa, Arabidopsis thaliana; identical to SEQ ID NO: 28628
  peptide (1)..(309): Ceres Seq. ID no. 12330757

SEQ ID NO: 43149 - DNA, 1299 bp, Arabidopsis thaliana
  misc_feature (1)..(1299): Ceres Seq. ID no. 13497229
  misc_feature (1)..(1299): Ortholog of  Ceres SEQ ID NO 14311014 as cited in SEQ ID NO 53606
acgcgtaccggacccataacagtataagtgaatttggataagaaaggagccgcctagagagaagaaggcgatccatggcggaatctgtcttctcttgtataccagaagacgtagtcttcaacatcttcttcaagctccaagatgatccaagaaactgggctcgtctcgcttgcgtctgcaccaaattctcctcaattgttcgaaacgtttgttgtaaaactcagtgctactccgctatccccaccgtcatctccgatctcctccctcttcctccctccgccgccgcatccgcttcttcatccaccgcggcggattcgtctcttactcctcccggtggttgggcttctttatacaaactcgctgtttgttgtcctggtctcttccacgctggaattctcctcgaaaactccgatttcggtttagaacgtgagctaggtcccgatcaaaacctcgatccgaaacctactacgacggatctagctcttaacgacgaagaagtttcgaaaccagttggatctggtttagaaacgacttcgttttggtctctatatgatgatctctacacagatactattcccgctcctcctcccgaagattcaatcgacgatcaagaagaagaaatcgaaacgagtgagatcagacctggacgagatcttccggtaaggaaacgaaggaagatttgtcgatctctaggatctcatttagcttccggtggctggaaccttagccgtgaacaaggcaacaagcttctcgcgagtagattccgaggtgattgtctctacatttgcaattggcctgggtgtattcacgtagaagagaaacgaaattacatgttgtttagaggagtcttcaaggatttcaaaaggtctagagtttggagaacgataaacgacggtaatcggagtaagacctcgggtttgaaatgcgcgttttgtttgtgcgatgagacttgggatttgcattcatcgttttgtttgagaagagtgtttgggtttcatgatgatggtgaaccagttgtgagagcttatgtttgtgagaatggtcatgtctctggtgcttggactgctttacctctctacacttgatagctcactagagaggacaggtctttcattcttcttccacggtctcaagtctcaatcttgtttgatgtatttgtaggaatagtgtcattgtgtttcaaattctggttaatgtttaagtaatggttgaagaaaattggctcaacatattgtggttgttttgtttcaatgttgacaacatattagacttcgattcaaatgcataaactcttacgtc

SEQ ID NO: 43150 - protein, 336 aa, Arabidopsis thaliana
  peptide (1)..(336): Ceres Seq. ID no. 13497230
MAESVFSCIPEDVVFNIFFKLQDDPRNWARLACVCTKFSSIVRNVCCKTQCYSAIPTVISDLLPLPPSAAASASSSTAADSSLTPPGGWASLYKLAVCCPGLFHAGILLENSDFGLERELGPDQNLDPKPTTTDLALNDEEVSKPVGSGLETTSFWSLYDDLYTDTIPAPPPEDSIDDQEEEIETSEIRPGRDLPVRKRRKICRSLGSHLASGGWNLSREQGNKLLASRFRGDCLYICNWPGCIHVEEKRNYMLFRGVFKDFKRSRVWRTINDGNRSKTSGLKCAFCLCDETWDLHSSFCLRRVFGFHDDGEPVVRAYVCENGHVSGAWTALPLYT

SEQ ID NO: 43151 - DNA, 1511 bp, Arabidopsis thaliana
  misc_feature (1)..(1511): Ceres Seq. ID no. 13593318
  misc_feature (1)..(1511): Ortholog of  Ceres SEQ ID NO 15170447 as cited in SEQ ID NO 52849
  misc_feature (1)..(1511): Ortholog of  Ceres SEQ ID NO 14302887 as cited in SEQ ID NO 66146
aactttagttcaaaaaacttgagaatatccgactacaaagatacgacctttcaatacaaaatcagatcatcgtcgtgtgtttaactttaacgaatctaggttttattgaatctcgacatgtcggaggagaaagtcgtcgctgtgatcatggttggtggtccgaccaaaggaactcgatttcgcccgttatcgttcaatacaccgaaaccattgattcctttggctggtcaacctatgattcatcatcctatctctgcttgtaaaaagatatcaaatctggctcagatttttctgattggattttacgaggaacgagaatttgctttgtatgtgtcttcaatatctaacgagctgaaaattccagtgcgatacttgaaagaagataaaccccatggttcagctggtgctctttattactttcgtgatagaattatggaagagaaaccgtcacatgttttcctcctcaactgtgatgtttgctgttctttccctcttcaaggcatacttgatgcacatcgaagatatggtggtattggaactatgctagtcatcaaggtttctgcagaagcagctagccaatttggagaattgatagctgatcctgatactaaagaactcctgcattatacagagaagcccgagactttcgtcagtgacttgataaactgtggtgtctatgtgcttacctcagatatcttcaatgccattgaagaagtatatagccaaataagagacacatctagcaactaccaatccgctacaaggtctgttcctgcagattttgtgagattagatcaagatatattgtcacctcttgctggaaagaagcaactatacacatatgagaacaaggatttctgggaacagatcaagactccggggaaatctttgaaatgctcggctttatatctctcccaattccgcgaaacatcgcctcatattttagcttcaggagatggtactaataggaaaccgaatataattggtgatgtttatattcacccatccgtaaaactgcatccaactgcaaagatcggtccaaatgtgtcgatatcagcaaatgttcgtgttggacctggtgtaaggcttattagctgcataatcttagacgatgttgaaatcaaggagaatgctgttgttataaactcaatcatcggatggaaatcatctataggtagatggtcaagagttcaagctagtggagattacaatgacaggcttgggattaccattcttggtgaggctgtaactgtggaagatgaagttgcagtcataggaagcattgttctccagaataagactcttaatgttagtgttcaagatgatatcatcttgtgatttatcacaatgattatcgtttggatatttctctttttaaccgaaacagaaaaagaattacagaattgtgtctttcatgaattgagttcacaggattagattttgagttagtggaactatggaagatttgtaaactctcattgtactttttttttagatactagaaatatttt

SEQ ID NO: 43152 - protein, 406 aa, Arabidopsis thaliana
  peptide (1)..(406): Ceres Seq. ID no. 13593319
MSEEKVVAVIMVGGPTKGTRFRPLSFNTPKPLIPLAGQPMIHHPISACKKISNLAQIFLIGFYEEREFALYVSSISNELKIPVRYLKEDKPHGSAGALYYFRDRIMEEKPSHVFLLNCDVCCSFPLQGILDAHRRYGGIGTMLVIKVSAEAASQFGELIADPDTKELLHYTEKPETFVSDLINCGVYVLTSDIFNAIEEVYSQIRDTSSNYQSATRSVPADFVRLDQDILSPLAGKKQLYTYENKDFWEQIKTPGKSLKCSALYLSQFRETSPHILASGDGTNRKPNIIGDVYIHPSVKLHPTAKIGPNVSISANVRVGPGVRLISCIILDDVEIKENAVVINSIIGWKSSIGRWSRVQASGDYNDRLGITILGEAVTVEDEVAVIGSIVLQNKTLNVSVQDDIIL

SEQ ID NO: 43153 - protein, 396 aa, Arabidopsis thaliana
  peptide (1)..(396): Ceres Seq. ID no. 13593320
MVGGPTKGTRFRPLSFNTPKPLIPLAGQPMIHHPISACKKISNLAQIFLIGFYEEREFALYVSSISNELKIPVRYLKEDKPHGSAGALYYFRDRIMEEKPSHVFLLNCDVCCSFPLQGILDAHRRYGGIGTMLVIKVSAEAASQFGELIADPDTKELLHYTEKPETFVSDLINCGVYVLTSDIFNAIEEVYSQIRDTSSNYQSATRSVPADFVRLDQDILSPLAGKKQLYTYENKDFWEQIKTPGKSLKCSALYLSQFRETSPHILASGDGTNRKPNIIGDVYIHPSVKLHPTAKIGPNVSISANVRVGPGVRLISCIILDDVEIKENAVVINSIIGWKSSIGRWSRVQASGDYNDRLGITILGEAVTVEDEVAVIGSIVLQNKTLNVSVQDDIIL

SEQ ID NO: 43154 - protein, 367 aa, Arabidopsis thaliana
  peptide (1)..(367): Ceres Seq. ID no. 13593321
MIHHPISACKKISNLAQIFLIGFYEEREFALYVSSISNELKIPVRYLKEDKPHGSAGALYYFRDRIMEEKPSHVFLLNCDVCCSFPLQGILDAHRRYGGIGTMLVIKVSAEAASQFGELIADPDTKELLHYTEKPETFVSDLINCGVYVLTSDIFNAIEEVYSQIRDTSSNYQSATRSVPADFVRLDQDILSPLAGKKQLYTYENKDFWEQIKTPGKSLKCSALYLSQFRETSPHILASGDGTNRKPNIIGDVYIHPSVKLHPTAKIGPNVSISANVRVGPGVRLISCIILDDVEIKENAVVINSIIGWKSSIGRWSRVQASGDYNDRLGITILGEAVTVEDEVAVIGSIVLQNKTLNVSVQDDIIL

SEQ ID NO: 43155 - DNA, 1479 bp, Arabidopsis thaliana
  misc_feature (1)..(1479): Ceres Seq. ID no. 13487785
  misc_feature (1)..(1479): Ortholog of  Ceres SEQ ID NO 14304871 as cited in SEQ ID NO 54194
ataacacttccaattcaaaggaagacaacataaactcttattctctacctgtcctctcttctctgcaactcggccatggggaagaagcttgacgctttgcttggtcgcagtttcaagaccaacaagttcaagtctcttatcaccttagctctcacaaggctctctattctcaagaaccagcgtcaagccagactctctcaagccatctctgatgtcaccgagcttcttaagctcggccaacatgagcacgcttaccatagagtcgatcaagtcgtcaaagaccaaaacactctcgacgttctcttcttcatccatggctacttcactctctgtctcgatcgtattcacctctttgaacacaacagagattgtcctgaagagcttctagaagctgtttcgggtttgctatttgcagcttctagaatcggtgaattccctgagcttcaagagattcgtaatgttttgatttcgcgttttggcaaagatctcgcggctcggtctattgagttgcgcagtaattgtggggttgatcccaaaataattcagaagttgtcgacaagacctccaccgaaagaagttagaatgaaggctttgaaggagattgctgcagagaataacattgttctgaaactagaccaagcttctacgtccactgagggaacaacaaatatgcagggaacatcagatgttagtaagactaagctaacaagtaaagatggcagaggagaaggttatggtttatctgattcggtcaagagaggaaagaagaagtacaaagatgtggctgatgctgcacaagcagcgtttgagtcagcagctcatgcagcagaggctgcacaagcggctgtggagctttctcagttttctcctcgtggacatgacagtccgggtaacattggtggggaaaattcatttcatggttctgaaaacaaagagtcagaacaagaacaagaaggtaatgatgattcttcagaaggggaaggggatgtgatgtcagaatctaaaaggtcgatgtcagattcagaagatattattgatgtcccagtgatgtcattcagagaagaccctgtgaagctattggagaaggatactattatctacgatagtgaagaagaaacccaacctagtgttgagactattactattagtaagtctaaagatgagcaaaatcgtatggttggttcgaatagagcggatacaagacatgtggaccacatggttcgttcaattgaagatcctattatgcgtaaagcaggtttgaagggtccagtttcagtcaggacaagacaggttcgtggatactaagtacaaatgttataagtttttcaggtgcatctacggtgtaatcactcagttttgtacttttctatgttctttttgtggtcaaagatgtaagattattgtgttctttatggatataagctttcaatgatgttgtacagttgcatatgtgtgtgtttatacaagaaacgtttctag

SEQ ID NO: 43156 - protein, 409 aa, Arabidopsis thaliana
  peptide (1)..(409): Ceres Seq. ID no. 13487786
MGKKLDALLGRSFKTNKFKSLITLALTRLSILKNQRQARLSQAISDVTELLKLGQHEHAYHRVDQVVKDQNTLDVLFFIHGYFTLCLDRIHLFEHNRDCPEELLEAVSGLLFAASRIGEFPELQEIRNVLISRFGKDLAARSIELRSNCGVDPKIIQKLSTRPPPKEVRMKALKEIAAENNIVLKLDQASTSTEGTTNMQGTSDVSKTKLTSKDGRGEGYGLSDSVKRGKKKYKDVADAAQAAFESAAHAAEAAQAAVELSQFSPRGHDSPGNIGGENSFHGSENKESEQEQEGNDDSSEGEGDVMSESKRSMSDSEDIIDVPVMSFREDPVKLLEKDTIIYDSEEETQPSVETITISKSKDEQNRMVGSNRADTRHVDHMVRSIEDPIMRKAGLKGPVSVRTRQVRGY

SEQ ID NO: 43157 - protein, 240 aa, Arabidopsis thaliana
  peptide (1)..(240): Ceres Seq. ID no. 13487787
MKALKEIAAENNIVLKLDQASTSTEGTTNMQGTSDVSKTKLTSKDGRGEGYGLSDSVKRGKKKYKDVADAAQAAFESAAHAAEAAQAAVELSQFSPRGHDSPGNIGGENSFHGSENKESEQEQEGNDDSSEGEGDVMSESKRSMSDSEDIIDVPVMSFREDPVKLLEKDTIIYDSEEETQPSVETITISKSKDEQNRMVGSNRADTRHVDHMVRSIEDPIMRKAGLKGPVSVRTRQVRGY

SEQ ID NO: 43158 - protein, 211 aa, Arabidopsis thaliana
  peptide (1)..(211): Ceres Seq. ID no. 13487788
MQGTSDVSKTKLTSKDGRGEGYGLSDSVKRGKKKYKDVADAAQAAFESAAHAAEAAQAAVELSQFSPRGHDSPGNIGGENSFHGSENKESEQEQEGNDDSSEGEGDVMSESKRSMSDSEDIIDVPVMSFREDPVKLLEKDTIIYDSEEETQPSVETITISKSKDEQNRMVGSNRADTRHVDHMVRSIEDPIMRKAGLKGPVSVRTRQVRGY

SEQ ID NO: 43159 - DNA, 1453 bp, Arabidopsis thaliana
  misc_feature (1)..(1453): Ceres Seq. ID no. 12394670
  misc_feature (1)..(1453): Ortholog of  Ceres SEQ ID NO 13654928 as cited in SEQ ID NO 62546
ctgggtgaaacatagaaaagtttctcttgctcaagttaatgataaaagggtgagagcaataaacgctgataagccttgtctggtccttggaattttgaattttctttttctatcttacttatagtattggtagttgagggtgtcgtcgataagttgttgtaggatttgttgctctggctctggtggtaggtctatgaaatcaacccatatcgtgaatggactgcaacatggtatcttcgtcccagtgggattgggagcatttgatcatgtccaatccgtcaaggactgaagatgacagcaaacagctacctactgagtgggaaattgaaaaaggtgaaggaattgaatctatagttccacatttctcaggccttgagagagtcagtagtggctctgccaccagcttctggcacactgctgtatcgaaaagctcacagtcgacctctatcaactcatcatctcccgaagccaaacgatgcaagcttgcatcagaaagttcccctggagattcttgcagcaacatagactttgtccaggtgaaggctcccacagctctcgaggtatccgttgcctcagctgaatcagatctttgtttaaaactaggaaagcggacatactctgaagaatactggggtagaaacaataatgaaatttcagcggtttctatgaagttgttaactccatctgttgtcgctgggaaatccaaattgtgtggtcagagcatgccagtcccgcgttgccaaattgatggctgtgaactggatctctcatctgctaagggttatcatcgtaagcacaaagtctgcgaaaagcattcaaagtgcccgaaagttagcgtgagtggcctggaacgtcggttctgccaacagtgtagcaggttccatgctgtctctgaatttgatgagaagaaacgaagctgccgaaaacgtctttctcatcataatgcgaggcgtcgtaagccacaaggagtattttcaatgaatcccgagagggtgtatgatcgaagacagcatacaaatatgttgtggaatggggtgtcccttaacgcgagatctgaagaaatgtatgaatggggtaataacacttatgatacaaagcctagacaaacggaaaaaagctttactctgagcttccagagaggtaatggctctgaggaccagctggttgctagtagcagccgtatgttctctacatctcaaacctcaggtgggttcccagcaggaaagtccaagtttcaacttcatggcgaagatgtgggagaatactcaggagtcctccatgaatctcaagatatccaccgtgctctctctcttctgtcaacctcttcggatcccctggcccaaccacatgtgcagccattttctctactctgttcatatgatgttgtaccaaaatagatgagtaagtaatgtgtaatttgtaaacctgttactcagttggtggatacttttcc

SEQ ID NO: 43160 - protein, 393 aa, Arabidopsis thaliana; identical to SEQ ID NO: 24209
  peptide (1)..(393): Ceres Seq. ID no. 12394671

SEQ ID NO: 43161 - protein, 389 aa, Arabidopsis thaliana; identical to SEQ ID NO: 24210
  peptide (1)..(389): Ceres Seq. ID no. 12394672

SEQ ID NO: 43162 - protein, 376 aa, Arabidopsis thaliana; identical to SEQ ID NO: 24211
  peptide (1)..(376): Ceres Seq. ID no. 12394673

SEQ ID NO: 43163 - DNA, 1614 bp, Arabidopsis thaliana
  misc_feature (1)..(1614): Ceres Seq. ID no. 12602150
  misc_feature (1)..(1614): Ortholog of  Ceres SEQ ID NO 15171297 as cited in SEQ ID NO 51458
atgattagcttaagctccttcatcttcttctccaattcccgggttttttcttcttcctccgataaccggaaaattcacctctatcgaatttcccaagcatcttgatccaccaagttcatcttaaaatttcttctctttttctcaattgaagaaggtgaagcagccaacaagttactgcaactgtttccacgatttttgcttttttcaagattctcgccgtcgggagttttctcggtgagatcatttcgctccgacggaaaattcaagttgcatatctgatcggagattgaaaagtgttggttcacgcagtatcgattcgtttgtttttgatgccagatctgatatattacttcaccgaagattcaggaactctttcttaggttgaattagcttgagtttagcttcgaattttatctttgatctagctaaagaaacagagagttttcagaggaagaagaaacagagagttttcagaggaagaagaaacagagagtagtgatgacatcagggacgagaatgccgacatggagggaaagagagaacaacaagagaagagaaagacgacggagagcaatcgcagctaagatcttcaccggattaagaatgtacggtaattacgagcttccgaagcattgcgacaacaacgaagtgcttaaagcactctgtaacgaagctggttggatcgtcgaacctgatggaactacttaccgcaagggatgtagtagacctgtagagcgtatggagataggtggtggttcagcaaccgctagtccttgctcttcctatcagccaagtccctgtgcttcttataatcctagtccaggctcctccaacttcatgagtcctgcttcatcctcatttgctaatcttacctctggtgatggccaatctctcatcccatggctaaaacacctctcaacaacatcatcctcatcagcttcttcatcatcaagactccctaattacctctatatccctggaggctccataagcgctcctgtaactcctcctttaagctctccaacagctcgtaccccgagaatgaacactgattggcagcaactcaacaactccttctttgtctcctcaacaccgccaagtcccacgcgtcagatcatccctgactctgaatggttctcagggattcaactagcacaaagtgttccagcttcaccaacgtttagcctcgtctcacaaaacccatttggattcaaagaagaagcagcctctgctgctggaggcggaggagggtcaaggatgtggacaccaggtcaaagcggaacctgctcccctgctattcctcctggtgctgaccagacagcagatgttccaatgtctgaagccgtggctcctccagagtttgcttttgggagtaatacaaacgggctagtgaaagcatgggaaggagagaggatacacgaggagagtggttcagatgatcttgaactcactcttggaaactcaagcaccaggtaattccaaagccacatgtacattttcaaacccggttgaaccaaaaccgttcttgatatgttgctccaaattttatttaaattgttctcttcccatgtaatgctcaaagttaaaacacagcttataatattcgtttatctg

SEQ ID NO: 43164 - protein, 325 aa, Arabidopsis thaliana
  peptide (1)..(325): Ceres Seq. ID no. 12602151
MTSGTRMPTWRERENNKRRERRRRAIAAKIFTGLRMYGNYELPKHCDNNEVLKALCNEAGWIVEPDGTTYRKGCSRPVERMEIGGGSATASPCSSYQPSPCASYNPSPGSSNFMSPASSSFANLTSGDGQSLIPWLKHLSTTSSSSASSSSRLPNYLYIPGGSISAPVTPPLSSPTARTPRMNTDWQQLNNSFFVSSTPPSPTRQIIPDSEWFSGIQLAQSVPASPTFSLVSQNPFGFKEEAASAAGGGGGSRMWTPGQSGTCSPAIPPGADQTADVPMSEAVAPPEFAFGSNTNGLVKAWEGERIHEESGSDDLELTLGNSSTR

SEQ ID NO: 43165 - protein, 319 aa, Arabidopsis thaliana
  peptide (1)..(319): Ceres Seq. ID no. 12602152
MPTWRERENNKRRERRRRAIAAKIFTGLRMYGNYELPKHCDNNEVLKALCNEAGWIVEPDGTTYRKGCSRPVERMEIGGGSATASPCSSYQPSPCASYNPSPGSSNFMSPASSSFANLTSGDGQSLIPWLKHLSTTSSSSASSSSRLPNYLYIPGGSISAPVTPPLSSPTARTPRMNTDWQQLNNSFFVSSTPPSPTRQIIPDSEWFSGIQLAQSVPASPTFSLVSQNPFGFKEEAASAAGGGGGSRMWTPGQSGTCSPAIPPGADQTADVPMSEAVAPPEFAFGSNTNGLVKAWEGERIHEESGSDDLELTLGNSSTR

SEQ ID NO: 43166 - protein, 290 aa, Arabidopsis thaliana
  peptide (1)..(290): Ceres Seq. ID no. 12602153
MYGNYELPKHCDNNEVLKALCNEAGWIVEPDGTTYRKGCSRPVERMEIGGGSATASPCSSYQPSPCASYNPSPGSSNFMSPASSSFANLTSGDGQSLIPWLKHLSTTSSSSASSSSRLPNYLYIPGGSISAPVTPPLSSPTARTPRMNTDWQQLNNSFFVSSTPPSPTRQIIPDSEWFSGIQLAQSVPASPTFSLVSQNPFGFKEEAASAAGGGGGSRMWTPGQSGTCSPAIPPGADQTADVPMSEAVAPPEFAFGSNTNGLVKAWEGERIHEESGSDDLELTLGNSSTR

SEQ ID NO: 43167 - DNA, 1795 bp, Arabidopsis thaliana
  misc_feature (1)..(1795): Ceres Seq. ID no. 13490973
  misc_feature (1)..(1795): Ortholog of  Ceres SEQ ID NO 13593889 as cited in SEQ ID NO 53305
  misc_feature (1)..(1795): Ortholog of  Ceres SEQ ID NO 13581959 as cited in SEQ ID NO 56156
  misc_feature (1)..(1795): Ortholog of  Ceres SEQ ID NO 15171809 as cited in SEQ ID NO 57329
gggaagcgacgactgactcttcttcctcctcctcctccacctcttgtttaggttcttagcactgaaatttgatcagaaggtgttgacggtgtagagcttcacgaaacataaactttcatttcttctagcttcttgatttgctcttaaaggtgcatgttgaagtgattgaaagcgatttacatgtgacttgcagctcggtcagacattatacattacactcaacacgagattggaaaggatgcttgagaatccaaagttcgatttgcacgctgttggcaatcacaacaacgacaacaattactatgccttcacccaagacttttatcaaaagctcggggaagaaggtacaaacatgtctgttgacagtatgcagacaagtaatgctggagggtctgtgtcaatgtctgtcgataacagtagcgttggttcgagtgatgctcttattggccatcctggtttgaagcctatgcgccatccctactctctctcggatggccaaagcgtatttcggccaggaaaagttactcatgcacttaacgatgatgccttagcacaagcgttgatggatagtaagtatccaaccgagggactggtgaactatgaagagtggacaatagatctgaggaaactacatatgggtcctgcttttgctcaaggggcttttggaaagttatacagagggacttacaacggagaagatgtagccattaagctactcgagaggtcagatagcaaccctgaaaaggcacaagccctcgaacagcagtttcagcaggaagtttctatgcttgcatttttgaagcatcctaacatcgttaggtttattggtgcgtgcattaaaccgatggtgtggtgcatcgtgactgaatatgcaaaaggagggtctgtcagacagtttctgactaagagacaaaaccgagctgtgcctttgaagttagctgttatgcaggcgttggatgttgccaggggtatggcttacgtccatgagcgcaactttatacaccgggatctaaagtcagataacctcctcatatcagctgatcggtccatcaagattgctgattttggtgttgcaagaattgaagttcaaaccgaagggatgacaccagagactggaacttacagatggatggcaccagagatgatccagcacagaccctacactcaaaaagtggacgtgtatagttttggaatcgtgctgtgggagttgattacaggtctgttaccgttccagaacatgacggcggttcaggctgcatttgcagtggtgaacagaggagtccgtccaacagtcccagcagattgtcttcctgtgcttggagagatcatgacacgttgctgggatgcggaccctgaagtccgtccttgttttgcagagattgtcaatcttctggaggcggcggaaactgagataatgacgaatgtgagaaaagcccgtttcagatgttgcatgacgcaaccaatgacagtcgactaatctgttgtgaagaaagagagaggagaagaagaggaatgaacaaagaagagaacataaaagaaaaaaacagagagagagagagagaaagcaagaagggctttagatatatgtaagtttgtgtgtgtatctatctatctatatatatatatccgattgtatctcttttctcaagataggagaagtaacccaaccattttagactactgattttctagattttgtattaagaaagaacaacgaaaaaattagatgtacggtgattgtctcaagtgtttggtttagttttccttgaatttgatgatgcatacttttctccac

SEQ ID NO: 43168 - protein, 412 aa, Arabidopsis thaliana
  peptide (1)..(412): Ceres Seq. ID no. 13490974
MLENPKFDLHAVGNHNNDNNYYAFTQDFYQKLGEEGTNMSVDSMQTSNAGGSVSMSVDNSSVGSSDALIGHPGLKPMRHPYSLSDGQSVFRPGKVTHALNDDALAQALMDSKYPTEGLVNYEEWTIDLRKLHMGPAFAQGAFGKLYRGTYNGEDVAIKLLERSDSNPEKAQALEQQFQQEVSMLAFLKHPNIVRFIGACIKPMVWCIVTEYAKGGSVRQFLTKRQNRAVPLKLAVMQALDVARGMAYVHERNFIHRDLKSDNLLISADRSIKIADFGVARIEVQTEGMTPETGTYRWMAPEMIQHRPYTQKVDVYSFGIVLWELITGLLPFQNMTAVQAAFAVVNRGVRPTVPADCLPVLGEIMTRCWDADPEVRPCFAEIVNLLEAAETEIMTNVRKARFRCCMTQPMTVD

SEQ ID NO: 43169 - protein, 374 aa, Arabidopsis thaliana
  peptide (1)..(374): Ceres Seq. ID no. 13490975
MSVDSMQTSNAGGSVSMSVDNSSVGSSDALIGHPGLKPMRHPYSLSDGQSVFRPGKVTHALNDDALAQALMDSKYPTEGLVNYEEWTIDLRKLHMGPAFAQGAFGKLYRGTYNGEDVAIKLLERSDSNPEKAQALEQQFQQEVSMLAFLKHPNIVRFIGACIKPMVWCIVTEYAKGGSVRQFLTKRQNRAVPLKLAVMQALDVARGMAYVHERNFIHRDLKSDNLLISADRSIKIADFGVARIEVQTEGMTPETGTYRWMAPEMIQHRPYTQKVDVYSFGIVLWELITGLLPFQNMTAVQAAFAVVNRGVRPTVPADCLPVLGEIMTRCWDADPEVRPCFAEIVNLLEAAETEIMTNVRKARFRCCMTQPMTVD

SEQ ID NO: 43170 - protein, 369 aa, Arabidopsis thaliana
  peptide (1)..(369): Ceres Seq. ID no. 13490976
MQTSNAGGSVSMSVDNSSVGSSDALIGHPGLKPMRHPYSLSDGQSVFRPGKVTHALNDDALAQALMDSKYPTEGLVNYEEWTIDLRKLHMGPAFAQGAFGKLYRGTYNGEDVAIKLLERSDSNPEKAQALEQQFQQEVSMLAFLKHPNIVRFIGACIKPMVWCIVTEYAKGGSVRQFLTKRQNRAVPLKLAVMQALDVARGMAYVHERNFIHRDLKSDNLLISADRSIKIADFGVARIEVQTEGMTPETGTYRWMAPEMIQHRPYTQKVDVYSFGIVLWELITGLLPFQNMTAVQAAFAVVNRGVRPTVPADCLPVLGEIMTRCWDADPEVRPCFAEIVNLLEAAETEIMTNVRKARFRCCMTQPMTVD

SEQ ID NO: 43171 - DNA, 1329 bp, Arabidopsis thaliana
  misc_feature (1)..(1329): Ceres Seq. ID no. 12395656
  misc_feature (1)..(1329): Ortholog of  Ceres SEQ ID NO 13655375 as cited in SEQ ID NO 63347
agtgttgatttctctcctcttggcttatgagtttcgaattcgaatctcaaactaaaaagctttttgaaacaagcaacaaatgttactgacacctaagatgtttagttcttggcttcgacaagatgtgaagaagatcctcaaacgcaaagacagtgatgctggtgaacgaggaaaagcattggaggacttgagagcatcgttattcaacagattccgttcaccggaaactccaaagagacagcaacaacaacaacatcgtatctgtggcccaactgttgctcttactttcaatttcgttgttgctattagcattatcttcatgaacaaatgggttcttaaaaatataggctttgagtttccagtgttcctcacattcattcactacattgtagcttatctactaatggctcttctcaaatccttttcgctccttcctgcttcaccgccttccacgaaatcatcgttgcttccgctctatactcttggcattgtaatgtcactctctacaggactagctaatgttagccttaagtataacagtgttggattctaccagatggcgaaaattgctgttacgccttctatcgtgtttgcagagttcttgtggtatagaaagagagtttctttcatgaaggtggtatcacttacagttgtatctgtgggagttgcggttgcgactgtaacagatttacagtttagtctgtttggtgcttgtgtagcattcgcatggatcataccaagcgcaactaacaaaatcttgtggtctaatatgcagcaacgagaaaactggactgctttggcgttgatgtggaaaacgacgccaatcactctgttgtttcttgtatcgatgattccgttcttggatccgcccggtgctctatcgttcaattggagcttaaccaacacatctgccattcttgtttctgctcttctcggattctttcttcaatggtcaggagccttagctctaggagcaacttctgcaattacgcatgtggtgctaggacagttcaagacttgtgtcctcctccttggaaactactacattttcgggtcgaatagtggtttcattagcgttggcggtgcgtttgtggcgattatgggaacttcgttatatacataccttaacacgagaggtcaatctcttaaaacttcgtcttcttcttctgctctctcggagaagaagtcaagattcagtgatcttaaggatgatgacaagaatcttgaaccttacggctccgaagctgtctagtctaggctaacttttgtattatatagttttgattattccacattacattagattctaattccaactttttgtttttg

SEQ ID NO: 43172 - protein, 390 aa, Arabidopsis thaliana
  peptide (1)..(390): Ceres Seq. ID no. 12395657
MLLTPKMFSSWLRQDVKKILKRKDSDAGERGKALEDLRASLFNRFRSPETPKRQQQQQHRICGPTVALTFNFVVAISIIFMNKWVLKNIGFEFPVFLTFIHYIVAYLLMALLKSFSLLPASPPSTKSSLLPLYTLGIVMSLSTGLANVSLKYNSVGFYQMAKIAVTPSIVFAEFLWYRKRVSFMKVVSLTVVSVGVAVATVTDLQFSLFGACVAFAWIIPSATNKILWSNMQQRENWTALALMWKTTPITLLFLVSMIPFLDPPGALSFNWSLTNTSAILVSALLGFFLQWSGALALGATSAITHVVLGQFKTCVLLLGNYYIFGSNSGFISVGGAFVAIMGTSLYTYLNTRGQSLKTSSSSSALSEKKSRFSDLKDDDKNLEPYGSEAV

SEQ ID NO: 43173 - protein, 384 aa, Arabidopsis thaliana
  peptide (1)..(384): Ceres Seq. ID no. 12395658
MFSSWLRQDVKKILKRKDSDAGERGKALEDLRASLFNRFRSPETPKRQQQQQHRICGPTVALTFNFVVAISIIFMNKWVLKNIGFEFPVFLTFIHYIVAYLLMALLKSFSLLPASPPSTKSSLLPLYTLGIVMSLSTGLANVSLKYNSVGFYQMAKIAVTPSIVFAEFLWYRKRVSFMKVVSLTVVSVGVAVATVTDLQFSLFGACVAFAWIIPSATNKILWSNMQQRENWTALALMWKTTPITLLFLVSMIPFLDPPGALSFNWSLTNTSAILVSALLGFFLQWSGALALGATSAITHVVLGQFKTCVLLLGNYYIFGSNSGFISVGGAFVAIMGTSLYTYLNTRGQSLKTSSSSSALSEKKSRFSDLKDDDKNLEPYGSEAV

SEQ ID NO: 43174 - protein, 310 aa, Arabidopsis thaliana
  peptide (1)..(310): Ceres Seq. ID no. 12395659
MNKWVLKNIGFEFPVFLTFIHYIVAYLLMALLKSFSLLPASPPSTKSSLLPLYTLGIVMSLSTGLANVSLKYNSVGFYQMAKIAVTPSIVFAEFLWYRKRVSFMKVVSLTVVSVGVAVATVTDLQFSLFGACVAFAWIIPSATNKILWSNMQQRENWTALALMWKTTPITLLFLVSMIPFLDPPGALSFNWSLTNTSAILVSALLGFFLQWSGALALGATSAITHVVLGQFKTCVLLLGNYYIFGSNSGFISVGGAFVAIMGTSLYTYLNTRGQSLKTSSSSSALSEKKSRFSDLKDDDKNLEPYGSEAV

SEQ ID NO: 43175 - DNA, 1182 bp, Arabidopsis thaliana
  misc_feature (1)..(1182): Ceres Seq. ID no. 13490977
  misc_feature (1)..(1182): Ortholog of  Ceres SEQ ID NO 15226198 as cited in SEQ ID NO 62150
agattaagtcttcttcgtcatcttcgagtgtgagtggatccagagagagaattagatatttccgacacgaggcaaattcctagtggctcatggcgtcatcatctgatcacacggcgaagataatcgacggcaaggcgattgctcataccatcagatcagagatcgccgaggaagttcgcggtctatctgagaaacacggcaaggtcccaggactagctgtagttattgttgggagccgaaaggattcacagacctatgtgaatacgaagaggaaagcgtgcgctgaggttgggattaagtcatttgacgtgggcctaccagaggaagtttctgaagctgatcttattagcaaagttcatgaactaaattcaaatccggatgtccatggcatattagttcaactcccattgccgaaacatattaatgaggagaatatattgggtgcaatcagcattgataaagatgtcgatggcttccatcctttgaatattggtaagctagccatgaaaggcagagaacccctcttccttccttgcaccccaaagggatgtttggaactcctagctagaagcggcgtaaagataaaggggcaacgagcagttgttgtaggtcggagtaacattgttggtttgcccgtttcacttcttttgctcaaggctgatgctactgtcacaactgtacattctcacaccaaggatcctgaggctatcatacgggaagctgacattgttattgctgcatgcggacaagcccacatgattaagggcaactggataaagccaggggctgcagtaattgatgttggaactaatgcagtcagcgacccgagcaagaaatcaggataccggttggttggagatgttgatttcgcagaagcttcaaaagttgcaggtttcataactccggtccctggtggtgtaggcccaatgacagtggcaatgcttctcaggaacaccgtagacggtgccaagcgtgtctttggcgagtaaaacaatctactgtatgtaataaagaaaccaagagtttctccattctgtaattgtgtacttggcttgacgatatttttccactcaaataaattgaaattggcgttccctttggattaccttacattgttctgcaactagctagaacgattatttccgcaattcagttaaatacaagggtgtcatcatgtgaccc

SEQ ID NO: 43176 - protein, 299 aa, Arabidopsis thaliana; identical to SEQ ID NO: 35869
  peptide (1)..(299): Ceres Seq. ID no. 13490978

SEQ ID NO: 43177 - protein, 161 aa, Arabidopsis thaliana; identical to SEQ ID NO: 35870
  peptide (1)..(161): Ceres Seq. ID no. 13490979

SEQ ID NO: 43178 - DNA, 1564 bp, Arabidopsis thaliana
  misc_feature (1)..(1564): Ceres Seq. ID no. 12337540
  misc_feature (1)..(1564): Ortholog of  Ceres SEQ ID NO 15170420 as cited in SEQ ID NO 54814
  misc_feature (1)..(1564): Ortholog of  Ceres SEQ ID NO 14312785 as cited in SEQ ID NO 55622
  misc_feature (1)..(1564): Ortholog of  Ceres SEQ ID NO 13596925 as cited in SEQ ID NO 62299
cttgcgttttcgtcccacaatctttgtcgtggttttctgctgtcttcttctccgtcgaacttctccgaccacttcgtatagagagagagagtgacgaagagtttacggaatcgaatccaataatgagtactgcgtcggcttttagttcaatccaaggatgctggttcaagggcgaaaggaaaattcgtgtagcggataagcgagccaagaggcttactttgggatcccatgtggcttcgccatcttcaatgagcttcagagtttcagctagtagttctgttaaacctgaaaaggatattaggattggtcttcttggtgcaagtggctacactggtgctgagatcgttaggcttcttgcaaatcatccgcatttccaggtcactttgatgactgctgatagaaaagctggccagtcaatggaaagcgttttcccacacctgagagctcaaaaactacctactttggtctcggtaaaggatgcagatttttctactgtggatgctgtattctgctgtttacctcacggaacaactcaggaaatcatcaaggaactgcctactgcattgaaaatcgttgatctttcagcggacttccggttgcgtaatattgcagaatatgaagaatggtatggtcagcctcacaaggcagtagagttacagaaagaagttgtgtatggtctaacagagatactaagggaggacataaaaaaggcacgacttgtggctaacccaggctgttacccgactacgattcaacttcctcttgttcctttactaaaggcaaatctcatcaaacatgaaaacatcattatcgatgcaaaatctggtgttagtggagcaggacgtggtgctaaggaggcaaatctttactctgagatagctgaaggcatttcttcttatggtgtcacccgtcatcgccatgttcctgaaattgaacagggattatctgatgttgcacagtcaaaagtaacagtcagttttacgccacatctcatgccaatgatccgtggaatgcaatcgactatatatgtggaaatggctcccggggttagaaccgaagatttacaccagcaattgaagacgtcttatgaggatgaagaatttgtcaaagtgttggatgaaggagttgttcctcggacacacaacgttagaggatccaactattgtcatatgagtgtctttcctgatcgaattcctggaagagctatcataatctcagtgattgataatcttgtgaaaggagcttcgggacaagcgttgcagaatcttaacataatgttgggatatcccgaaacaacggggctcctacaccagccgcttttcccttaaaaatcccacctttaaatcgatgaccaatctgaagctgttgagacggcaatgttaagcataaagatggttggttatatgattcatatttatagacaataaagcctcttcttttaccattacaaataaatggttttgttgtttgtttattaaggttttgatgaacctttattcttgttatctctattttctgaattgcaattttcgtttgagtcacaaaagaaagttgaacttattcc

SEQ ID NO: 43179 - protein, 441 aa, Arabidopsis thaliana
  peptide (1)..(441): Ceres Seq. ID no. 12337541
CVFVPQSLSWFSAVFFSVELLRPLRIERESDEEFTESNPIMSTASAFSSIQGCWFKGERKIRVADKRAKRLTLGSHVASPSSMSFRVSASSSVKPEKDIRIGLLGASGYTGAEIVRLLANHPHFQVTLMTADRKAGQSMESVFPHLRAQKLPTLVSVKDADFSTVDAVFCCLPHGTTQEIIKELPTALKIVDLSADFRLRNIAEYEEWYGQPHKAVELQKEVVYGLTEILREDIKKARLVANPGCYPTTIQLPLVPLLKANLIKHENIIIDAKSGVSGAGRGAKEANLYSEIAEGISSYGVTRHRHVPEIEQGLSDVAQSKVTVSFTPHLMPMIRGMQSTIYVEMAPGVRTEDLHQQLKTSYEDEEFVKVLDEGVVPRTHNVRGSNYCHMSVFPDRIPGRAIIISVIDNLVKGASGQALQNLNIMLGYPETTGLLHQPLFP

SEQ ID NO: 43180 - protein, 401 aa, Arabidopsis thaliana
  peptide (1)..(401): Ceres Seq. ID no. 12337542
MSTASAFSSIQGCWFKGERKIRVADKRAKRLTLGSHVASPSSMSFRVSASSSVKPEKDIRIGLLGASGYTGAEIVRLLANHPHFQVTLMTADRKAGQSMESVFPHLRAQKLPTLVSVKDADFSTVDAVFCCLPHGTTQEIIKELPTALKIVDLSADFRLRNIAEYEEWYGQPHKAVELQKEVVYGLTEILREDIKKARLVANPGCYPTTIQLPLVPLLKANLIKHENIIIDAKSGVSGAGRGAKEANLYSEIAEGISSYGVTRHRHVPEIEQGLSDVAQSKVTVSFTPHLMPMIRGMQSTIYVEMAPGVRTEDLHQQLKTSYEDEEFVKVLDEGVVPRTHNVRGSNYCHMSVFPDRIPGRAIIISVIDNLVKGASGQALQNLNIMLGYPETTGLLHQPLFP

SEQ ID NO: 43181 - protein, 359 aa, Arabidopsis thaliana
  peptide (1)..(359): Ceres Seq. ID no. 12337543
MSFRVSASSSVKPEKDIRIGLLGASGYTGAEIVRLLANHPHFQVTLMTADRKAGQSMESVFPHLRAQKLPTLVSVKDADFSTVDAVFCCLPHGTTQEIIKELPTALKIVDLSADFRLRNIAEYEEWYGQPHKAVELQKEVVYGLTEILREDIKKARLVANPGCYPTTIQLPLVPLLKANLIKHENIIIDAKSGVSGAGRGAKEANLYSEIAEGISSYGVTRHRHVPEIEQGLSDVAQSKVTVSFTPHLMPMIRGMQSTIYVEMAPGVRTEDLHQQLKTSYEDEEFVKVLDEGVVPRTHNVRGSNYCHMSVFPDRIPGRAIIISVIDNLVKGASGQALQNLNIMLGYPETTGLLHQPLFP

SEQ ID NO: 43182 - DNA, 1224 bp, Arabidopsis thaliana
  misc_feature (1)..(1224): Ceres Seq. ID no. 13489583
  misc_feature (1)..(1224): Ortholog of  Ceres SEQ ID NO 14313583 as cited in SEQ ID NO 55431
  misc_feature (1)..(1224): Ortholog of  Ceres SEQ ID NO 12476493 as cited in SEQ ID NO 58163
  misc_feature (1)..(1224): Ortholog of  Ceres SEQ ID NO 12617090 as cited in SEQ ID NO 64005
  misc_feature (1)..(1224): Ortholog of  Ceres SEQ ID NO 13597233 as cited in SEQ ID NO 64370
  misc_feature (1)..(1224): Ortholog of  Ceres SEQ ID NO 14302844 as cited in SEQ ID NO 65379
  misc_feature (1)..(1224): Ortholog of  Ceres SEQ ID NO 15226354 as cited in SEQ ID NO 0
atgtctcagccttcaaagctatcaaaatcaaaaaaattctatcaaacaaggaaatatatcaatggcggtattgtctaaaccggtagcaataccaaaatccgggttctctctaatcccggttatagatatgtctgacccagaatccaaacatgccctcgtgaaagcatgcgaagacttcggcttcttcaaggtgatcaaccatggcgtttccgcagagctagtctctgttttagaacacgagaccgtcgatttcttctcgttgcccaagtcagagaaaacccaagtcgcaggttatcccttcggatacgggaacagtaagattggtcggaatggtgacgtgggttgggttgagtacttgttgatgaacgctaatcatgattccggttcgggtccactatttccaagtcttctcaaaagcccgggaactttcagaaacgcattggaagagtacacaacatcagtgagaaaaatgacattcgatgttttggagaagatcacagatgggctagggatcaaaccgaggaacacacttagcaagcttgtgtctgaccaaaacacggactcgatattgagacttaatcactatccaccatgtcctcttagcaataagaaaaccaatggtggtaagaatgtgattggttttggtgaacacacagatcctcaaatcatctctgtcttaagatctaacaacacttctggtctccaaattaatctaaatgatggctcatggatctctgtccctcccgatcacacttccttcttcttcaacgttggtgactctctccaggtgatgacaaatgggaggttcaagagcgtgaggcatagggttttagctaactgtaaaaaatctagggtttctatgatttacttcgctggaccttcattgactcagagaatcgctccgttgacatgtttgatagacaatgaggacgagaggttgtacgaggagtttacttggtctgaatacaaaaactctacctacaactctagattgtctgataataggcttcaacaattcgaaaggaagactataaaaaatctcctaaattgattgatatatctatttaatctataagtgtgtgctacatacagacaatgcatctgtatattttgaagttaatgttatttgttaatccaataactgtaaaaacatgcaagagtgtgtttgtttgtttcgtaatatcaacatcgctcccatcttttatggataatatcaagttgttt

SEQ ID NO: 43183 - protein, 349 aa, Arabidopsis thaliana
  peptide (1)..(349): Ceres Seq. ID no. 13489584
CLSLQSYQNQKNSIKQGNISMAVLSKPVAIPKSGFSLIPVIDMSDPESKHALVKACEDFGFFKVINHGVSAELVSVLEHETVDFFSLPKSEKTQVAGYPFGYGNSKIGRNGDVGWVEYLLMNANHDSGSGPLFPSLLKSPGTFRNALEEYTTSVRKMTFDVLEKITDGLGIKPRNTLSKLVSDQNTDSILRLNHYPPCPLSNKKTNGGKNVIGFGEHTDPQIISVLRSNNTSGLQINLNDGSWISVPPDHTSFFFNVGDSLQVMTNGRFKSVRHRVLANCKKSRVSMIYFAGPSLTQRIAPLTCLIDNEDERLYEEFTWSEYKNSTYNSRLSDNRLQQFERKTIKNLLN

SEQ ID NO: 43184 - protein, 329 aa, Arabidopsis thaliana
  peptide (1)..(329): Ceres Seq. ID no. 13489585
MAVLSKPVAIPKSGFSLIPVIDMSDPESKHALVKACEDFGFFKVINHGVSAELVSVLEHETVDFFSLPKSEKTQVAGYPFGYGNSKIGRNGDVGWVEYLLMNANHDSGSGPLFPSLLKSPGTFRNALEEYTTSVRKMTFDVLEKITDGLGIKPRNTLSKLVSDQNTDSILRLNHYPPCPLSNKKTNGGKNVIGFGEHTDPQIISVLRSNNTSGLQINLNDGSWISVPPDHTSFFFNVGDSLQVMTNGRFKSVRHRVLANCKKSRVSMIYFAGPSLTQRIAPLTCLIDNEDERLYEEFTWSEYKNSTYNSRLSDNRLQQFERKTIKNLLN

SEQ ID NO: 43185 - protein, 307 aa, Arabidopsis thaliana
  peptide (1)..(307): Ceres Seq. ID no. 13489586
MSDPESKHALVKACEDFGFFKVINHGVSAELVSVLEHETVDFFSLPKSEKTQVAGYPFGYGNSKIGRNGDVGWVEYLLMNANHDSGSGPLFPSLLKSPGTFRNALEEYTTSVRKMTFDVLEKITDGLGIKPRNTLSKLVSDQNTDSILRLNHYPPCPLSNKKTNGGKNVIGFGEHTDPQIISVLRSNNTSGLQINLNDGSWISVPPDHTSFFFNVGDSLQVMTNGRFKSVRHRVLANCKKSRVSMIYFAGPSLTQRIAPLTCLIDNEDERLYEEFTWSEYKNSTYNSRLSDNRLQQFERKTIKNLLN

SEQ ID NO: 43186 - DNA, 1280 bp, Arabidopsis thaliana
  misc_feature (1)..(1280): Ceres Seq. ID no. 13645880
  misc_feature (1)..(1280): Ortholog of  Ceres SEQ ID NO 12636774 as cited in SEQ ID NO 372
  misc_feature (1)..(1280): Ortholog of  Ceres SEQ ID NO 14310917 as cited in SEQ ID NO 53231
  misc_feature (1)..(1280): Ortholog of  Ceres SEQ ID NO 13582350 as cited in SEQ ID NO 56734
  misc_feature (1)..(1280): Ortholog of  Ceres SEQ ID NO 12476493 as cited in SEQ ID NO 58163
  misc_feature (1)..(1280): Ortholog of  Ceres SEQ ID NO 12578315 as cited in SEQ ID NO 62451
  misc_feature (1)..(1280): Ortholog of  Ceres SEQ ID NO 13597295 as cited in SEQ ID NO 63743
  misc_feature (1)..(1280): Ortholog of  Ceres SEQ ID NO 12617090 as cited in SEQ ID NO 64005
  misc_feature (1)..(1280): Ortholog of  Ceres SEQ ID NO 13597233 as cited in SEQ ID NO 64370
acatcctaatcaaaaaaatactactactcactttactataatctctcaaaatggccgtaagtttcgtaacaacatctcctgaggaagaagacaaaccgaagctaggccttggaaatattcaaactccgttaatcttcaacccttcaatgcttaaccttcaagccaatatcccaaaccaattcatctggcctgacgacgaaaaaccttccatcaacgttctcgagcttgatgttcctctcatcgaccttcaaaaccttctctctgatccatcctccactttagatgcttcgagactgatctctgaggcctgtaagaagcacggtttcttcctcgtggtcaatcacggcatcagcgaggagcttatatcagacgctcatgaatacacgagccgcttctttgatatgcctctctccgaaaaacagagggttcttagaaaatccggtgagagtgttggctacgcaagcagtttcaccggacgcttctccaccaagcttccatggaaggagaccctttctttccggttttgcgacgacatgagccgctcaaaatccgttcaagattacttctgcgatgcgttgggacatgggtttcagccatttgggaaggtgtatcaagagtattgtgaagcaatgagttctctatcactgaagatcatggagcttctcgggctaagtttaggcgtaaaacgggactactttagagagtttttcgaagaaaacgattcaataataagactgaattactaccctccatgtataaaaccagatctcacactaggaacaggacctcattgtgatccaacatctcttaccatccttcaccaagaccatgttaatggccttcaagtctttgtggaaaatcaatggcgctccattcgtcccaaccccaaggcctttgtggtcaatatcggcgatactttcatggctctatcgaacgatagatacaagagctgcttgcaccgggcggtggtgaacagcgagagcgagaggaagtcacttgcattcttcttgtgtccgaaaaaagacagagtagtgacgccaccgagagagcttttggacagcatcacatcaagaagataccctgacttcacatggtctatgttccttgagttcactcagaaacattatagagcagacatgaacactctccaagccttttcagattggctcaccaaacccatctaagaaataaaatattcatgtcttgtcttgttagttataactagtatcttctttatatttcatgtatgtatatggtaataggcaataacaccttttagc

SEQ ID NO: 43187 - protein, 377 aa, Arabidopsis thaliana
  peptide (1)..(377): Ceres Seq. ID no. 13645881
MAVSFVTTSPEEEDKPKLGLGNIQTPLIFNPSMLNLQANIPNQFIWPDDEKPSINVLELDVPLIDLQNLLSDPSSTLDASRLISEACKKHGFFLVVNHGISEELISDAHEYTSRFFDMPLSEKQRVLRKSGESVGYASSFTGRFSTKLPWKETLSFRFCDDMSRSKSVQDYFCDALGHGFQPFGKVYQEYCEAMSSLSLKIMELLGLSLGVKRDYFREFFEENDSIIRLNYYPPCIKPDLTLGTGPHCDPTSLTILHQDHVNGLQVFVENQWRSIRPNPKAFVVNIGDTFMALSNDRYKSCLHRAVVNSESERKSLAFFLCPKKDRVVTPPRELLDSITSRRYPDFTWSMFLEFTQKHYRADMNTLQAFSDWLTKPI

SEQ ID NO: 43188 - protein, 345 aa, Arabidopsis thaliana
  peptide (1)..(345): Ceres Seq. ID no. 13645882
MLNLQANIPNQFIWPDDEKPSINVLELDVPLIDLQNLLSDPSSTLDASRLISEACKKHGFFLVVNHGISEELISDAHEYTSRFFDMPLSEKQRVLRKSGESVGYASSFTGRFSTKLPWKETLSFRFCDDMSRSKSVQDYFCDALGHGFQPFGKVYQEYCEAMSSLSLKIMELLGLSLGVKRDYFREFFEENDSIIRLNYYPPCIKPDLTLGTGPHCDPTSLTILHQDHVNGLQVFVENQWRSIRPNPKAFVVNIGDTFMALSNDRYKSCLHRAVVNSESERKSLAFFLCPKKDRVVTPPRELLDSITSRRYPDFTWSMFLEFTQKHYRADMNTLQAFSDWLTKPI

SEQ ID NO: 43189 - protein, 260 aa, Arabidopsis thaliana
  peptide (1)..(260): Ceres Seq. ID no. 13645883
MPLSEKQRVLRKSGESVGYASSFTGRFSTKLPWKETLSFRFCDDMSRSKSVQDYFCDALGHGFQPFGKVYQEYCEAMSSLSLKIMELLGLSLGVKRDYFREFFEENDSIIRLNYYPPCIKPDLTLGTGPHCDPTSLTILHQDHVNGLQVFVENQWRSIRPNPKAFVVNIGDTFMALSNDRYKSCLHRAVVNSESERKSLAFFLCPKKDRVVTPPRELLDSITSRRYPDFTWSMFLEFTQKHYRADMNTLQAFSDWLTKPI

SEQ ID NO: 43190 - DNA, 1281 bp, Arabidopsis thaliana
  misc_feature (1)..(1281): Ceres Seq. ID no. 12340299
  misc_feature (1)..(1281): Ortholog of  Ceres SEQ ID NO 15178260 as cited in SEQ ID NO 59907
  misc_feature (1)..(1281): Ortholog of  Ceres SEQ ID NO 14313548 as cited in SEQ ID NO 68496
actctctctctatctctatatatcgacacaccataaaagttgttctttctctccgtttccttagcctctgcatctgggcgattttctctttctatctccctacaccttagggagtactgatcctaaactcatcatctttctatgccttcctcttttctttcacttattttcttttctatttttctttctttcttactttgcgtaaaactagcgagtcaaaaataaagacacttgcatgatcctaatataatattatatattgtaattagagaaagagagagaagagaagaaagaaagtggcaatagattcttatggattttggtataaagaaacatgaaaaaatgggtttgaccgaagaaacgttgaggacgctttttgtatgcaaccccaaatagcagcttaaagaaagcagagaggatcttcttttatttcccctctgagcaacagaagccattattcaaagaaaggcttctttaatttactcgcagggagagggaaaagagaaaaaattgaaaaactccattttcaagtcattaaaatggcatcttcttcaacaaactcaccatgcgccgcttgcaaattcctccggcgaaaatgtcaaccggaatgtgtattcgcgccctatttcccaccggaccagccacaaaaattcgcaaacgttcacaaagtgtttggagcaagtaacgtgacaaagctcctcaacgagcttcacccttcacaacgtgaagacgcagtgaactctttggcctatgaagccgacatgcgcctccgtgaccctgtctacggctgcgttggcgtcatctctctcctccaacatcagcttcgtcagcttcagatagatctcagctgtgctaaatctgagctctctaagtaccaaagcctcggtatcctcgccgccactcatcagagtcttggcatcaacttactcgccggagcagcagatggaacagccaccgccgtgagagaccactatcaccaccaccagttttttcctagagaacaaatgtttggtggcttggatgttccggccggtaacaactacgacggtgggattcttgccattggacagatcactcagtttcagcagccgagagccgccgctggagatgatggtcgccgtactgttgatcctcttgagattttagggttttggtggtgttcatcttcgtcgatcgcttggtgatgagaaaactataattttaagaaaatatttgatgtggaaaaccaaaatattttaaacgtatggtacgtctctcttaatgacattaatttcggttttt

SEQ ID NO: 43191 - protein, 214 aa, Arabidopsis thaliana
  peptide (1)..(214): Ceres Seq. ID no. 12340300
MASSSTNSPCAACKFLRRKCQPECVFAPYFPPDQPQKFANVHKVFGASNVTKLLNELHPSQREDAVNSLAYEADMRLRDPVYGCVGVISLLQHQLRQLQIDLSCAKSELSKYQSLGILAATHQSLGINLLAGAADGTATAVRDHYHHHQFFPREQMFGGLDVPAGNNYDGGILAIGQITQFQQPRAAAGDDGRRTVDPLEILGFWWCSSSSIAW

SEQ ID NO: 43192 - protein, 140 aa, Arabidopsis thaliana
  peptide (1)..(140): Ceres Seq. ID no. 12340301
MRLRDPVYGCVGVISLLQHQLRQLQIDLSCAKSELSKYQSLGILAATHQSLGINLLAGAADGTATAVRDHYHHHQFFPREQMFGGLDVPAGNNYDGGILAIGQITQFQQPRAAAGDDGRRTVDPLEILGFWWCSSSSIAW

SEQ ID NO: 43193 - DNA, 1482 bp, Arabidopsis thaliana; identical to SEQ ID NO: 41343
  misc_feature (1)..(1482): Ceres Seq. ID no. 13500025
  misc_feature (1)..(1482): Ortholog of  Ceres SEQ ID NO 12617253 as cited in SEQ ID NO 64065

SEQ ID NO: 43194 - protein, 394 aa, Arabidopsis thaliana; identical to SEQ ID NO: 41344
  peptide (1)..(394): Ceres Seq. ID no. 13500026

SEQ ID NO: 43195 - protein, 322 aa, Arabidopsis thaliana; identical to SEQ ID NO: 41345
  peptide (1)..(322): Ceres Seq. ID no. 13500027

SEQ ID NO: 43196 - protein, 315 aa, Arabidopsis thaliana; identical to SEQ ID NO: 41346
  peptide (1)..(315): Ceres Seq. ID no. 13500028

SEQ ID NO: 43197 - DNA, 1274 bp, Arabidopsis thaliana
  misc_feature (1)..(1274): Ceres Seq. ID no. 12330715
  misc_feature (1)..(1274): Ortholog of  Ceres SEQ ID NO 14308571 as cited in SEQ ID NO 58921
cctccagaagcctaaaaccttcaccaccaaatcggtgcctccttgaatagtcgccgccgtcgtctatcatcgccgcttgtgactccgatgagaagctaggttattgaatcagagattatggctgcttcaatttcaagaaggatttttcgcacttttggatccttttcagctctaggacgttcctcttcaccaaatttgtctgcgaatacatctggaaatggtttagcttctcttactaatgatctaaagtatggaatggctttactttccaaccgaaagctctccacttctattttgactcctgatgattcatttccttctgatttacttaccaaaaagactgtgcttacaccagaccgaaccataggacaatatcaagacttggtcattccagtgactaattttcagaacgaggaaaagggtttcatggttttagcaggtgatgtctttgatgttccaataaggaaagatatcattcacaatgtcgtgcgatggcagcttgcgaaacgccagcagggaactcattcgaccaaaacgttaagtgaggttagtggaactggtagaaagccatggaatcagaagggtacaggtcgagctagacatggtacactacgtggtccgcagttccgaggtggttgtgtaatgcatggacccaaaccaagaagccatgccataaaaatgaataagcaggttcgacggcttggactgaaaatagcattgacagctcgagccgcagaaggaaaactcctcgtgtttgatgatttgggattgcctacgcataaaacaaagaacattgtgaactattacaaccaaatggagaacacaaagaaagtccttgttgtagaaggtggtcctattgatgaaaagctgaagctagccacccaaaatctacactatgtcaacataattccatcaatagggctaaatgtttacagcattctgctacacgatacgcttctgatgtcccgtgatgctgtgaataagatcgttgagcgtatgcacactcctattaaccgttgaagagacaacaatgtcttaaaatggcactctcaataagaatactagatcacaaggaatcccgcatgtagtatctgtaccggttcattgtttgttagctttttggtctggttttgcaacatagaatggtgaaggattgagttttaaaataatgaatggtgatactatttctatgtttttagacattctttttttaccgttttaaatatgacttacgcttttgtgtttttgaaaagcgattttgatagaaaatttct

SEQ ID NO: 43198 - protein, 300 aa, Arabidopsis thaliana
  peptide (1)..(300): Ceres Seq. ID no. 12330716
MAASISRRIFRTFGSFSALGRSSSPNLSANTSGNGLASLTNDLKYGMALLSNRKLSTSILTPDDSFPSDLLTKKTVLTPDRTIGQYQDLVIPVTNFQNEEKGFMVLAGDVFDVPIRKDIIHNVVRWQLAKRQQGTHSTKTLSEVSGTGRKPWNQKGTGRARHGTLRGPQFRGGCVMHGPKPRSHAIKMNKQVRRLGLKIALTARAAEGKLLVFDDLGLPTHKTKNIVNYYNQMENTKKVLVVEGGPIDEKLKLATQNLHYVNIIPSIGLNVYSILLHDTLLMSRDAVNKIVERMHTPINR

SEQ ID NO: 43199 - protein, 254 aa, Arabidopsis thaliana
  peptide (1)..(254): Ceres Seq. ID no. 12330717
MALLSNRKLSTSILTPDDSFPSDLLTKKTVLTPDRTIGQYQDLVIPVTNFQNEEKGFMVLAGDVFDVPIRKDIIHNVVRWQLAKRQQGTHSTKTLSEVSGTGRKPWNQKGTGRARHGTLRGPQFRGGCVMHGPKPRSHAIKMNKQVRRLGLKIALTARAAEGKLLVFDDLGLPTHKTKNIVNYYNQMENTKKVLVVEGGPIDEKLKLATQNLHYVNIIPSIGLNVYSILLHDTLLMSRDAVNKIVERMHTPINR

SEQ ID NO: 43200 - protein, 197 aa, Arabidopsis thaliana
  peptide (1)..(197): Ceres Seq. ID no. 12330718
MVLAGDVFDVPIRKDIIHNVVRWQLAKRQQGTHSTKTLSEVSGTGRKPWNQKGTGRARHGTLRGPQFRGGCVMHGPKPRSHAIKMNKQVRRLGLKIALTARAAEGKLLVFDDLGLPTHKTKNIVNYYNQMENTKKVLVVEGGPIDEKLKLATQNLHYVNIIPSIGLNVYSILLHDTLLMSRDAVNKIVERMHTPINR

SEQ ID NO: 43201 - DNA, 1391 bp, Arabidopsis thaliana
  misc_feature (1)..(1391): Ceres Seq. ID no. 13489448
  misc_feature (1)..(1391): Ortholog of  Ceres SEQ ID NO 15168576 as cited in SEQ ID NO 57123
gtctccgaaacgcaaccgcagagaacccaaatttatatcattctatatcttctcttcttcaccggcgtacaatagcactcaactcttaacttacgcacctctcttctctcatggcggtttcagtctcagctccggttttgtccctctgttacaatcagagcggcgaattgtctcgtagtttgggatatagactaccgaagaaagtgggatttagctctggtcgtcgttcagtgagttatatcggtttcggtgcggagaaagttggaagatttagggttagggttccgatttgcagagctgtacctcctctcttgttcaaagatctcgatgctgatgatttccgacatccttttgataagcagaacacgttgttactaagggctataccggggttgaacgaattcggcaaagctcttttagggtcaatgacggagcagattatgcttcttgagaacattgggacttctgttcttgtttccaagaatcagctctctgatcttcacggtttgttggttgaggctgctgagattttgaatatagaggctcctgatctatatgtgcgacagagtcctgttcctaatgcgtatacgctggcaataagcggtaagaagccgtttattgttgtccacaccagcttgatcgagcttcttactagcgcggagctacaggctgtcttagcccatgaactaggccatctgaagtgtgatcacggcgtgtggctcacatttgcaaatattcttactcttggggcttatacagttcctgcttttgggcaaatgatagctcgaaccttggaagaacagttacttcgttggctacgttcagcagagctgacttgtgatcgcgcagcactactcgtcgcccaagatccaaaggttgttgtatctgttctgatgaaattagccggaggatgtccatcaatcgctgatcagctaaatgttgacgcatttctagaacaagcccgttcatatgacaaagcttcttcaagccccttgggatggtacataagaaatgctcagactagtcaactttcgcatccattgccggttcttcgtgcacgtgagattgatgagtggtccaggagtctcgagtacaaaagtctcctgaaacgggcaaatcgaaaaagcacagtacagaaggtttagtgacgttgttaaagatttaaaaggaaggaagcgaaataaacatgtataggaacaatacagaaggagcaaagaagaaatgagagattggactctaggtctaaataggtactgtaaaactcttgtatttatttagtggcatactggcattgttgtatatcttataactgtaatagataaattcaaatgtatattccggaaaacaaaagggccttagctcaaagataatatatgataaagattgtttgt

SEQ ID NO: 43202 - protein, 344 aa, Arabidopsis thaliana
  peptide (1)..(344): Ceres Seq. ID no. 13489449
MAVSVSAPVLSLCYNQSGELSRSLGYRLPKKVGFSSGRRSVSYIGFGAEKVGRFRVRVPICRAVPPLLFKDLDADDFRHPFDKQNTLLLRAIPGLNEFGKALLGSMTEQIMLLENIGTSVLVSKNQLSDLHGLLVEAAEILNIEAPDLYVRQSPVPNAYTLAISGKKPFIVVHTSLIELLTSAELQAVLAHELGHLKCDHGVWLTFANILTLGAYTVPAFGQMIARTLEEQLLRWLRSAELTCDRAALLVAQDPKVVVSVLMKLAGGCPSIADQLNVDAFLEQARSYDKASSSPLGWYIRNAQTSQLSHPLPVLRAREIDEWSRSLEYKSLLKRANRKSTVQKV

SEQ ID NO: 43203 - protein, 239 aa, Arabidopsis thaliana
  peptide (1)..(239): Ceres Seq. ID no. 13489450
MTEQIMLLENIGTSVLVSKNQLSDLHGLLVEAAEILNIEAPDLYVRQSPVPNAYTLAISGKKPFIVVHTSLIELLTSAELQAVLAHELGHLKCDHGVWLTFANILTLGAYTVPAFGQMIARTLEEQLLRWLRSAELTCDRAALLVAQDPKVVVSVLMKLAGGCPSIADQLNVDAFLEQARSYDKASSSPLGWYIRNAQTSQLSHPLPVLRAREIDEWSRSLEYKSLLKRANRKSTVQKV

SEQ ID NO: 43204 - protein, 234 aa, Arabidopsis thaliana
  peptide (1)..(234): Ceres Seq. ID no. 13489451
MLLENIGTSVLVSKNQLSDLHGLLVEAAEILNIEAPDLYVRQSPVPNAYTLAISGKKPFIVVHTSLIELLTSAELQAVLAHELGHLKCDHGVWLTFANILTLGAYTVPAFGQMIARTLEEQLLRWLRSAELTCDRAALLVAQDPKVVVSVLMKLAGGCPSIADQLNVDAFLEQARSYDKASSSPLGWYIRNAQTSQLSHPLPVLRAREIDEWSRSLEYKSLLKRANRKSTVQKV

SEQ ID NO: 43205 - DNA, 1741 bp, Arabidopsis thaliana
  misc_feature (1)..(1741): Ceres Seq. ID no. 12370765
  misc_feature (1)..(1741): Ortholog of  Ceres SEQ ID NO 13595747 as cited in SEQ ID NO 58679
atggtgtctcatcttcaatgtatggcatccacattgtttacttgaggtacaagcaaaacgtctaagctcgtcgacctcctcttaatggcttcaagttcaacttcattcccgttaaccaccgcgccaccgcagggtgtcaggtttaaccggagaaaaccgaggttaaccgtgtgggctaagcaaacggcgtttcaactcgggaaaacgaagggtgatgatgactcggaggggaaacaaaaagggaacaacccgttccagtttgatttcggtaagttaccggacatgaagtcactgataccggttgtgacgaatccttctactggtttagtgtttggtaataacagaaagaaagatcctggtactatttttgtggctggtgctacgggacaagctggtatacgcatagctcaaacgctcttacaacgaggattcagtgttcgagccggtgttcctgaccttggagctgcccaggacctagctcgtgtcgcggctacttacaagattttatcaaatgatgaagtcaagaggctaaacgcagttcaatcccccttccaagacgctgaatcaatagcaaaagcgattggaaacgcgaccaaagttgttgttacggtcggggcaacagagaatggtccggacgcccaagtctcgacctcagacgcattgctcgtggtccaagcagctgagctagccggcgtaagccacgtggcgatagtctacgacggcaccatcagcgggtctacatacaacgtgctcgacgggattacttcgtttttcggcaatcttttcgcaaaatctcagccattgactatctctgacctcatcgagaaagtagctcaaaccgacgtggcctacacactcataaagacgagtttgacggaggatttctctccggagaaagcttataacgtcgtcgtttcagctgaagggagtaacagcggcagtggcagtagttcgtccgaggcctacaaagttccgaagttgaagattgcgtcgctggtagcagacatttttgcgaatacggccgtggcagaaaataaggtggtggaagtttctacagatccatcagcaccatcgcggccagtggacgagcttttcagtgtaatcccggaagatgggaggagaaaagtgtacgcagatgcgatcgcaagggaaagagcagaggaagaagctaaagttgcagctgacaaagctcgagaggcagcagaagcagcgaaagagttcgagaaacaaatgcaaaagctctccgagaaagaagcagaagctgcaagcttagctgaggatgcgcagcagaaagcagatgccgtgggagtcacagtggacggtttatttaacaaggcgaaagatatcagctcaggtctctcctggaataaactcggctctcagttcgcaactgcgattcagaacgcttcagagacgcctaaagtacaggttgctacgttcagaggacaagcaaaagcgagaaacttgccacccaagaaagcagtggtgaagcagagaccatcatctccgtttgcatccaaaccgaaagaagaacgtccgaagaagccggagaaagaggtgaggaaagtgttcggaggattgtttaagcaagagaccatctacatcgacgatgattgaaaaggccatatgcgatgtcgttttgaagttccgtacagtttcctttttttctctttccttctgtttcaagttaaaattctgtaatcgtatgacaaaattatacataaaaaaccatcattctccc

SEQ ID NO: 43206 - protein, 510 aa, Arabidopsis thaliana
  peptide (1)..(510): Ceres Seq. ID no. 12370766
MASSSTSFPLTTAPPQGVRFNRRKPRLTVWAKQTAFQLGKTKGDDDSEGKQKGNNPFQFDFGKLPDMKSLIPVVTNPSTGLVFGNNRKKDPGTIFVAGATGQAGIRIAQTLLQRGFSVRAGVPDLGAAQDLARVAATYKILSNDEVKRLNAVQSPFQDAESIAKAIGNATKVVVTVGATENGPDAQVSTSDALLVVQAAELAGVSHVAIVYDGTISGSTYNVLDGITSFFGNLFAKSQPLTISDLIEKVAQTDVAYTLIKTSLTEDFSPEKAYNVVVSAEGSNSGSGSSSSEAYKVPKLKIASLVADIFANTAVAENKVVEVSTDPSAPSRPVDELFSVIPEDGRRKVYADAIARERAEEEAKVAADKAREAAEAAKEFEKQMQKLSEKEAEAASLAEDAQQKADAVGVTVDGLFNKAKDISSGLSWNKLGSQFATAIQNASETPKVQVATFRGQAKARNLPPKKAVVKQRPSSPFASKPKEERPKKPEKEVRKVFGGLFKQETIYIDDD

SEQ ID NO: 43207 - protein, 444 aa, Arabidopsis thaliana
  peptide (1)..(444): Ceres Seq. ID no. 12370767
MKSLIPVVTNPSTGLVFGNNRKKDPGTIFVAGATGQAGIRIAQTLLQRGFSVRAGVPDLGAAQDLARVAATYKILSNDEVKRLNAVQSPFQDAESIAKAIGNATKVVVTVGATENGPDAQVSTSDALLVVQAAELAGVSHVAIVYDGTISGSTYNVLDGITSFFGNLFAKSQPLTISDLIEKVAQTDVAYTLIKTSLTEDFSPEKAYNVVVSAEGSNSGSGSSSSEAYKVPKLKIASLVADIFANTAVAENKVVEVSTDPSAPSRPVDELFSVIPEDGRRKVYADAIARERAEEEAKVAADKAREAAEAAKEFEKQMQKLSEKEAEAASLAEDAQQKADAVGVTVDGLFNKAKDISSGLSWNKLGSQFATAIQNASETPKVQVATFRGQAKARNLPPKKAVVKQRPSSPFASKPKEERPKKPEKEVRKVFGGLFKQETIYIDDD

SEQ ID NO: 43208 - DNA, 1119 bp, Arabidopsis thaliana
  misc_feature (1)..(1119): Ceres Seq. ID no. 12379502
  misc_feature (1)..(1119): Ortholog of  Ceres SEQ ID NO 12564952 as cited in SEQ ID NO 63211
gggtgatttcggatgcctaattgggtaattaatataatacagtataagattagatgcctcgaatattcgctctgtgcctaaccacaaaaaccgtaacttttggttttctctgaaacacatcccaaagtaaagaaagcatcactcttttcgtcttctctcgaaaatggcggacaatgattctctagatcagtttttggctgccgccattgatgccgctaaaaaagctggacagatcattcgtaaagggttttacgagactaaacatgttgaacacaaaggccaggtggatttggtgacagagactgataaaggatgtgaagaacttgtgtttaatcatctcaagcagctctttcccaatcacaagttcataggagaagaaactacagctgcatttggtgtgacagaactaactgacgaaccaacttggattgttgatcctcttgatggaacaaccaatttcgttcacgggttccctttcgtgtgtgtttccattggacttacgattggaaaagtccctgttgttggagttgtttataatcctattatggaagagctattcaccggtgtccaagggaaaggagcattcttgaatggaaagcgaatcaaagtgtcagctcaaagcgaacttttaaccgctttgctcgtgacagaggcgggtactaaacgagataaagctacattagacgatacaaccaacagaatcaacagtttgctaaccaaggtcaggtcccttaggatgagtggttcgtgtgcactggacctctgtggcgttgcgtgtggaagggttgatatcttctacgagctcggtttcggtggtccatgggacattgcagcaggaattgttatcgtgaaagaagctggtggactcatctttgatccatccggtaaagatttggacataacatcgcagaggatcgcggcttcaaacgcttctctcaaggagttattcgctgaggcgttgcggcttacaggggcatgaagtcatctgttattattttacaatatggtctcaaccttatatgatcaaactcaattcaaaaacttaacattattgaatatttcttttcggtagaaagaaaacaaactcaattgttgagaaaaaaaaacaaactattttcc

SEQ ID NO: 43209 - protein, 271 aa, Arabidopsis thaliana
  peptide (1)..(271): Ceres Seq. ID no. 12379503
MADNDSLDQFLAAAIDAAKKAGQIIRKGFYETKHVEHKGQVDLVTETDKGCEELVFNHLKQLFPNHKFIGEETTAAFGVTELTDEPTWIVDPLDGTTNFVHGFPFVCVSIGLTIGKVPVVGVVYNPIMEELFTGVQGKGAFLNGKRIKVSAQSELLTALLVTEAGTKRDKATLDDTTNRINSLLTKVRSLRMSGSCALDLCGVACGRVDIFYELGFGGPWDIAAGIVIVKEAGGLIFDPSGKDLDITSQRIAASNASLKELFAEALRLTGA

SEQ ID NO: 43210 - protein, 144 aa, Arabidopsis thaliana
  peptide (1)..(144): Ceres Seq. ID no. 12379504
MEELFTGVQGKGAFLNGKRIKVSAQSELLTALLVTEAGTKRDKATLDDTTNRINSLLTKVRSLRMSGSCALDLCGVACGRVDIFYELGFGGPWDIAAGIVIVKEAGGLIFDPSGKDLDITSQRIAASNASLKELFAEALRLTGA

SEQ ID NO: 43211 - DNA, 1072 bp, Arabidopsis thaliana
  misc_feature (1)..(1072): Ceres Seq. ID no. 13646026
  misc_feature (1)..(1072): Ortholog of  Ceres SEQ ID NO 13593955 as cited in SEQ ID NO 54278
  misc_feature (1)..(1072): Ortholog of  Ceres SEQ ID NO 13655302 as cited in SEQ ID NO 63307
  misc_feature (1)..(1072): Ortholog of  Ceres SEQ ID NO 13597380 as cited in SEQ ID NO 64054
  misc_feature (1)..(1072): Ortholog of  Ceres SEQ ID NO 12625474 as cited in SEQ ID NO 64169
  misc_feature (1)..(1072): Ortholog of  Ceres SEQ ID NO 13597502 as cited in SEQ ID NO 64681
  misc_feature (1)..(1072): Ortholog of  Ceres SEQ ID NO 13600397 as cited in SEQ ID NO 0
tgctaaacaagttgttagcatggcaacacattatttgtcaccatcaatattatgcattattttgaccactcttgtctccatcgccggagcaaaaatcccggcgattatagtcttcggtgactcttccgtagattccggcaataataacttcatatcaacaatggccagagccaattttgagccttacggtcgtgacttccctggtggtcgcgccaccggacgcttttgtaacggccgtctctcctccgatttcacttccgaggcttatggccttaaaccgaccgtgccagcctacctagatccgtcctataatatatctgattttgctaccggagtttgttttgcctccgccggcaccggttatgataattccacagccgatgtgcttggcgtgattccgttatggaaagaggtcgagtacttcaaggaataccaaagcaacctttccgcctatctcggccatcggagagctgccaaaatcatcagagaatctctgtacatagtaagcataggcaccaacgatttccttgagaactactacacattaccggacaggagatctcaattcagcatcagtcagtaccaagacttcctggtcgagattgctgaggtgttcttaaaggacatttacagacttggagctcggaaaatgtctttcactggaatctcacctatggggtgtctaccgctggagagagtgacaaatcttgacgacccttttagctgtgctcggagttataatgatttggctgtagatttcaatgggagattgagaagattggtgacaaaactgaatagagagcttactggaataaagatttatttcgctaatccttacgatatcatgtgggatattgttaccaaacctaatctttacggtctagagatatcaagttctgcctgttgcggtactggattgttcgagatgggatttctttgcggccaggacaatccgttaacttgcagtgatgccaataagttcgttttctgggacgcatttcacccgaccgagaggactaatcagattgtgtctgatcacttcttcaagcatctcaagaatctgtttcattga

SEQ ID NO: 43212 - protein, 356 aa, Arabidopsis thaliana
  peptide (1)..(356): Ceres Seq. ID no. 13646027
AKQVVSMATHYLSPSILCIILTTLVSIAGAKIPAIIVFGDSSVDSGNNNFISTMARANFEPYGRDFPGGRATGRFCNGRLSSDFTSEAYGLKPTVPAYLDPSYNISDFATGVCFASAGTGYDNSTADVLGVIPLWKEVEYFKEYQSNLSAYLGHRRAAKIIRESLYIVSIGTNDFLENYYTLPDRRSQFSISQYQDFLVEIAEVFLKDIYRLGARKMSFTGISPMGCLPLERVTNLDDPFSCARSYNDLAVDFNGRLRRLVTKLNRELTGIKIYFANPYDIMWDIVTKPNLYGLEISSSACCGTGLFEMGFLCGQDNPLTCSDANKFVFWDAFHPTERTNQIVSDHFFKHLKNLFH

SEQ ID NO: 43213 - protein, 350 aa, Arabidopsis thaliana
  peptide (1)..(350): Ceres Seq. ID no. 13646028
MATHYLSPSILCIILTTLVSIAGAKIPAIIVFGDSSVDSGNNNFISTMARANFEPYGRDFPGGRATGRFCNGRLSSDFTSEAYGLKPTVPAYLDPSYNISDFATGVCFASAGTGYDNSTADVLGVIPLWKEVEYFKEYQSNLSAYLGHRRAAKIIRESLYIVSIGTNDFLENYYTLPDRRSQFSISQYQDFLVEIAEVFLKDIYRLGARKMSFTGISPMGCLPLERVTNLDDPFSCARSYNDLAVDFNGRLRRLVTKLNRELTGIKIYFANPYDIMWDIVTKPNLYGLEISSSACCGTGLFEMGFLCGQDNPLTCSDANKFVFWDAFHPTERTNQIVSDHFFKHLKNLFH

SEQ ID NO: 43214 - protein, 303 aa, Arabidopsis thaliana
  peptide (1)..(303): Ceres Seq. ID no. 13646029
MARANFEPYGRDFPGGRATGRFCNGRLSSDFTSEAYGLKPTVPAYLDPSYNISDFATGVCFASAGTGYDNSTADVLGVIPLWKEVEYFKEYQSNLSAYLGHRRAAKIIRESLYIVSIGTNDFLENYYTLPDRRSQFSISQYQDFLVEIAEVFLKDIYRLGARKMSFTGISPMGCLPLERVTNLDDPFSCARSYNDLAVDFNGRLRRLVTKLNRELTGIKIYFANPYDIMWDIVTKPNLYGLEISSSACCGTGLFEMGFLCGQDNPLTCSDANKFVFWDAFHPTERTNQIVSDHFFKHLKNLFH

SEQ ID NO: 43215 - DNA, 1956 bp, Arabidopsis thaliana
  misc_feature (1)..(1956): Ceres Seq. ID no. 13499824
  misc_feature (1)..(1956): Ortholog of  Ceres SEQ ID NO 13662574 as cited in SEQ ID NO 64794
atgaactggcagctgtatgcaaaaaagtgtttaatttatctttcctttgggtttctcacggagtcacggttcctcgttcgtcctctcccgtcgtctctccgcactaaattgatgggcacatcatctgggtccaatcttcctcaccagatgctacctccacgtcagcaactacaaacatctctttcgcttgtatcttcagatccccacttgtcacggtctaattctggcattgtgcgtgaatcaccagctgaaagtgctagctctcaagaaacttggccaacctcaaaatctattatgggaaggaagacagatagcggaaagacagggcctgactctcatgatcaacatgtgatccgccatgtttccattgctgataaggtatcgctacgggacatagctagagagagacttgacatagtcgctgagagaatgcatcgattaccagaagaatatctcgaggagttaaagaatggtcttaaggctatccttgaaggaaatggtgcgcagcctatagatgagtttatgtttctgcagaagtttgtccagacgagatctgatttaacttcaaagacacttgtcagggctcaccgagtgcagcttgaagttcttgtggttataaacactggtatccaagcattcttgcacccaaacatcaatctctctcagtcatcactcatcgagatctttgtgtacaagagatgcagaaacatagcttgccaaaacgaactcccggctgatggttgtccctgtgagatatgcgctaataggaaaggcttctgcaacctgtgcatgtgtgtgatatgtaacaagtttgactttgcagtcaacacatgccgctggattggctgcgacgtgtgttctcattggactcatacggattgtgctattagggatggggagatttcgatgggagtttctcccaagagcgtatctgggatgggagaaatgctgttcaagtgtcgagcgtgcaaccatacttctgaattgctggggtgggtgaaagatgtgtttcagcactgtgcaccaaactgggatagggaatctttaatgaaggaacttgacttcgttagtaggattttccgtggaagcgaagatacaagaggccggaaactcttctggaagtgtgaggagcttatggagaagattaaaggtggactggctgaagcaacagcggccaagttgatactcatgtttttccaagaaattgaattggactctccaaagagccttgaaagcggagaaggtgggggtacgatagcacctcaagatgcatgcaaccgaattgctgaagttgtaaaggaaacactgaggaaaatggagatagtgggtgaggaaaagacgaggatgtacaagaaagcgcgaatggggcttgaggaatgcgagagagaggtagaagagaaagcaaagcaagtggcggaactgcagatggagaggcagaagaagaaacaacagatagaagaggtggagaggatagtgaggctgaagcaagcagaggcagagatgtttcagttaaaagcaaacgaggcaaaagtggaagcagagagattggaaaggattgtgaaagcgaaaaaggagaaaacagaagaggaatacgcaagtaactatttgaaactgaggctgagcgaggcggaggcagagaaagagtatctgtttgaaaagataaaagagcaggaaagtggtgggaatggtggtgaagcgtcacaagcagtgatgtactcaaagatcagagaaatgctgcatggatacaatgcatcgtcgccaagggtagatccaagatcaaaccagcgaaatcctttcagatccaatccttagatgtttgtattgtctctctttgtttgtattaaaaaaaaaatccgaatcaattaaggttggatttgtgtgtgaagtattgtggtctttgtattcaaattttgcacatgatcgtctatgttgggccataatgttatgcaagctttg

SEQ ID NO: 43216 - protein, 603 aa, Arabidopsis thaliana
  peptide (1)..(603): Ceres Seq. ID no. 13499825
MNWQLYAKKCLIYLSFGFLTESRFLVRPLPSSLRTKLMGTSSGSNLPHQMLPPRQQLQTSLSLVSSDPHLSRSNSGIVRESPAESASSQETWPTSKSIMGRKTDSGKTGPDSHDQHVIRHVSIADKVSLRDIARERLDIVAERMHRLPEEYLEELKNGLKAILEGNGAQPIDEFMFLQKFVQTRSDLTSKTLVRAHRVQLEVLVVINTGIQAFLHPNINLSQSSLIEIFVYKRCRNIACQNELPADGCPCEICANRKGFCNLCMCVICNKFDFAVNTCRWIGCDVCSHWTHTDCAIRDGEISMGVSPKSVSGMGEMLFKCRACNHTSELLGWVKDVFQHCAPNWDRESLMKELDFVSRIFRGSEDTRGRKLFWKCEELMEKIKGGLAEATAAKLILMFFQEIELDSPKSLESGEGGGTIAPQDACNRIAEVVKETLRKMEIVGEEKTRMYKKARMGLEECEREVEEKAKQVAELQMERQKKKQQIEEVERIVRLKQAEAEMFQLKANEAKVEAERLERIVKAKKEKTEEEYASNYLKLRLSEAEAEKEYLFEKIKEQESGGNGGEASQAVMYSKIREMLHGYNASSPRVDPRSNQRNPFRSNP

SEQ ID NO: 43217 - protein, 566 aa, Arabidopsis thaliana
  peptide (1)..(566): Ceres Seq. ID no. 13499826
MGTSSGSNLPHQMLPPRQQLQTSLSLVSSDPHLSRSNSGIVRESPAESASSQETWPTSKSIMGRKTDSGKTGPDSHDQHVIRHVSIADKVSLRDIARERLDIVAERMHRLPEEYLEELKNGLKAILEGNGAQPIDEFMFLQKFVQTRSDLTSKTLVRAHRVQLEVLVVINTGIQAFLHPNINLSQSSLIEIFVYKRCRNIACQNELPADGCPCEICANRKGFCNLCMCVICNKFDFAVNTCRWIGCDVCSHWTHTDCAIRDGEISMGVSPKSVSGMGEMLFKCRACNHTSELLGWVKDVFQHCAPNWDRESLMKELDFVSRIFRGSEDTRGRKLFWKCEELMEKIKGGLAEATAAKLILMFFQEIELDSPKSLESGEGGGTIAPQDACNRIAEVVKETLRKMEIVGEEKTRMYKKARMGLEECEREVEEKAKQVAELQMERQKKKQQIEEVERIVRLKQAEAEMFQLKANEAKVEAERLERIVKAKKEKTEEEYASNYLKLRLSEAEAEKEYLFEKIKEQESGGNGGEASQAVMYSKIREMLHGYNASSPRVDPRSNQRNPFRSNP

SEQ ID NO: 43218 - protein, 554 aa, Arabidopsis thaliana
  peptide (1)..(554): Ceres Seq. ID no. 13499827
MLPPRQQLQTSLSLVSSDPHLSRSNSGIVRESPAESASSQETWPTSKSIMGRKTDSGKTGPDSHDQHVIRHVSIADKVSLRDIARERLDIVAERMHRLPEEYLEELKNGLKAILEGNGAQPIDEFMFLQKFVQTRSDLTSKTLVRAHRVQLEVLVVINTGIQAFLHPNINLSQSSLIEIFVYKRCRNIACQNELPADGCPCEICANRKGFCNLCMCVICNKFDFAVNTCRWIGCDVCSHWTHTDCAIRDGEISMGVSPKSVSGMGEMLFKCRACNHTSELLGWVKDVFQHCAPNWDRESLMKELDFVSRIFRGSEDTRGRKLFWKCEELMEKIKGGLAEATAAKLILMFFQEIELDSPKSLESGEGGGTIAPQDACNRIAEVVKETLRKMEIVGEEKTRMYKKARMGLEECEREVEEKAKQVAELQMERQKKKQQIEEVERIVRLKQAEAEMFQLKANEAKVEAERLERIVKAKKEKTEEEYASNYLKLRLSEAEAEKEYLFEKIKEQESGGNGGEASQAVMYSKIREMLHGYNASSPRVDPRSNQRNPFRSNP

SEQ ID NO: 43219 - DNA, 1902 bp, Arabidopsis thaliana
  misc_feature (1)..(1902): Ceres Seq. ID no. 13645915
  misc_feature (1)..(1902): Ortholog of  Ceres SEQ ID NO 14316204 as cited in SEQ ID NO 59644
agagaaaactctcactctgcaacttcgtttctcttctcctttcttaaacctctcacgcggtttcagacttccgttcgcttaccgaagacggctcggaaattctttcctgaagaatcagcgacgaccttagcattatctacaagtcatcttttctgctagatctgttgtgtatactactcgcgatttcattttgaatttgttccagccaatgctgaaggctagactaaaatgagcgtgtcaaaagcatcgaggacgcaacattcgctcgttcctcttgcgaccctgattggtagggagctgaggagcgagaaagtagagaagccttttgtcaagtatggtcaagcagctctcgctaagaaaggagaggactactttttgatcaaaactgactgtgaaagggtacctggtgatccatcatcggctttttcagttttcgggatatttgacggacacaatggtaattcagctgccatatatactaaggaacatcttctggaaaacgtggtgagtgcaattcctcaaggcgcaagcagggatgagtggcttcaagctcttcctagggctttagttgctggctttgtgaaaactgacattgaatttcagcagaaaggggaaacttcaggaacaaccgtgacttttgttataattgatggttggactattactgttgcttctgttggtgactcgcgctgcatattggacacccaaggtggtgtggtttctctactgactgttgatcacaggctagaagagaatgttgaagaaagagaacgcataactgctagtggaggtgaggtcggaagactcaatgtatttggtggcaatgaggtcggcccactacgatgctggcctggtggtttatgtctttcgaggtccattggtgatacggatgtgggagaatttattgtccctataccacacgttaagcaagtgaaacttcctgatgctggagggagactcatcatagcttcagatggtatatgggatatactgtcttctgatgtggctgccaaagcttgtcgtggtttatctgccgatcttgctgctaaacttgttgttaaggaagcattgcgaacaaaagggttgaaagatgatacgacttgtgtagtcgttgacatagttccatctggtcatctttccttggctccagcacccatgaagaaacagaacccatttacctcatttctttcaaggaaaaaccatatggataccaacaacaaaaatggcaacaagctttctgctgttggagttgtagaagaattgtttgaagaaggttctgctgtgcttgcagatagattgggaaaggatcttctctcaaatacggaaactgggctcttaaaatgtgctgtatgccaaatagatgaatctccgagtgaagatttatcaagcaatgggggttccatcatttcctcagcatctaaacgatgggaaggtcccttcctatgcacaatatgcaagaaaaagaaagacgccatggaaggaaaaagaccaagcaaaggttcagtgactacttgaagccacttgcgtgcgtgaaaaaaatcataaaatccggtaagaaatttgtatgtttctcattttcttatctaacttcttctcttgtgctctgtaagagtagcttggttttgtgttcttttcccaggtattgattggaaagtagtagtaatagtagaagtttatgcaaatgtttgtagagagagagagagagagtgtgtgacaatagatccaattcttatccattgtttaagatttccctggattgcgttcttggcattatgctgaccatttaccttcgtagatgtgtttttgtttgggaaattgctgatatactaacaagagtttccaagttgtaagtagaattcatattttgttattgtcactcaatcctattgcactcattcattg

SEQ ID NO: 43220 - protein, 428 aa, Arabidopsis thaliana
  peptide (1)..(428): Ceres Seq. ID no. 13645916
MSVSKASRTQHSLVPLATLIGRELRSEKVEKPFVKYGQAALAKKGEDYFLIKTDCERVPGDPSSAFSVFGIFDGHNGNSAAIYTKEHLLENVVSAIPQGASRDEWLQALPRALVAGFVKTDIEFQQKGETSGTTVTFVIIDGWTITVASVGDSRCILDTQGGVVSLLTVDHRLEENVEERERITASGGEVGRLNVFGGNEVGPLRCWPGGLCLSRSIGDTDVGEFIVPIPHVKQVKLPDAGGRLIIASDGIWDILSSDVAAKACRGLSADLAAKLVVKEALRTKGLKDDTTCVVVDIVPSGHLSLAPAPMKKQNPFTSFLSRKNHMDTNNKNGNKLSAVGVVEELFEEGSAVLADRLGKDLLSNTETGLLKCAVCQIDESPSEDLSSNGGSIISSASKRWEGPFLCTICKKKKDAMEGKRPSKGSVTT

SEQ ID NO: 43221 - DNA, 1528 bp, Arabidopsis thaliana
  misc_feature (1)..(1528): Ceres Seq. ID no. 12394685
  misc_feature (1)..(1528): Ortholog of  Ceres SEQ ID NO 13597740 as cited in SEQ ID NO 64482
  misc_feature (1)..(1528): Ortholog of  Ceres SEQ ID NO 13596056 as cited in SEQ ID NO 68307
  misc_feature (1)..(1528): Ortholog of  Ceres SEQ ID NO 12388689 as cited in SEQ ID NO 0
aacgcattattgacacgtgtcttttcatttctcttcttccggcgtttttctctccgccgtttcgccaccgtacgtgacaatgtctgtttctctctccgccgcctctcacttactctgttcctccaccagagtctctctttcccccgccgtcacctcttcgtcctcgtcccctgtcgttgctctttcttcctctacatcgccacattctcttggaagcgtcgcatcttcttctctgtttcctcactcctccttcgtgcttcagaaaaaacatccgatcaatgggacgagcacgaggatgatttcaccaaaatgtgccgcttctgatgcagctcaattgataagcgctaaagaagatatcaaagttcttctccggactaagttttgccatcccatcttggttagattggggtggcacgatgctggtacttataacaagaatattgaggagtggccactgagaggtggagctaatggaagtcttaggtttgaggctgagcttaagcatgctgcaaatgctggtctgcttaatgctttaaagctcattcagcctctcaaagacaagtatcctaacatctcttatgcggacttattccagttagctagtgccacagcaatagaggaggctggtggtcctgatatcccgatgaaatatgggagagttgatgttgtagcacctgaacagtgtccagaagaaggaagactccctgatgctggacctccttcaccagctgatcatttgagagatgttttctacagaatgggacttgatgacaaggaaatagttgccttgtctggtgcacataccttagggagagccagaccagaccgtagtggttggggaaaacctgagacaaagtacacgaaaactggacctggagaagcaggaggacagtcatggacagtgaaatggctcaagttcgacaactcttatttcaaggatatcaaagaaaagagggacgacgatcttctggtgttacccactgatgcggcgctatttgaagatccttcattcaagaactatgcagagaagtatgctgaagatgtggctgcatttttcaaggactacgctgaagcccatgccaagcttagcaatctcggtgcaaaatttgatcctcccgagggcatagtcattgaaaacgttccagagaagttcgtagctgcaaagtattctacgggaaagaaggagctttcggattcgatgaaaaagaagataagagcagagtatgaagcaattggaggaagcccagataagccattacccacaaattacttcctcaacatcataattgccattggcgttttggtcctcttgtccactctctttggtggtaataacaactccgatttctctggtttctaattgacaaattatatattttgatttctcttacctacatacataattacgtggtgatcatatattccttgcaaacaaaaacatcattgtaaagtttgcttgaataaaatcaccttataaataacattgtttatttggtttttagaattttgagattagtgtgagtttctt

SEQ ID NO: 43222 - protein, 426 aa, Arabidopsis thaliana
  peptide (1)..(426): Ceres Seq. ID no. 12394686
MSVSLSAASHLLCSSTRVSLSPAVTSSSSSPVVALSSSTSPHSLGSVASSSLFPHSSFVLQKKHPINGTSTRMISPKCAASDAAQLISAKEDIKVLLRTKFCHPILVRLGWHDAGTYNKNIEEWPLRGGANGSLRFEAELKHAANAGLLNALKLIQPLKDKYPNISYADLFQLASATAIEEAGGPDIPMKYGRVDVVAPEQCPEEGRLPDAGPPSPADHLRDVFYRMGLDDKEIVALSGAHTLGRARPDRSGWGKPETKYTKTGPGEAGGQSWTVKWLKFDNSYFKDIKEKRDDDLLVLPTDAALFEDPSFKNYAEKYAEDVAAFFKDYAEAHAKLSNLGAKFDPPEGIVIENVPEKFVAAKYSTGKKELSDSMKKKIRAEYEAIGGSPDKPLPTNYFLNIIIAIGVLVLLSTLFGGNNNSDFSGF

SEQ ID NO: 43223 - protein, 354 aa, Arabidopsis thaliana
  peptide (1)..(354): Ceres Seq. ID no. 12394687
MISPKCAASDAAQLISAKEDIKVLLRTKFCHPILVRLGWHDAGTYNKNIEEWPLRGGANGSLRFEAELKHAANAGLLNALKLIQPLKDKYPNISYADLFQLASATAIEEAGGPDIPMKYGRVDVVAPEQCPEEGRLPDAGPPSPADHLRDVFYRMGLDDKEIVALSGAHTLGRARPDRSGWGKPETKYTKTGPGEAGGQSWTVKWLKFDNSYFKDIKEKRDDDLLVLPTDAALFEDPSFKNYAEKYAEDVAAFFKDYAEAHAKLSNLGAKFDPPEGIVIENVPEKFVAAKYSTGKKELSDSMKKKIRAEYEAIGGSPDKPLPTNYFLNIIIAIGVLVLLSTLFGGNNNSDFSGF

SEQ ID NO: 43224 - protein, 238 aa, Arabidopsis thaliana
  peptide (1)..(238): Ceres Seq. ID no. 12394688
MKYGRVDVVAPEQCPEEGRLPDAGPPSPADHLRDVFYRMGLDDKEIVALSGAHTLGRARPDRSGWGKPETKYTKTGPGEAGGQSWTVKWLKFDNSYFKDIKEKRDDDLLVLPTDAALFEDPSFKNYAEKYAEDVAAFFKDYAEAHAKLSNLGAKFDPPEGIVIENVPEKFVAAKYSTGKKELSDSMKKKIRAEYEAIGGSPDKPLPTNYFLNIIIAIGVLVLLSTLFGGNNNSDFSGF

SEQ ID NO: 43225 - DNA, 1522 bp, Arabidopsis thaliana
  misc_feature (1)..(1522): Ceres Seq. ID no. 13489540
  misc_feature (1)..(1522): Ortholog of  Ceres SEQ ID NO 14310713 as cited in SEQ ID NO 53582
ctctctcctccaacttggaacttcccgtcttcgatcttctcttctctctctcttcatcgcacgctgtgcccagccagctcaaaacactgcacttccgctttttatcaagatcaatctctaccaatacttagaaaagttctttcctttttgtcaaattctttcaatttctctcttcaattccctacgaattactcacttcggatccaatcagctctttatagcctctgcgtttgggagtcaatctttctctcttcgacaattaagggtttcgtataaagattgctgttttacgacaggattctgaataaggagaagaagggttggtttcatttggatggaaagtatatggtaggtctacacattaatatggaagcgcagattcatatacttgagcaggaagcttattctgctgtattaagagcttttcaagcacaggctgatgaattttcttgggataaagcaaccgtgatgacaaacctacgtaaagaattgaggatatctgatgatgaaaaccgacaactgttgaacaatgtccataatgatgatcttatcaaaagaataagagattcgagaccaagaggtggaaaccaggttgttagacatcagtccctcgatgttcatcctagtccgactttttcagcttctcggaagaaacagaagacgttccaatcctatccgtcgattggttctactagaagtaagtcattcaataaccgtgtagtatcagcaaatgaacctgcggaagctcttattggaagaaaagtgtggacaaaatggcctgaagacaacagcttttatgaagcagtagttacacaatacaatgcaaatgagggtcgacatgcgttggtatatgatataaacacagtgaatgagacatgggaatgggttgatcttaatgagattccaacgaaagatataagatgggatggagaggaagatggggtaactttgaatgtaggacatggcggtggaacaactcgtgggaatcgaaggaccttaagccatggtggtagagggagaggtccaagaactcagccaagaagagaacatttagcaacggaaaacggtggtgggaggaagtttttcggtgagattgaattgttcaacacagactcacttgtgaaagaggtcgagagagtttttgattcaaaccttcctgatccacatgagcttgataaggccaagaagctactcaaggaacatgaacaggcgcttattgctgccattgcaaggcttacggatgcttctgattacgaaagcgatggagaagaaccgtattcgcatgagcttccaatgctgctggggtgagtatgtatgacaccatcacccctaggaaaaatgactagcaatatttctttttcttctgttttgctttaagggatcccagaaaatgattttgttcatatatgatgaacaattagtagtattcttctaatttgtggtttcagaatgtatgaaaataatcgttaggaattttgtttgtaaaaacactatttttaaaaaaaaattctgaacttgtgtg

SEQ ID NO: 43226 - protein, 320 aa, Arabidopsis thaliana
  peptide (1)..(320): Ceres Seq. ID no. 13489541
MVGLHINMEAQIHILEQEAYSAVLRAFQAQADEFSWDKATVMTNLRKELRISDDENRQLLNNVHNDDLIKRIRDSRPRGGNQVVRHQSLDVHPSPTFSASRKKQKTFQSYPSIGSTRSKSFNNRVVSANEPAEALIGRKVWTKWPEDNSFYEAVVTQYNANEGRHALVYDINTVNETWEWVDLNEIPTKDIRWDGEEDGVTLNVGHGGGTTRGNRRTLSHGGRGRGPRTQPRREHLATENGGGRKFFGEIELFNTDSLVKEVERVFDSNLPDPHELDKAKKLLKEHEQALIAAIARLTDASDYESDGEEPYSHELPMLLG

SEQ ID NO: 43227 - protein, 313 aa, Arabidopsis thaliana
  peptide (1)..(313): Ceres Seq. ID no. 13489542
MEAQIHILEQEAYSAVLRAFQAQADEFSWDKATVMTNLRKELRISDDENRQLLNNVHNDDLIKRIRDSRPRGGNQVVRHQSLDVHPSPTFSASRKKQKTFQSYPSIGSTRSKSFNNRVVSANEPAEALIGRKVWTKWPEDNSFYEAVVTQYNANEGRHALVYDINTVNETWEWVDLNEIPTKDIRWDGEEDGVTLNVGHGGGTTRGNRRTLSHGGRGRGPRTQPRREHLATENGGGRKFFGEIELFNTDSLVKEVERVFDSNLPDPHELDKAKKLLKEHEQALIAAIARLTDASDYESDGEEPYSHELPMLLG

SEQ ID NO: 43228 - protein, 279 aa, Arabidopsis thaliana
  peptide (1)..(279): Ceres Seq. ID no. 13489543
MTNLRKELRISDDENRQLLNNVHNDDLIKRIRDSRPRGGNQVVRHQSLDVHPSPTFSASRKKQKTFQSYPSIGSTRSKSFNNRVVSANEPAEALIGRKVWTKWPEDNSFYEAVVTQYNANEGRHALVYDINTVNETWEWVDLNEIPTKDIRWDGEEDGVTLNVGHGGGTTRGNRRTLSHGGRGRGPRTQPRREHLATENGGGRKFFGEIELFNTDSLVKEVERVFDSNLPDPHELDKAKKLLKEHEQALIAAIARLTDASDYESDGEEPYSHELPMLLG

SEQ ID NO: 43229 - DNA, 1531 bp, Arabidopsis thaliana
  misc_feature (1)..(1531): Ceres Seq. ID no. 13493824
  misc_feature (1)..(1531): Ortholog of  Ceres SEQ ID NO 15173355 as cited in SEQ ID NO 61844
acctttctatctctctttctctcaaaatccaaaatgttgtaatttgcaattcttcagtttccgtttctctcctgagaaatttattgacttcaaaaaccctaaaaagacttgtgattgttcgtttctctaactcgaatgttgatcgtacgacggtgagtgatcgtagtacaatgacgaagaaatcacagccgcagattccgcctccattgtcccgtcgcggcggcgtcgtgtggctgggatggaaactcgtaatcgctttctccgtcgcgctttgccttcttgctcttcttcgaatccaactacagtacaattccttcacgacattgtcgtttccactctccgtcgcgagatctcagacaccgcttcacaaatactccggtgatcgtcccaagctcgctttccttttcttagctcgccgtgatctcccacttgattttatgtgggatagattcttcaagggagtggatcatgcgaatttctcaatttatatacattcagtacctggtttcgtgttcaatgaagaaactacacgatcacagtatttctataatcgccaattgaacaatagcattaaggtagtatggggagaatcaagcatgattgaagcagaaagattgttgcttgcatctgctttagaggatcactccaatcaaagatttgttcttctctctgacagatgtgctccattatatgactttggctatatatacaaatatcttatctcttcaccgaggagttttgtggatagttttcttcatactaaagagacacggtacagtgtgaaaatgtctcctgtcatacctgaagagaaatggcgaaaaggatcccagtggatagctttgatcagaagtcatgcagaggtcattgtaaatgatggtatcgtattcccagtttttaaggaattctgcaagagatgtccacctttaggtaccaatgaggcatggttgtttcttaaacagaagcgacgcaactgcatccccgatgaacactatgtgcaaacattgcttacgatgcaaggactagagagtgaaatggaacgaagaacagtgacatacactgtatggaacgtttcaggtacaaaatatgaagccaaatcttggcatcccgtcactttcacattggaaaactccggccctgaggaaataaaagaaataaagaaaatagaccatgtctattacgagtctgaatctcgaacggaatggtgtaaggcggattcgaaacccgtcccatgctttctctttgcaaggaagttcacgaatgaagctgctatgcgcattgtgagtgaaggactaataggatcatcagcaaacaaaaccttataactttgcaacagtgtaagcaagtaggtcaagcaacagagcgtatacatagagtaggaatagcattgatacattacaaacatccctcatgaggtttaatggtttatgattatatatgacgcttagtaaaaactaataatcattcttcatggataatcttgtgtttgggtgttaaaatttctatgtgtatatgtctgaagaaactggcttcg

SEQ ID NO: 43230 - protein, 439 aa, Arabidopsis thaliana
  peptide (1)..(439): Ceres Seq. ID no. 13493825
LSISLSLKIQNVVICNSSVSVSLLRNLLTSKTLKRLVIVRFSNSNVDRTTVSDRSTMTKKSQPQIPPPLSRRGGVVWLGWKLVIAFSVALCLLALLRIQLQYNSFTTLSFPLSVARSQTPLHKYSGDRPKLAFLFLARRDLPLDFMWDRFFKGVDHANFSIYIHSVPGFVFNEETTRSQYFYNRQLNNSIKVVWGESSMIEAERLLLASALEDHSNQRFVLLSDRCAPLYDFGYIYKYLISSPRSFVDSFLHTKETRYSVKMSPVIPEEKWRKGSQWIALIRSHAEVIVNDGIVFPVFKEFCKRCPPLGTNEAWLFLKQKRRNCIPDEHYVQTLLTMQGLESEMERRTVTYTVWNVSGTKYEAKSWHPVTFTLENSGPEEIKEIKKIDHVYYESESRTEWCKADSKPVPCFLFARKFTNEAAMRIVSEGLIGSSANKTL

SEQ ID NO: 43231 - protein, 383 aa, Arabidopsis thaliana
  peptide (1)..(383): Ceres Seq. ID no. 13493826
MTKKSQPQIPPPLSRRGGVVWLGWKLVIAFSVALCLLALLRIQLQYNSFTTLSFPLSVARSQTPLHKYSGDRPKLAFLFLARRDLPLDFMWDRFFKGVDHANFSIYIHSVPGFVFNEETTRSQYFYNRQLNNSIKVVWGESSMIEAERLLLASALEDHSNQRFVLLSDRCAPLYDFGYIYKYLISSPRSFVDSFLHTKETRYSVKMSPVIPEEKWRKGSQWIALIRSHAEVIVNDGIVFPVFKEFCKRCPPLGTNEAWLFLKQKRRNCIPDEHYVQTLLTMQGLESEMERRTVTYTVWNVSGTKYEAKSWHPVTFTLENSGPEEIKEIKKIDHVYYESESRTEWCKADSKPVPCFLFARKFTNEAAMRIVSEGLIGSSANKTL

SEQ ID NO: 43232 - protein, 294 aa, Arabidopsis thaliana
  peptide (1)..(294): Ceres Seq. ID no. 13493827
MWDRFFKGVDHANFSIYIHSVPGFVFNEETTRSQYFYNRQLNNSIKVVWGESSMIEAERLLLASALEDHSNQRFVLLSDRCAPLYDFGYIYKYLISSPRSFVDSFLHTKETRYSVKMSPVIPEEKWRKGSQWIALIRSHAEVIVNDGIVFPVFKEFCKRCPPLGTNEAWLFLKQKRRNCIPDEHYVQTLLTMQGLESEMERRTVTYTVWNVSGTKYEAKSWHPVTFTLENSGPEEIKEIKKIDHVYYESESRTEWCKADSKPVPCFLFARKFTNEAAMRIVSEGLIGSSANKTL

SEQ ID NO: 43233 - DNA, 546 bp, Arabidopsis thaliana
  misc_feature (1)..(546): Ceres Seq. ID no. 12481728
  misc_feature (1)..(546): Ortholog of  Ceres SEQ ID NO 13594525 as cited in SEQ ID NO 51190
  misc_feature (1)..(546): Ortholog of  Ceres SEQ ID NO 13596039 as cited in SEQ ID NO 62117
ctacgtgagagaagacgaaacacaaaagatgcagatcttcgtgaaaaccttgaccggcaagaccatcactctcgaggtcgagagcagcgacaccatcgacaatgtcaaggccaagatccaagacaaagaaggaatccctccggatcagcagagattgatcttcgccggaaagcagctcgaagatggccgtactttggctgactacaacatccagaaagaatctacacttcatcttgtgttgaggcttagaggaggtattattgagccttccttgatgatgcttgctcgtaagtacaatcaggataagatgatttgccgcaagtgctatgctcgtcttcacccaagagctgtcaactgcaggaagaagaagtgtggtcacagcaaccagttgaggcctaagaagaagatcaagtagagagactcttatcaagaatcccatctcttgcttgcttttttttgttgtcttccctttgatagggtttgtttttcttgtttcagtgactttctatgttaaaagataatgtcagtaaaaggatttggttttct

SEQ ID NO: 43234 - protein, 137 aa, Arabidopsis thaliana
  peptide (1)..(137): Ceres Seq. ID no. 12481729
YVREDETQKMQIFVKTLTGKTITLEVESSDTIDNVKAKIQDKEGIPPDQQRLIFAGKQLEDGRTLADYNIQKESTLHLVLRLRGGIIEPSLMMLARKYNQDKMICRKCYARLHPRAVNCRKKKCGHSNQLRPKKKIK

SEQ ID NO: 43235 - protein, 128 aa, Arabidopsis thaliana; identical to SEQ ID NO: 26134
  peptide (1)..(128): Ceres Seq. ID no. 12481730

SEQ ID NO: 43236 - DNA, 1202 bp, Arabidopsis thaliana
  misc_feature (1)..(1202): Ceres Seq. ID no. 13575150
  misc_feature (1)..(1202): Ortholog of  Ceres SEQ ID NO 14314050 as cited in SEQ ID NO 59952
  misc_feature (1)..(1202): Ortholog of  Ceres SEQ ID NO 13596474 as cited in SEQ ID NO 62169
  misc_feature (1)..(1202): Ortholog of  Ceres SEQ ID NO 13598714 as cited in SEQ ID NO 62656
  misc_feature (1)..(1202): Ortholog of  Ceres SEQ ID NO 13596969 as cited in SEQ ID NO 63375
  misc_feature (1)..(1202): Ortholog of  Ceres SEQ ID NO 13597519 as cited in SEQ ID NO 64759
  misc_feature (1)..(1202): Ortholog of  Ceres SEQ ID NO 14302388 as cited in SEQ ID NO 65655
  misc_feature (1)..(1202): Ortholog of  Ceres SEQ ID NO 15170183 as cited in SEQ ID NO 65667
  misc_feature (1)..(1202): Ortholog of  Ceres SEQ ID NO 13587054 as cited in SEQ ID NO 0
accaagtacaagtaaccgagttatatacaacgagtcatcaagagaaagaatccccccaaaaaatggccaagtcattgaacatccttattgcagctctctcgctcattgcattttctcctttttgtttgtgttccaaagcctatggaagtggcggctatctctttcctcagttttatgaccaatcgtgtcctaaagctcaagagattgttcagtccattgtcgctaaagcattcgaacatgatcctcgcatgcctgcctccttgctcagactccatttccacgactgtttcgtcaagggatgtgatgcttccatactattggacagcagtggaaccataatcagcgagaaacgatcaaaccctaacagaaactcagcccgtggtttcgaactcatcgaggaaatcaaacatgccttagaacaagagtgtcctgaaacagtttcttgcgctgatatcttggctctagccgctagagactcaactgttattacgggtggaccgagctgggaagtacctctaggaagaagagacgcgagaggagcaagcttgagtggttccaacaacgacattcctgctccaaacaacactttccaaaccatcctcactaagttcaagcgtcaaggccttgatctcgtcgatcttgtctccctctcaggaagtcacaccattggaaactcgaggtgcacaagtttccgacagaggttatacaatcaatccggcaacggaaagcctgatatgactcttagccaatactatgcaacactattgcgtcaacgatgtccgagatccggaggtgaccagaccctattcttcctcgacttcgcgacaccgttcaagtttgacaaccactacttcaagaacctgataatgtacaaaggtctattgagctctgatgagattctgttcacgaagaacaaacagtccaaggagctggtggagctatacgctgagaatcaagaggccttctttgagcagtttgctaaatcgatggtgaagatgggaaatatctctccgttgacaggcgccaagggagagatcaggcgtatctgtcggagggttaaccatgcttattaatacaaatccatctttataatttatgtacaatataatgctttcgtttctcattgagttttcaatttcttttggctttgtttgcatgagtgtgtatcatatgtttattactcaaatctgattttgtttcgg

SEQ ID NO: 43237 - protein, 356 aa, Arabidopsis thaliana
  peptide (1)..(356): Ceres Seq. ID no. 13575151
QVQVTELYTTSHQEKESPQKMAKSLNILIAALSLIAFSPFCLCSKAYGSGGYLFPQFYDQSCPKAQEIVQSIVAKAFEHDPRMPASLLRLHFHDCFVKGCDASILLDSSGTIISEKRSNPNRNSARGFELIEEIKHALEQECPETVSCADILALAARDSTVITGGPSWEVPLGRRDARGASLSGSNNDIPAPNNTFQTILTKFKRQGLDLVDLVSLSGSHTIGNSRCTSFRQRLYNQSGNGKPDMTLSQYYATLLRQRCPRSGGDQTLFFLDFATPFKFDNHYFKNLIMYKGLLSSDEILFTKNKQSKELVELYAENQEAFFEQFAKSMVKMGNISPLTGAKGEIRRICRRVNHAY

SEQ ID NO: 43238 - protein, 336 aa, Arabidopsis thaliana
  peptide (1)..(336): Ceres Seq. ID no. 13575152
MAKSLNILIAALSLIAFSPFCLCSKAYGSGGYLFPQFYDQSCPKAQEIVQSIVAKAFEHDPRMPASLLRLHFHDCFVKGCDASILLDSSGTIISEKRSNPNRNSARGFELIEEIKHALEQECPETVSCADILALAARDSTVITGGPSWEVPLGRRDARGASLSGSNNDIPAPNNTFQTILTKFKRQGLDLVDLVSLSGSHTIGNSRCTSFRQRLYNQSGNGKPDMTLSQYYATLLRQRCPRSGGDQTLFFLDFATPFKFDNHYFKNLIMYKGLLSSDEILFTKNKQSKELVELYAENQEAFFEQFAKSMVKMGNISPLTGAKGEIRRICRRVNHAY

SEQ ID NO: 43239 - protein, 274 aa, Arabidopsis thaliana
  peptide (1)..(274): Ceres Seq. ID no. 13575153
MPASLLRLHFHDCFVKGCDASILLDSSGTIISEKRSNPNRNSARGFELIEEIKHALEQECPETVSCADILALAARDSTVITGGPSWEVPLGRRDARGASLSGSNNDIPAPNNTFQTILTKFKRQGLDLVDLVSLSGSHTIGNSRCTSFRQRLYNQSGNGKPDMTLSQYYATLLRQRCPRSGGDQTLFFLDFATPFKFDNHYFKNLIMYKGLLSSDEILFTKNKQSKELVELYAENQEAFFEQFAKSMVKMGNISPLTGAKGEIRRICRRVNHAY

SEQ ID NO: 43240 - DNA, 1523 bp, Arabidopsis thaliana
  misc_feature (1)..(1523): Ceres Seq. ID no. 13646158
  misc_feature (1)..(1523): Ortholog of  Ceres SEQ ID NO 15168492 as cited in SEQ ID NO 58104
atcataatcatttacttcaaacaacaatctttgcttctctctgagtgatcatctttcttgttcaatggctggtcaaaagatactttctttactggttatagctcttgttgttacttttgcagctgcggctcggcttcttgatgaagaaaatgcattctcagctaccacaaccacccttggctcaggttcaggttccaccggaattggttttggtgcaggaacagggtcaagtggttcaggttccacgggattcggttttggtgcaggatcagggtcatctggttcaggttctactggaagcggtctcggtgcaggtacagggtcaataccatcaagtggttcaggtcctggtcttctaccaactgccagttctgttcctggttctttagcgggtggtggttcaggttccttgcctaccactggttcagccactggtgcaggtgcaggtaccggttcagctcttggaggtggtccaggtgctggctcagctcttggtggtggtgcgggtgccggtccagctcttggtggtggtgcgggtgccggtccagctcttggtggtggtgcaggtgctggttcagctcttggtggtggtggtgcaggtgctggtccagctcttggtggtggtggtgcaggtgctggtccagctcttggtggtggtgttgcaggttctggttcagctcttggtggtggtgcaagtgctggtcctgacaatacgttggtattttttatgcatgatatactcggtggttcaaatcccactgccagagccgtaactggagtcgtcgcaaatccggctttaagcgggcaacttccatttgctaaacccaacggcgcaaaccttcctgtaagcaacggagttccgtcaaacaacaacaacaatgggattgtcaacaacaacaatgtccctttcctcgttggactcggcggaaccacagctaacattctccagaacaacaataacggaaacaacattttaaatggtttccctgttgctagtggcggtcagctcccgagcggttctgctcttcagatgctaatgttcgggacaatgacagtaatcgatgatgaactaactgaaggccatgagctcggatctggcttactcgggaaagcgcagggatattatgtggcgagtgcaattgacggaactagccagacaatggctttcaccgcgatgtttgaaagcggcggttatgaagatagtataagcttctttggggttctcagaacagcggtatcagaatcgcatataggagtaatgggaggtaccggaaagtatgtgaatgcgaggggattcgcgattctgaagacgtttacaggatctagcgggacgcagcagaatcagccgcatcagttcactgatgggcttgagactgttgttgagtgtaccgtttatctttcttactagttttatttttcttcttttgttggggtttgggaatgtttggtgtgtatgttatgtgtgtcatttgtaatctaaatatgaaatttgtgtaagaaaattgtatgtacttttttttttt

SEQ ID NO: 43241 - protein, 447 aa, Arabidopsis thaliana
  peptide (1)..(447): Ceres Seq. ID no. 13646159
MAGQKILSLLVIALVVTFAAAARLLDEENAFSATTTTLGSGSGSTGIGFGAGTGSSGSGSTGFGFGAGSGSSGSGSTGSGLGAGTGSIPSSGSGPGLLPTASSVPGSLAGGGSGSLPTTGSATGAGAGTGSALGGGPGAGSALGGGAGAGPALGGGAGAGPALGGGAGAGSALGGGGAGAGPALGGGGAGAGPALGGGVAGSGSALGGGASAGPDNTLVFFMHDILGGSNPTARAVTGVVANPALSGQLPFAKPNGANLPVSNGVPSNNNNNGIVNNNNVPFLVGLGGTTANILQNNNNGNNILNGFPVASGGQLPSGSALQMLMFGTMTVIDDELTEGHELGSGLLGKAQGYYVASAIDGTSQTMAFTAMFESGGYEDSISFFGVLRTAVSESHIGVMGGTGKYVNARGFAILKTFTGSSGTQQNQPHQFTDGLETVVECTVYLSY

SEQ ID NO: 43242 - protein, 226 aa, Arabidopsis thaliana
  peptide (1)..(226): Ceres Seq. ID no. 13646160
MHDILGGSNPTARAVTGVVANPALSGQLPFAKPNGANLPVSNGVPSNNNNNGIVNNNNVPFLVGLGGTTANILQNNNNGNNILNGFPVASGGQLPSGSALQMLMFGTMTVIDDELTEGHELGSGLLGKAQGYYVASAIDGTSQTMAFTAMFESGGYEDSISFFGVLRTAVSESHIGVMGGTGKYVNARGFAILKTFTGSSGTQQNQPHQFTDGLETVVECTVYLSY

SEQ ID NO: 43243 - DNA, 1495 bp, Arabidopsis thaliana
  misc_feature (1)..(1495): Ceres Seq. ID no. 12394681
  misc_feature (1)..(1495): Ortholog of  Ceres SEQ ID NO 14308389 as cited in SEQ ID NO 55226
  misc_feature (1)..(1495): Ortholog of  Ceres SEQ ID NO 14308049 as cited in SEQ ID NO 66203
  misc_feature (1)..(1495): Ortholog of  Ceres SEQ ID NO 14313292 as cited in SEQ ID NO 67393
  misc_feature (1)..(1495): Ortholog of  Ceres SEQ ID NO 14313567 as cited in SEQ ID NO 68074
atctttggtttttcttcactgacaaaacccctaaaaatggccgactcattcgagctaattgtaacccgaaaagaacctgttctcgtctctccagcctccgaaactccaaaaggtctccattatctctcaaatctcgatcaaaacatcgccatcattgtcaaaacattctactacttcaaatcaaactcaagatccaacgaagaatcctatgaagtcatcaagaagtcactctccgaggttctcgttcactactatcctgccgcagggagactcacgatcagtcctgaaggaaagatcgctgtggattgcaccggagaaggagttgtagtggtggaagctgaggccaattgtgggatagagaagataaagaaggctatatcggagattgatcaaccagagactcttgaaaagttggtttacgacgttcccggtgctcggaatattctcgagattcctccagtggttgttcaggtgacaaatttcaagtgtggagggttcgtgctaggactaggcatgaaccacaatatgttcgatggtatcgcagccatggagttcctcaactcttgggccgagacggctcgtggccttcctctctccgttccacctttcttggaccgcacacttctccgaccacgaaccccaccaaagatcgaattcccacacaacgagttcgaggacctcgaagacatctccggcaccggaaaactctactccgacgagaaactcgtctacaaatccttcctcttcggacccgaaaaactcgagaggcttaagatcatggcagagacgagatccacgacttttcaaaccctaaccgggtttctgtggagagctcgttgtcaagccttagggcttaaacctgatcaacggatcaagcttctctttgctgcagatggaaggtcgagattcgttccggaacttcctaaaggatattccggtaacgggattgtgttcacttattgcgttacaacggcaggtgaagtgactttaaaccctctttctcattcagtgtgtttggtcaaaagagccgttgaaatggtcaacgacggtttcatgaggtcagcgattgattactttgaggtgactcgagctaggccgagcctaacggcaacacttctgatcacgtcgtgggcaaaactgtcgtttcatactaaggatttcggttggggtgaaccggttgtatctggaccggtcggtttacctgagaaggaagtgattctgtttctgccatgtggtagtgacacgaagagtatcaatgtgctgcttggacttcctggctcggctatgaaagtgttccaagggattatggatatatgaatcattaaaattatttatggtttaatgtttgaatttaaattaactatgatttaaaaagcaaataatgatgatatatcaattacgtgtttgtggtcgtatgaaatattgttcgtcggtggagcaaaaatgtaactaagatgttaaagtatcaagtttaataaagaaagctattgtgttt

SEQ ID NO: 43244 - protein, 438 aa, Arabidopsis thaliana
  peptide (1)..(438): Ceres Seq. ID no. 12394682
IFGFSSLTKPLKMADSFELIVTRKEPVLVSPASETPKGLHYLSNLDQNIAIIVKTFYYFKSNSRSNEESYEVIKKSLSEVLVHYYPAAGRLTISPEGKIAVDCTGEGVVVVEAEANCGIEKIKKAISEIDQPETLEKLVYDVPGARNILEIPPVVVQVTNFKCGGFVLGLGMNHNMFDGIAAMEFLNSWAETARGLPLSVPPFLDRTLLRPRTPPKIEFPHNEFEDLEDISGTGKLYSDEKLVYKSFLFGPEKLERLKIMAETRSTTFQTLTGFLWRARCQALGLKPDQRIKLLFAADGRSRFVPELPKGYSGNGIVFTYCVTTAGEVTLNPLSHSVCLVKRAVEMVNDGFMRSAIDYFEVTRARPSLTATLLITSWAKLSFHTKDFGWGEPVVSGPVGLPEKEVILFLPCGSDTKSINVLLGLPGSAMKVFQGIMDI

SEQ ID NO: 43245 - protein, 426 aa, Arabidopsis thaliana
  peptide (1)..(426): Ceres Seq. ID no. 12394683
MADSFELIVTRKEPVLVSPASETPKGLHYLSNLDQNIAIIVKTFYYFKSNSRSNEESYEVIKKSLSEVLVHYYPAAGRLTISPEGKIAVDCTGEGVVVVEAEANCGIEKIKKAISEIDQPETLEKLVYDVPGARNILEIPPVVVQVTNFKCGGFVLGLGMNHNMFDGIAAMEFLNSWAETARGLPLSVPPFLDRTLLRPRTPPKIEFPHNEFEDLEDISGTGKLYSDEKLVYKSFLFGPEKLERLKIMAETRSTTFQTLTGFLWRARCQALGLKPDQRIKLLFAADGRSRFVPELPKGYSGNGIVFTYCVTTAGEVTLNPLSHSVCLVKRAVEMVNDGFMRSAIDYFEVTRARPSLTATLLITSWAKLSFHTKDFGWGEPVVSGPVGLPEKEVILFLPCGSDTKSINVLLGLPGSAMKVFQGIMDI

SEQ ID NO: 43246 - protein, 267 aa, Arabidopsis thaliana
  peptide (1)..(267): Ceres Seq. ID no. 12394684
MNHNMFDGIAAMEFLNSWAETARGLPLSVPPFLDRTLLRPRTPPKIEFPHNEFEDLEDISGTGKLYSDEKLVYKSFLFGPEKLERLKIMAETRSTTFQTLTGFLWRARCQALGLKPDQRIKLLFAADGRSRFVPELPKGYSGNGIVFTYCVTTAGEVTLNPLSHSVCLVKRAVEMVNDGFMRSAIDYFEVTRARPSLTATLLITSWAKLSFHTKDFGWGEPVVSGPVGLPEKEVILFLPCGSDTKSINVLLGLPGSAMKVFQGIMDI

SEQ ID NO: 43247 - DNA, 1497 bp, Arabidopsis thaliana
  misc_feature (1)..(1497): Ceres Seq. ID no. 12336172
  misc_feature (1)..(1497): Ortholog of  Ceres SEQ ID NO 14304654 as cited in SEQ ID NO 53301
  misc_feature (1)..(1497): Ortholog of  Ceres SEQ ID NO 15172291 as cited in SEQ ID NO 55046
  misc_feature (1)..(1497): Ortholog of  Ceres SEQ ID NO 13658153 as cited in SEQ ID NO 66326
  misc_feature (1)..(1497): Ortholog of  Ceres SEQ ID NO 14303011 as cited in SEQ ID NO 67226
ttaaccttctgcttcatcaaaaagaaagagacacaaagagagagagagatggaggtaatgcgagttcttcacatgaacaaaggaaacggggaaacaagttatgccaagaactccaccgctcagagcaacataatatctctaggcagaagagtaatggacgaggccttgaagaagttaatgatgagcaattcagagatttcgagcattggaatcgccgacttaggctgctcctccggtccgaacagtctcttgtccatctccaacatagttgacacgatccacaacttgtgtcctgacctcgaccgtccagtccctgagctcagagtctctctcaacgacctccctagcaatgacttcaactacatatgtgcttctttgccagagttttacgaccgggttaataataacaaggagggtttagggttcggtcgtggaggaggagaatcgtgttttgtgtcggccgtcccaggttcgttctacggacgtttgtttcctcgccggagccttcactttgtgcattcttcttctagtttacattggttgtctcaggttccatgtcgtgaggcggagaaggaagacaggacaataacagctgatttagaaaacatggggaaaatatacatatcaaagacaagtcctaagagtgcacataaagcttatgctcttcaattccaaactgatttcttggtttttttgaggtcacgatctgaggagttggtcccgggaggccgaatggttttatcgttccttggtagaagatcactggatcccacaaccgaagagagttgctatcaatgggaactcctagctcaagctcttatgtccatggccaaagagggtatcatcgaggaagagaagatcgatgctttcaacgctccttactatgctgcgagctccgaagagttgaaaatggtgatagagaaagaagggtcattttcgatcgataggcttgagataagtccgattgattgggaaggtgggagtatcagtgaggagagttatgaccttgcaataaggtccaaacccgaagccctagctagtggccgaagagtgtctaataccataagagctgtggtcgagccgatgctagaacctactttcggtgaaaatgtgatggacgagctttttgaaaggtatgcaaagatcgtgggagagtacttctatgtaagctcgccacgatacgctattgttattctttcgctcgttagaaccggttgatcgtgttataacatatgccaatatacatgtctttgggcctacaatgacatgatttggtagttttctaatcaagcatatgtaatataatttgcttcgagaataaaataataaaataaagtgtgatgttacggtagacccttttttttttttcttcatttacggtagacctatagtattaaaacaaatagaatcagctggttcggaccttgaaatgagagagcttggatgcatgtagacgcattagtcgtgaattattcaaatagaactaccttttgggcc

SEQ ID NO: 43248 - protein, 405 aa, Arabidopsis thaliana
  peptide (1)..(405): Ceres Seq. ID no. 12336173
LTFCFIKKKETQREREMEVMRVLHMNKGNGETSYAKNSTAQSNIISLGRRVMDEALKKLMMSNSEISSIGIADLGCSSGPNSLLSISNIVDTIHNLCPDLDRPVPELRVSLNDLPSNDFNYICASLPEFYDRVNNNKEGLGFGRGGGESCFVSAVPGSFYGRLFPRRSLHFVHSSSSLHWLSQVPCREAEKEDRTITADLENMGKIYISKTSPKSAHKAYALQFQTDFLVFLRSRSEELVPGGRMVLSFLGRRSLDPTTEESCYQWELLAQALMSMAKEGIIEEEKIDAFNAPYYAASSEELKMVIEKEGSFSIDRLEISPIDWEGGSISEESYDLAIRSKPEALASGRRVSNTIRAVVEPMLEPTFGENVMDELFERYAKIVGEYFYVSSPRYAIVILSLVRTG

SEQ ID NO: 43249 - protein, 389 aa, Arabidopsis thaliana
  peptide (1)..(389): Ceres Seq. ID no. 12336174
MEVMRVLHMNKGNGETSYAKNSTAQSNIISLGRRVMDEALKKLMMSNSEISSIGIADLGCSSGPNSLLSISNIVDTIHNLCPDLDRPVPELRVSLNDLPSNDFNYICASLPEFYDRVNNNKEGLGFGRGGGESCFVSAVPGSFYGRLFPRRSLHFVHSSSSLHWLSQVPCREAEKEDRTITADLENMGKIYISKTSPKSAHKAYALQFQTDFLVFLRSRSEELVPGGRMVLSFLGRRSLDPTTEESCYQWELLAQALMSMAKEGIIEEEKIDAFNAPYYAASSEELKMVIEKEGSFSIDRLEISPIDWEGGSISEESYDLAIRSKPEALASGRRVSNTIRAVVEPMLEPTFGENVMDELFERYAKIVGEYFYVSSPRYAIVILSLVRTG

SEQ ID NO: 43250 - protein, 386 aa, Arabidopsis thaliana
  peptide (1)..(386): Ceres Seq. ID no. 12336175
MRVLHMNKGNGETSYAKNSTAQSNIISLGRRVMDEALKKLMMSNSEISSIGIADLGCSSGPNSLLSISNIVDTIHNLCPDLDRPVPELRVSLNDLPSNDFNYICASLPEFYDRVNNNKEGLGFGRGGGESCFVSAVPGSFYGRLFPRRSLHFVHSSSSLHWLSQVPCREAEKEDRTITADLENMGKIYISKTSPKSAHKAYALQFQTDFLVFLRSRSEELVPGGRMVLSFLGRRSLDPTTEESCYQWELLAQALMSMAKEGIIEEEKIDAFNAPYYAASSEELKMVIEKEGSFSIDRLEISPIDWEGGSISEESYDLAIRSKPEALASGRRVSNTIRAVVEPMLEPTFGENVMDELFERYAKIVGEYFYVSSPRYAIVILSLVRTG

SEQ ID NO: 43251 - DNA, 1353 bp, Arabidopsis thaliana
  misc_feature (1)..(1353): Ceres Seq. ID no. 13645962
  misc_feature (1)..(1353): Ortholog of  Ceres SEQ ID NO 13623732 as cited in SEQ ID NO 0
agacaagtcaagagagagagatagttctgacttctgacagagactcatggcggaagcttgcggagtgagaaggattaagctaggaagccaaggccttgaggtatcggcgcaaggtcttggttgcatgggtctctctgctttctacggtactcccaagccggaaaccgaagctatcgctctcatccaccacgccattcactccggcgtcactttccttgacacctccgatatctacggtcctgagaccaacgagcttctcctcagcaaggctctcaaggatggggtgagagaaaaagtggaacttgcgaccaaatatggaatcaggtatgcagaggggaaagtagagtttaagggagatcctgcttatgtaagagctgcgtgtgaggctagtttaatgcgagtagatgttgcctgcattgatctctattatcagcatcgaattgatactcgtgtccctatcgaaatcactattggagagctgaagaagctagttgaagaaggtaaaataaagtatatcggtttgtctgaagcttcagcttcaactatcagaagagcacatgctgttcacccgataaccgctctgcaaatagaatggtccttatggtcgagagacgtggaagaagatataattccaacctgcagggaacttgggattggaattgttgcttacagtcctctgggacgaggtttctttgcttcaggacccaagcttgttgagaacctagacaataatgacgtcagaaaggcaaactctaccaagattccaacaggaaaacttagaccacaacaagattctctttgagaaggtttctgcaatgtctgagaagaaaggatgcactcctgcacaactagcccttgcatgggttcatcaccagggagatgatgtttgccccatcccaggaaccactaagattgaaaacctcaaccagaacattggagctttatcagtgaaacttactcccgaagagatgtctgagctcgaatcccttgcacaaccaggttttgtgaaaggagaaagatccattagcatcctgaccacgttcaaaaactctgagactccaccattgtcttcttggaaagccgcttaaaatcgtctgagtttctctgattgttgtggggttcatgtcatttaagtggtctaagttatgtcagctagatcaaggtaataaaagtgctgtgtcttcgagagtggattatggtaggttcattcccagggaaagccaaaactatcaagggttgatgcctttaagagtaaataatgtatagagttccccaagtgagaacttcaatttacatttcatacattttgaccaaactctataaagaaagttatgtttagactttttttttgcc

SEQ ID NO: 43252 - protein, 251 aa, Arabidopsis thaliana
  peptide (1)..(251): Ceres Seq. ID no. 13645963
MAEACGVRRIKLGSQGLEVSAQGLGCMGLSAFYGTPKPETEAIALIHHAIHSGVTFLDTSDIYGPETNELLLSKALKDGVREKVELATKYGIRYAEGKVEFKGDPAYVRAACEASLMRVDVACIDLYYQHRIDTRVPIEITIGELKKLVEEGKIKYIGLSEASASTIRRAHAVHPITALQIEWSLWSRDVEEDIIPTCRELGIGIVAYSPLGRGFFASGPKLVENLDNNDVRKANSTKIPTGKLRPQQDSL

SEQ ID NO: 43253 - protein, 225 aa, Arabidopsis thaliana
  peptide (1)..(225): Ceres Seq. ID no. 13645964
MGLSAFYGTPKPETEAIALIHHAIHSGVTFLDTSDIYGPETNELLLSKALKDGVREKVELATKYGIRYAEGKVEFKGDPAYVRAACEASLMRVDVACIDLYYQHRIDTRVPIEITIGELKKLVEEGKIKYIGLSEASASTIRRAHAVHPITALQIEWSLWSRDVEEDIIPTCRELGIGIVAYSPLGRGFFASGPKLVENLDNNDVRKANSTKIPTGKLRPQQDSL

SEQ ID NO: 43254 - protein, 135 aa, Arabidopsis thaliana
  peptide (1)..(135): Ceres Seq. ID no. 13645965
MRVDVACIDLYYQHRIDTRVPIEITIGELKKLVEEGKIKYIGLSEASASTIRRAHAVHPITALQIEWSLWSRDVEEDIIPTCRELGIGIVAYSPLGRGFFASGPKLVENLDNNDVRKANSTKIPTGKLRPQQDSL

SEQ ID NO: 43255 - DNA, 1363 bp, Arabidopsis thaliana
  misc_feature (1)..(1363): Ceres Seq. ID no. 12324754
  misc_feature (1)..(1363): Ortholog of  Ceres SEQ ID NO 15177870 as cited in SEQ ID NO 52373
  misc_feature (1)..(1363): Ortholog of  Ceres SEQ ID NO 13582380 as cited in SEQ ID NO 56782
aaaggcagcacaataatactgtctaaatgcttctctactttctcatcacttgtctctctttctttttctttaccaaatctctttctcttcctccatgggcatctgaaaccaaaaccttgctctccttctacttcatcaagaatccctttatgaacaccctacatcagaccaaacacgatccagcctctccggtgatcgaccaaatgtcggttcttgacctccctgagctggctcttgactgcattcttgaccttcttccaccctctggactctgcagcatggctagggtttgtagctccttgagggagagatgtgttagtgatcatctatgggagaaacatttgaagaccaaatggggcaaaatccttggccctgctgctcacagagagtggcaatgctatatctcctcttccacatatcatcttgattctcctcatcatcaaactgggaatcttggttttgccaaaatcatctctctgatccgatctctttcatccgttttccgagaggataaacaaaggaggggatatgcatcttctctgccacttgattccagcatgagctgctacctctcccttgaaacaggtcgtttttggttcccagctcaagtttacaaccgtgagaatggacatgtagggttcatgttgtcatgctatgatgcggagctcagctatgatactcacacggatacgttccaagccaggtatccaccacatggtagacgagcatctgcgattgaaaagggtgtgacatgggatagaataagagcagctcccattgatgcatcacctcatcttctccatgtatcagattctttaaaagagttgaaacctggagatcacatcgaaatccagtggagaaggaacaaagagttcccatatggatggtggtatggtcttgttcgccacttggaatcctgtgatggagatcataaccattgccattgccatcttagtgagacggtagtgttggaattcaaccagtacacagtcggatcaaggtggagaagaacgatgatcatgagagatcataaagaggaaggtaacgaagaagacgggttctatggaggaatccgaaagctaaattgtaaagaagagattgcaatgtggaaacgtcactggccttgctccatcttggaatagcattaaagaagctttgcttaaacacatggggaaagatattacacatcactatactgagagtaggttgttaaatttagacgtctattctcttttatccaatgtatggttgatcgtgaattatttgttgggaataaagtctatacgtgaaattattgtgtcacttcgatttgagaaatattgtgttgtatagggaaaacttaatacaattgatttgaatactc

SEQ ID NO: 43256 - protein, 371 aa, Arabidopsis thaliana
  peptide (1)..(371): Ceres Seq. ID no. 12324755
MLLYFLITCLSFFFFTKSLSLPPWASETKTLLSFYFIKNPFMNTLHQTKHDPASPVIDQMSVLDLPELALDCILDLLPPSGLCSMARVCSSLRERCVSDHLWEKHLKTKWGKILGPAAHREWQCYISSSTYHLDSPHHQTGNLGFAKIISLIRSLSSVFREDKQRRGYASSLPLDSSMSCYLSLETGRFWFPAQVYNRENGHVGFMLSCYDAELSYDTHTDTFQARYPPHGRRASAIEKGVTWDRIRAAPIDASPHLLHVSDSLKELKPGDHIEIQWRRNKEFPYGWWYGLVRHLESCDGDHNHCHCHLSETVVLEFNQYTVGSRWRRTMIMRDHKEEGNEEDGFYGGIRKLNCKEEIAMWKRHWPCSILE

SEQ ID NO: 43257 - protein, 330 aa, Arabidopsis thaliana
  peptide (1)..(330): Ceres Seq. ID no. 12324756
MNTLHQTKHDPASPVIDQMSVLDLPELALDCILDLLPPSGLCSMARVCSSLRERCVSDHLWEKHLKTKWGKILGPAAHREWQCYISSSTYHLDSPHHQTGNLGFAKIISLIRSLSSVFREDKQRRGYASSLPLDSSMSCYLSLETGRFWFPAQVYNRENGHVGFMLSCYDAELSYDTHTDTFQARYPPHGRRASAIEKGVTWDRIRAAPIDASPHLLHVSDSLKELKPGDHIEIQWRRNKEFPYGWWYGLVRHLESCDGDHNHCHCHLSETVVLEFNQYTVGSRWRRTMIMRDHKEEGNEEDGFYGGIRKLNCKEEIAMWKRHWPCSILE

SEQ ID NO: 43258 - protein, 312 aa, Arabidopsis thaliana
  peptide (1)..(312): Ceres Seq. ID no. 12324757
MSVLDLPELALDCILDLLPPSGLCSMARVCSSLRERCVSDHLWEKHLKTKWGKILGPAAHREWQCYISSSTYHLDSPHHQTGNLGFAKIISLIRSLSSVFREDKQRRGYASSLPLDSSMSCYLSLETGRFWFPAQVYNRENGHVGFMLSCYDAELSYDTHTDTFQARYPPHGRRASAIEKGVTWDRIRAAPIDASPHLLHVSDSLKELKPGDHIEIQWRRNKEFPYGWWYGLVRHLESCDGDHNHCHCHLSETVVLEFNQYTVGSRWRRTMIMRDHKEEGNEEDGFYGGIRKLNCKEEIAMWKRHWPCSILE

SEQ ID NO: 43259 - DNA, 1190 bp, Arabidopsis thaliana
  misc_feature (1)..(1190): Ceres Seq. ID no. 12651668
  misc_feature (1)..(1190): Ortholog of  Ceres SEQ ID NO 13503549 as cited in SEQ ID NO 65414
gaaatcctagctgaagtctatgctccataatcaaatccagttcatcagagatcaaagatggctattgcacgaactggagtttatgttgatgattaccttgagtagctacaaagattactaaacacagttcgcgaactagacgagagatctcaatcgcttataaatcagacaagacagcaaactaagtattgcttagggcttgcttcacagagttctaaaaagggtaatggtaatcattacaataatggtggtcttgatgaagaggaaacgattgagaaaatgcgtaaagagattgagtctagtcaggaaaatgcgttaagtttgtgtaccgagaaggttttattggcccgacaagcgtatgatcttatagatagtcatgtaaaacgacttgatgaagatctgaataattttgcagaagatttaaagcaagagggaaaaattccaccagacgagccctctgttcttcctccactacctatagttcctaaagcggaaaagcgtaagtccttctatggcacacctcagcccaagaagattgattatagagatagagactgggatcgtgacagggattttgagctcatgcctcctccaggaagcaatcggaaagaccttatgccaattgaagagcagccaatcgatccaaacgaaccaacttactgtgtctgccatcaggtgtcctttggagacatgattgcctgtgacaatgagaattgccaaggaggtgaatggtttcactatacatgcgttggcctcacacctgagaccagattcaaagggaaatggtactgccccacctgcagactcctcccacagtcacactaatatcatttgtacctgtgagaaggtgccactggcatcttctttggcaccttcccttcatgaccaatgccaccaaactcatctttcttgttacccaacatctagcaagtgcaagtagaagcaaactttagatggagaaatcatcatgttttgtaaacctcgggttaattcgtggagcatatattttgtatatcaattgtatttgggtattggtgggcattttccgttttattctactagtatcgatatttacatctgcttctttctttcttttttcccctcaaaccatgagcctttgtattgatcaaatgacatgtacaaaggttttgttcatcagaaggaatttcactaaaataaaaaattgcttg

SEQ ID NO: 43260 - protein, 181 aa, Arabidopsis thaliana
  peptide (1)..(181): Ceres Seq. ID no. 12651669
MRKEIESSQENALSLCTEKVLLARQAYDLIDSHVKRLDEDLNNFAEDLKQEGKIPPDEPSVLPPLPIVPKAEKRKSFYGTPQPKKIDYRDRDWDRDRDFELMPPPGSNRKDLMPIEEQPIDPNEPTYCVCHQVSFGDMIACDNENCQGGEWFHYTCVGLTPETRFKGKWYCPTCRLLPQSH

SEQ ID NO: 43261 - DNA, 1883 bp, Arabidopsis thaliana; identical to SEQ ID NO: 27101
  misc_feature (1)..(1883): Ceres Seq. ID no. 12482898
  misc_feature (1)..(1883): Ortholog of  Ceres SEQ ID NO 15179918 as cited in SEQ ID NO 57077

SEQ ID NO: 43262 - protein, 543 aa, Arabidopsis thaliana; identical to SEQ ID NO: 27102
  peptide (1)..(543): Ceres Seq. ID no. 12482899

SEQ ID NO: 43263 - protein, 531 aa, Arabidopsis thaliana; identical to SEQ ID NO: 27103
  peptide (1)..(531): Ceres Seq. ID no. 12482900

SEQ ID NO: 43264 - protein, 364 aa, Arabidopsis thaliana; identical to SEQ ID NO: 27104
  peptide (1)..(364): Ceres Seq. ID no. 12482901

SEQ ID NO: 43265 - DNA, 1902 bp, Arabidopsis thaliana
  misc_feature (1)..(1902): Ceres Seq. ID no. 12336522
  misc_feature (1)..(1902): Ortholog of  Ceres SEQ ID NO 13656490 as cited in SEQ ID NO 65717
atcgaaattttggattcgaacgtgtggatcgctggaaaaattaaactttagggtcgctagattacgattgcttcgctttttagtagtagtaggctacaatcgattggcaaacatctctatatcggccataactccgtcaagctctgcagaggctgcttcatcagtattgagagacttcctggtgattgattctcatgtctatgtctgagtttggcattgtctacgccatccatatcatcaccgtccaattcggctccgtcgtctcgaaagtttgtgaatgtcttctacgtaaaggacctctttcctcacgagacatctctcgtttagctgaatcagatatcaaccataacaaagttaaagatattctctatctcttgattcagcacaattgtgttcaagctttctccattgaacctcctgatggttctgagagcaaagctattgtacagtatattgtgttgtttaacaacattctgcatcgtgtgaggtataacaagttttcgaggattgtaaacgaagaacttgactccaagtgcggtgcagttcttgatggtttacttagtaacggtaggcttaccttgggacagtttattgaaagagatagagattcaggaaatacgataggttctgaagcaatcagagattctcttcagaaattggttgctgcccgttttgttgagcgcattccttctcccgaacctgttcttggaaacaaagaaaaagagccggcaaagagaagaggcgctaaagctgccaagattcttaaagaaccagaaaccttggaggaacaagttgttgaagcagcaactccagttgacgcaataaggtttccacttatattcgaagaagattccaattcatctttagcagatgacaatagcaacatcactgaggggaagcgtaaacaacgtgatgtggacacatcagattcgagcagtggagtaatttggcgtcctaattttgaggagttcatccaccgccttagacataaggcgtgtgtggagatagtgaaagagcgccgggatgaaggatgtgccattgtcttgagggcaatgttagaagtaggaagatcgcaagagaagaaggtgaaaacagacaattcggctccaatgtcagttggttccatttatgaagaagttattaagacagaagcaggtcgcactatgttacaagagcgagttgaagcatgccttgaccaattgagtgctacgtcttcttatctaccagcatttgtgaacgaagtgaatgattcatacatagttgattataaatccattatcagcgtagcacagaaagatgagatagaggcagtagtgatgagaagatatgggaaagaagctttcagaatgttcagatacttatcacaggaagggcgttttgttgagaccgataagattgctgatgccgcgctgactgaaaagaaagatacaccgcaattccttttaaagatgtggaaagacggatacttacatatgcagaaattggcggtcacagctccgggtatgtatacaccgtttctgttgtggaaggtaaacaagttgattgtgacaactcaaatgttggatgagatgtaccatgcgtcccttaacttgagtcttaggttggcccatgagttagaagccgaaaaagagttgctgttgttgccattagataaactggaaggaccattaaaggagagactgaaaaaggtcaaagccaagaggctgttactctcttccactatgtttaaacttgatgatgccattatgctttttcatgacttttaaactcatacattcaaaaactaatttcttttggtcgatttagttcacattgtcttctagcattttttttttttttttgacataatgagaagttgtaactttgaaggtaattgatactgtttcgagagaaatgttgttt

SEQ ID NO: 43266 - protein, 523 aa, Arabidopsis thaliana
  peptide (1)..(523): Ceres Seq. ID no. 12336523
MSMSEFGIVYAIHIITVQFGSVVSKVCECLLRKGPLSSRDISRLAESDINHNKVKDILYLLIQHNCVQAFSIEPPDGSESKAIVQYIVLFNNILHRVRYNKFSRIVNEELDSKCGAVLDGLLSNGRLTLGQFIERDRDSGNTIGSEAIRDSLQKLVAARFVERIPSPEPVLGNKEKEPAKRRGAKAAKILKEPETLEEQVVEAATPVDAIRFPLIFEEDSNSSLADDNSNITEGKRKQRDVDTSDSSSGVIWRPNFEEFIHRLRHKACVEIVKERRDEGCAIVLRAMLEVGRSQEKKVKTDNSAPMSVGSIYEEVIKTEAGRTMLQERVEACLDQLSATSSYLPAFVNEVNDSYIVDYKSIISVAQKDEIEAVVMRRYGKEAFRMFRYLSQEGRFVETDKIADAALTEKKDTPQFLLKMWKDGYLHMQKLAVTAPGMYTPFLLWKVNKLIVTTQMLDEMYHASLNLSLRLAHELEAEKELLLLPLDKLEGPLKERLKKVKAKRLLLSSTMFKLDDAIMLFHDF

SEQ ID NO: 43267 - protein, 521 aa, Arabidopsis thaliana
  peptide (1)..(521): Ceres Seq. ID no. 12336524
MSEFGIVYAIHIITVQFGSVVSKVCECLLRKGPLSSRDISRLAESDINHNKVKDILYLLIQHNCVQAFSIEPPDGSESKAIVQYIVLFNNILHRVRYNKFSRIVNEELDSKCGAVLDGLLSNGRLTLGQFIERDRDSGNTIGSEAIRDSLQKLVAARFVERIPSPEPVLGNKEKEPAKRRGAKAAKILKEPETLEEQVVEAATPVDAIRFPLIFEEDSNSSLADDNSNITEGKRKQRDVDTSDSSSGVIWRPNFEEFIHRLRHKACVEIVKERRDEGCAIVLRAMLEVGRSQEKKVKTDNSAPMSVGSIYEEVIKTEAGRTMLQERVEACLDQLSATSSYLPAFVNEVNDSYIVDYKSIISVAQKDEIEAVVMRRYGKEAFRMFRYLSQEGRFVETDKIADAALTEKKDTPQFLLKMWKDGYLHMQKLAVTAPGMYTPFLLWKVNKLIVTTQMLDEMYHASLNLSLRLAHELEAEKELLLLPLDKLEGPLKERLKKVKAKRLLLSSTMFKLDDAIMLFHDF

SEQ ID NO: 43268 - DNA, 1504 bp, Arabidopsis thaliana; identical to SEQ ID NO: 38423
  misc_feature (1)..(1504): Ceres Seq. ID no. 13592972
  misc_feature (1)..(1504): Ortholog of  Ceres SEQ ID NO 13600110 as cited in SEQ ID NO 0

SEQ ID NO: 43269 - protein, 191 aa, Arabidopsis thaliana; identical to SEQ ID NO: 38424
  peptide (1)..(191): Ceres Seq. ID no. 13592973

SEQ ID NO: 43270 - protein, 103 aa, Arabidopsis thaliana; identical to SEQ ID NO: 38425
  peptide (1)..(103): Ceres Seq. ID no. 13592974

SEQ ID NO: 43271 - DNA, 1634 bp, Arabidopsis thaliana
  misc_feature (1)..(1634): Ceres Seq. ID no. 12421792
  misc_feature (1)..(1634): Ortholog of  Ceres SEQ ID NO 14306538 as cited in SEQ ID NO 53117
acccaaaaacaaaatctaatagagaaaaataagtagatatggcaacccttaagtgcattgattggcaattcagcggaagcgaggcggccaaagatgctgctgcggcctccttaggctcatatacctctgcactctatgccctgtgcgatcctcatggcaaacccattttgcccccacgaaatgagatcctggagaccagcaatacagccgaaaaagcagttgttaaagctgttctttatggctcgggaaacgcctatgctcctagcttaggcctcgcggccgccaaaagtgccgtagcagagtatctaaaccaaggtcttccaaagaagcttaccgcagatgacgtgtttatgactctgggatgcaaacaagctattgagctcgcggtagacattctcgctaaaccgaaagccaacgttttgcttccgagtcccggcttcccatgggacctagtccgctccatctacaagaaccttgaggtccgccactataatttccttccagaaaagaactttgaaatcgactttgatagcgtccgagcgctcgtggacgagaacacatttgccatatttataatcaacccccacaaccccaatggtaacacctactccgaggctcatctcaaacagctggctgaactggctaaggaactcaagattatggtggtttctgacgaggtttttagatggacactctttggtagtaacccttttgttcctatgggaaaattctcgtcgatcgtaccagtggttacactcggatccatatcaaagggatggaaagtcccaggatggcgaactggttggctcacgctacatgatctagacggtgtcttcagaaacaccaaggtcttacaagctgctcaagattttctccagataaacaataaccctccgacagttatccaggcggctattcctgacatcttggagaaaactcctcaagagttttttgataagaggcagagttttctgaaagataaagtagaatttggttattctaagctcaagtacattcctagcctcacttgctacatgaaacccgaagcctgcaccttcttatggaccgagcttgatttatcgagctttgtggacatcgaagacgatcaagacttttgcaataagcttgctaaagaagaaaacctcgtcgttttaccagggattgcattcagtcagaagaactggttgaggcattctatcgatatggagactccggtattggaggatgcattggaaagattgaagagcttctgcgatcgccattccaacaaaaaagctcccctcaaagacgtcaatggtgttaagtaaagggtcaatatggttatttgcctaagtcatttacgtatgctataatgataaataaatgagtgtttcttggtttgaggtaaatcatgaacactttagtgtatttgtaacaaataaaatgggtgcacttaatatcaatcgtgtgtaatgttttctcatagtttgctatatctttgtgtatatctatctacttttcggaaataaaatagattgtctgcatttaccattggaatacatatacatatatacatctcttaactacttcaaaatactttggacttgtcgtgtcgtgtatttttagaaaaattatgaagaaacccagttttacct

SEQ ID NO: 43272 - protein, 422 aa, Arabidopsis thaliana
  peptide (1)..(422): Ceres Seq. ID no. 12421793
MATLKCIDWQFSGSEAAKDAAAASLGSYTSALYALCDPHGKPILPPRNEILETSNTAEKAVVKAVLYGSGNAYAPSLGLAAAKSAVAEYLNQGLPKKLTADDVFMTLGCKQAIELAVDILAKPKANVLLPSPGFPWDLVRSIYKNLEVRHYNFLPEKNFEIDFDSVRALVDENTFAIFIINPHNPNGNTYSEAHLKQLAELAKELKIMVVSDEVFRWTLFGSNPFVPMGKFSSIVPVVTLGSISKGWKVPGWRTGWLTLHDLDGVFRNTKVLQAAQDFLQINNNPPTVIQAAIPDILEKTPQEFFDKRQSFLKDKVEFGYSKLKYIPSLTCYMKPEACTFLWTELDLSSFVDIEDDQDFCNKLAKEENLVVLPGIAFSQKNWLRHSIDMETPVLEDALERLKSFCDRHSNKKAPLKDVNGVK

SEQ ID NO: 43273 - protein, 318 aa, Arabidopsis thaliana
  peptide (1)..(318): Ceres Seq. ID no. 12421794
MTLGCKQAIELAVDILAKPKANVLLPSPGFPWDLVRSIYKNLEVRHYNFLPEKNFEIDFDSVRALVDENTFAIFIINPHNPNGNTYSEAHLKQLAELAKELKIMVVSDEVFRWTLFGSNPFVPMGKFSSIVPVVTLGSISKGWKVPGWRTGWLTLHDLDGVFRNTKVLQAAQDFLQINNNPPTVIQAAIPDILEKTPQEFFDKRQSFLKDKVEFGYSKLKYIPSLTCYMKPEACTFLWTELDLSSFVDIEDDQDFCNKLAKEENLVVLPGIAFSQKNWLRHSIDMETPVLEDALERLKSFCDRHSNKKAPLKDVNGVK

SEQ ID NO: 43274 - protein, 215 aa, Arabidopsis thaliana
  peptide (1)..(215): Ceres Seq. ID no. 12421795
MVVSDEVFRWTLFGSNPFVPMGKFSSIVPVVTLGSISKGWKVPGWRTGWLTLHDLDGVFRNTKVLQAAQDFLQINNNPPTVIQAAIPDILEKTPQEFFDKRQSFLKDKVEFGYSKLKYIPSLTCYMKPEACTFLWTELDLSSFVDIEDDQDFCNKLAKEENLVVLPGIAFSQKNWLRHSIDMETPVLEDALERLKSFCDRHSNKKAPLKDVNGVK

SEQ ID NO: 43275 - DNA, 1798 bp, Arabidopsis thaliana
  misc_feature (1)..(1798): Ceres Seq. ID no. 13592818
  misc_feature (1)..(1798): Ortholog of  Ceres SEQ ID NO 14303423 as cited in SEQ ID NO 54243
  misc_feature (1)..(1798): Ortholog of  Ceres SEQ ID NO 12611314 as cited in SEQ ID NO 56535
  misc_feature (1)..(1798): Ortholog of  Ceres SEQ ID NO 13661438 as cited in SEQ ID NO 61414
attcttttgagctaccgattttgccgttttcgtgcagtaatttcgagaaagcgtggaccatttctggattccaaagctgaagaagatccaaacattgtgaagatagaatccgtttactaatgttagaagcatcgaagaatgaaaatgtgctgcaagtgaaggaatgaaagtgcgttgtagttcttcgtatcacgactttggcgtgcatagactgtagatagatatcagataacaacctgtagtggaaatatgagaagacctagtcaaatgatgaggcttctattaacatcctttttcggtgttattgttggtttccttatgggtattacttttccaaccttgactttaactaagatgaatcttccatccacattgtttccctcgattgatcttgcatacattgaggataaatactctgacatatcaagacaaagactatttggttcttggtcttcgacaaaaggcctcaaactcaagaatgacatccctgaccctccatataactataatgacactaagatatgggtttcgactaacccccgtggtgctgagaggctaccaccagatatagtcacgcctgaatcagatttttacctccgtcgactgtggggcgaccctaatgaggatttaacagtcaagcagcggtatctagtaacatttacggttggctatgatcagaggaaaaatatagacactgtgttgaagaagttctcagataacttctctataatgctgtttcactacgatggccgggcagcgaatgggaagagtttgaatggtccaagcgagccattcatgtgagcattcggaaacaaacaaaatggtggtacgctaagcgatttcttcatcctgacatagttgccccctatgaatatatcttcatatgggatgaggatcttggcgtggaacactttgattcggaaaaatatctggcggtggtgaagaagcatggtttggaaatctcacagcctggattagagccatatgaagggctcacatgggagatgaccaagaaaagagacgacactgaagtccacaagcatgctgaggaaaggaatgggtggtgcactgatcccaatttacccccttgtgcagcgtttgtggagattatggctcctgttttctcccgcaaggcatggcgctgtgtgtcgcatatgattcagaacgatttgattcatggatggggtctggactttgccgttcggaaatgtgttcagaacgcacacgagaaaattggagttgtagatgctcaatggattatacatcaaggtgttccatcattagggaattaaggacaaccagagcaagggaaacaaccatgggaaggggtgagagaacgatgcaggagagagtggacaatgtttcaagacagattggatgatgctgaaaaagcttattttgaagcatctgctcacaagaatgcttcttcacggcctcacgggtaataaggaaacatatagtctctccctccgacttccactctctttgtttaccctgttaattttgttcccggagctgtgctttgatttcgtgtttatggaagagaatagtctggtcgagagaagataaattgttagcagctaagcacattcattaacatctgattagtctttcttttttcttttcttttcttaactctgttaactcttattgttgatgagaactccggtggagagtagagttagaggtagacaacaataaaaaaagggagattaactgtgatgggtaagaaattaggtgttattaccagaacacgacagaactttttttaattactgttatatttcgagtttttttt

SEQ ID NO: 43276 - protein, 183 aa, Arabidopsis thaliana
  peptide (1)..(183): Ceres Seq. ID no. 13592819
MRRPSQMMRLLLTSFFGVIVGFLMGITFPTLTLTKMNLPSTLFPSIDLAYIEDKYSDISRQRLFGSWSSTKGLKLKNDIPDPPYNYNDTKIWVSTNPRGAERLPPDIVTPESDFYLRRLWGDPNEDLTVKQRYLVTFTVGYDQRKNIDTVLKKFSDNFSIMLFHYDGRAANGKSLNGPSEPFM

SEQ ID NO: 43277 - protein, 177 aa, Arabidopsis thaliana
  peptide (1)..(177): Ceres Seq. ID no. 13592820
MMRLLLTSFFGVIVGFLMGITFPTLTLTKMNLPSTLFPSIDLAYIEDKYSDISRQRLFGSWSSTKGLKLKNDIPDPPYNYNDTKIWVSTNPRGAERLPPDIVTPESDFYLRRLWGDPNEDLTVKQRYLVTFTVGYDQRKNIDTVLKKFSDNFSIMLFHYDGRAANGKSLNGPSEPFM

SEQ ID NO: 43278 - protein, 176 aa, Arabidopsis thaliana
  peptide (1)..(176): Ceres Seq. ID no. 13592821
MRLLLTSFFGVIVGFLMGITFPTLTLTKMNLPSTLFPSIDLAYIEDKYSDISRQRLFGSWSSTKGLKLKNDIPDPPYNYNDTKIWVSTNPRGAERLPPDIVTPESDFYLRRLWGDPNEDLTVKQRYLVTFTVGYDQRKNIDTVLKKFSDNFSIMLFHYDGRAANGKSLNGPSEPFM

SEQ ID NO: 43279 - DNA, 1145 bp, Arabidopsis thaliana
  misc_feature (1)..(1145): Ceres Seq. ID no. 12422505
  misc_feature (1)..(1145): Ortholog of  Ceres SEQ ID NO 13502952 as cited in SEQ ID NO 62271
  misc_feature (1)..(1145): Ortholog of  Ceres SEQ ID NO 13502973 as cited in SEQ ID NO 68052
  misc_feature (1)..(1145): Ortholog of  Ceres SEQ ID NO 13596000 as cited in SEQ ID NO 68188
aattgcaaatcaaatggatcgtcttaagctttatttctccgttttcgttttgtctttctttatcgtctcggtttcgtcgtctgatgtcaacgacggcgatgatctcgtgatccgtcaggtggttggtggagccgagcctcaggttttgacctcagaggatcacttttctctcttcaagcggaagttcgggaaggtctacgcttccaacgaggagcatgactatagattctcggtttgagttccgtaagaagcacttgggggttagaagtggctttaagcttcctaaagatgccaacaaggctccgattctccctaccgaaaatctccctgaggattttgattggagagatcatggcgccgttactcccgtcaaaaatcagggatcttgcggctcttgctggagtttcagcgccactggagctttggaaggtgctaacttcctcgctaccggcagactcgtcagcctcagcgaacaacagctcgtcgactgtgatcacgagtgtgatcccgaggaggcagattcctgcgactctggttgcaatggtgggctaatgaacagcgcttttgaatacaccctcaaaaccggagggctcatgaaagaagaagactatccttacaccggaaaggacggcaagacctgcaagctagacaagtccaagatcgttgcctctgtctccaacttcagtgttatctccattgatgaagaacagattgctgcaaaccttgtcaagaacggacctcttgctgtagccatcaacgctggctatatgcagacttacattggaggagtctcatgcccttacatatgcaccaggaggctcaaccacggtgtcttattggttggctatggagcggcaggttacgctccggctaggttcaaggagaagccttactggatcatcaagaactcgtggggagagacttggggtgaaaatggtttctacaaaatctgcaaaggccgtaacatttgtggtgttgacagtatggtctccactgttgcagccaccgtctcaaccaccgcccattaagcatctcgtcaataagttttaattactttggtgatttgtatgagcgagctctctttgcgctgctgactctctctatttatctctgcttcttgcttgtaaataaaatgcgttctattg

SEQ ID NO: 43280 - protein, 270 aa, Arabidopsis thaliana
  peptide (1)..(270): Ceres Seq. ID no. 12422506
MTIDSRFEFRKKHLGVRSGFKLPKDANKAPILPTENLPEDFDWRDHGAVTPVKNQGSCGSCWSFSATGALEGANFLATGRLVSLSEQQLVDCDHECDPEEADSCDSGCNGGLMNSAFEYTLKTGGLMKEEDYPYTGKDGKTCKLDKSKIVASVSNFSVISIDEEQIAANLVKNGPLAVAINAGYMQTYIGGVSCPYICTRRLNHGVLLVGYGAAGYAPARFKEKPYWIIKNSWGETWGENGFYKICKGRNICGVDSMVSTVAATVSTTAH

SEQ ID NO: 43281 - protein, 158 aa, Arabidopsis thaliana; identical to SEQ ID NO: 27260
  peptide (1)..(158): Ceres Seq. ID no. 12422507

SEQ ID NO: 43282 - protein, 144 aa, Arabidopsis thaliana; identical to SEQ ID NO: 27261
  peptide (1)..(144): Ceres Seq. ID no. 12422508

SEQ ID NO: 43283 - DNA, 1394 bp, Arabidopsis thaliana
  misc_feature (1)..(1394): Ceres Seq. ID no. 12421356
  misc_feature (1)..(1394): Ortholog of  Ceres SEQ ID NO 13597160 as cited in SEQ ID NO 64016
  misc_feature (1)..(1394): Ortholog of  Ceres SEQ ID NO 15169659 as cited in SEQ ID NO 64152
aatcatcttctccacaacaaaaaaataaccctaatttacacagaaaatatgtggggaattggaggaaattactactggcgaaagaaaaacaacaacggaggagaaagcgaagcgatcgttgtggtattcgcttggatgtctagcgaagaacgcaatctaaagaaccatgtcgatctctattcttctcttctttgggattctctcgtttgccattctcaatttctcaacatgtttcttccagataaagctgcagatttagcttctaatgttgtttctgaacttgtcaaggtaaaaaggagctcaaagcaaagccagttcctttagtgtttgcttctttctctggtggtcctaatgcttgtatgtataaagttcttcaaatacttgaaggaacatgcgaaacgggactaaatccggatgattgtagattggttagaaactgcatctcagggtttatttatgactcatgtcctgtggatttcactagcgacttgggagctcgattagcggttcatccaactacgcttaaaatgtctagtccacctaaaccgtttgtatgggcagcgaatggtattgcttcgagtctcgattatgtttttctcaacaggtttgaatcacagcgagccgagtactggcagactctttactctactataatcatgagagtaccttatctcattctatgctctgaaaacgatgaccttgctccttatcaaactatacacaatttcgctacacgtctccaagaactaggaggaaatgtaaaacttgtaaaatggaatgattcccctcattgtggtcattatcgttataaccaggtcgactataaagctgctgtatctgagttcttgtcaaaagcagcgtcggtttattcgcagaagacgagaagtcttgacagagaagctatgaaaggaacatgtcatgatgagataacagagccaattcagagcttggggcaatcaacctctggtcttaaccgaagcttcaacggaactccacttgtcacaaccgatcatttcttcgtacctagcaccgtaggttactacgtgggcagagacggcggatatgtgcaagatgaacacaaacaagatttgatttgtttgtccaatactcaaaccaatgaatcggttaagcccaatggagttctaggccaaatcttatttgatgtttatattccgaagaatgttgaggattgggatataaagctatcagaaaccgggcggtctaggcggagaccggggaagagatttatacgtagatcgagattgtaacatctgagttatatattatatataccatgagtacccatttgttttcttcagatactgttgcagaggtattccatttggttttccctcgcaaagattaataaattaataaaataagatcttttttgc

SEQ ID NO: 43284 - protein, 302 aa, Arabidopsis thaliana
  peptide (1)..(302): Ceres Seq. ID no. 12421357
MYKVLQILEGTCETGLNPDDCRLVRNCISGFIYDSCPVDFTSDLGARLAVHPTTLKMSSPPKPFVWAANGIASSLDYVFLNRFESQRAEYWQTLYSTIIMRVPYLILCSENDDLAPYQTIHNFATRLQELGGNVKLVKWNDSPHCGHYRYNQVDYKAAVSEFLSKAASVYSQKTRSLDREAMKGTCHDEITEPIQSLGQSTSGLNRSFNGTPLVTTDHFFVPSTVGYYVGRDGGYVQDEHKQDLICLSNTQTNESVKPNGVLGQILFDVYIPKNVEDWDIKLSETGRSRRRPGKRFIRRSRL

SEQ ID NO: 43285 - protein, 246 aa, Arabidopsis thaliana
  peptide (1)..(246): Ceres Seq. ID no. 12421358
MSSPPKPFVWAANGIASSLDYVFLNRFESQRAEYWQTLYSTIIMRVPYLILCSENDDLAPYQTIHNFATRLQELGGNVKLVKWNDSPHCGHYRYNQVDYKAAVSEFLSKAASVYSQKTRSLDREAMKGTCHDEITEPIQSLGQSTSGLNRSFNGTPLVTTDHFFVPSTVGYYVGRDGGYVQDEHKQDLICLSNTQTNESVKPNGVLGQILFDVYIPKNVEDWDIKLSETGRSRRRPGKRFIRRSRL

SEQ ID NO: 43286 - protein, 203 aa, Arabidopsis thaliana
  peptide (1)..(203): Ceres Seq. ID no. 12421359
MRVPYLILCSENDDLAPYQTIHNFATRLQELGGNVKLVKWNDSPHCGHYRYNQVDYKAAVSEFLSKAASVYSQKTRSLDREAMKGTCHDEITEPIQSLGQSTSGLNRSFNGTPLVTTDHFFVPSTVGYYVGRDGGYVQDEHKQDLICLSNTQTNESVKPNGVLGQILFDVYIPKNVEDWDIKLSETGRSRRRPGKRFIRRSRL

SEQ ID NO: 43287 - DNA, 1248 bp, Arabidopsis thaliana
  misc_feature (1)..(1248): Ceres Seq. ID no. 12394526
  misc_feature (1)..(1248): Ortholog of  Ceres SEQ ID NO 13596807 as cited in SEQ ID NO 62275
ttttctccgtgtttctaggactcgcatgtctctgtttatctccgattccggcaacagctcaacgtcggaaactcaggttcagtgttaacggcgagttcaagatactacaagtggcggatatgcattttgctaacggcgctaagacgcagtgtcaaaatgttcttcctagccagagagctcattgctcagacctcaacaccaccatcttcatgtcgcgagtcatcgccgccgagaagcctgatcttatcgtcttcaccggtgataacatatttgggtttgatgtaaaagacgctttgaaatccataaacgctgcgtttgctccagcgattgcgtctaaaatcccatgggttgctattttgggaaaccatgaccaagaatctacatttacaagacaacaagttatgaatcacattgtgaagcttcccaacactttgtctcaagtgaatcctcctgaagctgctcattacattgatggttttggtaattacaatctccaaatccatggagctgctgattcgaaactacagaacaaatctgttcttaatctttattttctcgatagtggagattattctagtgttccttacatggaaggttatgattggatcaaaacttctcagcagttttggttcgaccgcacttcaaaacgtctcaagagggagtacaacgcaaagcctaatcctcaagaaggtatagctccaggactagcttacttccacattccattaccggagtttttgagttttgactcaaagaacgctacaaaaggagtgagacaagaaggtacatccgcggcttctacaaactcgggtttcttcacaacattgatagctagaggagatgtgaaatctgtgtttgtgggtcacgaccatgtcaacgacttctgcggtgaacttaaaggtttgaatctatgttatggtggtggatttgggtatcatgcttatggtaaagctggatgggaaagaagagcgagagttgtggttgttgatttgaataagaagagaaaaggaaagtggggagctgtgaaatcgattaagacatggaagaggcttgatgataagcatctctctgttattgactctcaagttctttggaacaattctgcaaacaaattagttgttcgttgatattgattccatgtgttgttgttttgatctgtctactaaatgttctgttttagttggttttgggtttcatagaaactgtttaagtgtttatcattgagttagttttaaactccatttgatg

SEQ ID NO: 43288 - protein, 374 aa, Arabidopsis thaliana
  peptide (1)..(374): Ceres Seq. ID no. 12394527
FSVFLGLACLCLSPIPATAQRRKLRFSVNGEFKILQVADMHFANGAKTQCQNVLPSQRAHCSDLNTTIFMSRVIAAEKPDLIVFTGDNIFGFDVKDALKSINAAFAPAIASKIPWVAILGNHDQESTFTRQQVMNHIVKLPNTLSQVNPPEAAHYIDGFGNYNLQIHGAADSKLQNKSVLNLYFLDSGDYSSVPYMEGYDWIKTSQQFWFDRTSKRLKREYNAKPNPQEGIAPGLAYFHIPLPEFLSFDSKNATKGVRQEGTSAASTNSGFFTTLIARGDVKSVFVGHDHVNDFCGELKGLNLCYGGGFGYHAYGKAGWERRARVVVVDLNKKRKGKWGAVKSIKTWKRLDDKHLSVIDSQVLWNNSANKLVVR

SEQ ID NO: 43289 - protein, 335 aa, Arabidopsis thaliana; identical to SEQ ID NO: 35819
  peptide (1)..(335): Ceres Seq. ID no. 12394528

SEQ ID NO: 43290 - protein, 305 aa, Arabidopsis thaliana
  peptide (1)..(305): Ceres Seq. ID no. 12394529
MSRVIAAEKPDLIVFTGDNIFGFDVKDALKSINAAFAPAIASKIPWVAILGNHDQESTFTRQQVMNHIVKLPNTLSQVNPPEAAHYIDGFGNYNLQIHGAADSKLQNKSVLNLYFLDSGDYSSVPYMEGYDWIKTSQQFWFDRTSKRLKREYNAKPNPQEGIAPGLAYFHIPLPEFLSFDSKNATKGVRQEGTSAASTNSGFFTTLIARGDVKSVFVGHDHVNDFCGELKGLNLCYGGGFGYHAYGKAGWERRARVVVVDLNKKRKGKWGAVKSIKTWKRLDDKHLSVIDSQVLWNNSANKLVVR

SEQ ID NO: 43291 - DNA, 743 bp, Arabidopsis thaliana
  misc_feature (1)..(743): Ceres Seq. ID no. 12422309
  misc_feature (1)..(743): Ortholog of  Ceres SEQ ID NO 12563124 as cited in SEQ ID NO 57104
  misc_feature (1)..(743): Ortholog of  Ceres SEQ ID NO 13598373 as cited in SEQ ID NO 62185
  misc_feature (1)..(743): Ortholog of  Ceres SEQ ID NO 12584664 as cited in SEQ ID NO 62232
  misc_feature (1)..(743): Ortholog of  Ceres SEQ ID NO 12617639 as cited in SEQ ID NO 65219
acatctcactgctcactactctcactgtaatcccttagatcttcttttcaaatttcaatggcgtccgatgatgttgagtatcggtgcttcgttggaggtctagcatgggccactgatgacagagctcttgagactgccttcgctcaatacggcgacgttattgattccaagatcattaacgatcgtgagactggaagatcaaggggattcggattcgtcaccttcaaggatgagaaagccatgaaggatgcgattgagggaatgaacggacaagatctcgatggccgtagcatcactgttaacgaggctcagtcacgaggaagcggtggcggcggaggccaccgtggaggtggcggcggtagacgcgagggtggaggaggatacagcggcggcggcggcggttactcctcaagaggtggtggtggcggaagctacggtggtggaagacgtgagggaggaggaggatacggtggtggtgaaggaggaggttacggaggaagcggtggtggtggaggatggtaattcctttaattaggtttaggattaccaatgaatgttctctctctcgcttgttatgcttctacttggttttgtgtgttctctattttgttctggttctgctttagatttgatgtaacagttcgtgattaggtattttggtatctggaaacgtaatgttaagtcacttgtcattttctaaataacaaatttcttcggagatattatctctgttgattgattct

SEQ ID NO: 43292 - protein, 154 aa, Arabidopsis thaliana
  peptide (1)..(154): Ceres Seq. ID no. 12422310
MASDDVEYRCFVGGLAWATDDRALETAFAQYGDVIDSKIINDRETGRSRGFGFVTFKDEKAMKDAIEGMNGQDLDGRSITVNEAQSRGSGGGGGHRGGGGGRREGGGGYSGGGGGYSSRGGGGGSYGGGRREGGGGYGGGEGGGYGGSGGGGGW

SEQ ID NO: 43293 - protein, 93 aa, Arabidopsis thaliana
  peptide (1)..(93): Ceres Seq. ID no. 12422311
MKDAIEGMNGQDLDGRSITVNEAQSRGSGGGGGHRGGGGGRREGGGGYSGGGGGYSSRGGGGGSYGGGRREGGGGYGGGEGGGYGGSGGGGGW

SEQ ID NO: 43294 - protein, 86 aa, Arabidopsis thaliana
  peptide (1)..(86): Ceres Seq. ID no. 12422312
MNGQDLDGRSITVNEAQSRGSGGGGGHRGGGGGRREGGGGYSGGGGGYSSRGGGGGSYGGGRREGGGGYGGGEGGGYGGSGGGGGW

SEQ ID NO: 43295 - DNA, 1093 bp, Arabidopsis thaliana
  misc_feature (1)..(1093): Ceres Seq. ID no. 13647059
  misc_feature (1)..(1093): Ortholog of  Ceres SEQ ID NO 13581804 as cited in SEQ ID NO 51424
  misc_feature (1)..(1093): Ortholog of  Ceres SEQ ID NO 14306627 as cited in SEQ ID NO 53023
  misc_feature (1)..(1093): Ortholog of  Ceres SEQ ID NO 14307559 as cited in SEQ ID NO 54006
  misc_feature (1)..(1093): Ortholog of  Ceres SEQ ID NO 13663874 as cited in SEQ ID NO 67003
atttatcgtgtacgatactttattccttttatctattcttgaaaaaaagttaccaattcttgagaagaagaagaaatcagaatcaagagaaggagagagaaagatgggaagagggagagtggagatgaagaggatagagaacaagattaatagacaagtgaccttctcaaaaagaagaaacggtttgctgaagaaagcttatgagctttctgttctttgcgatgccgaagttgctctcatcatcttctcaagccgtggcaagctctacgagtttggtagtgttggaattgaaagcacaatcgaacggtataatcgttgttacaactgctctctaagcaataataagcctgaagagactacacagagttggtgtcaggaggtgacaaagcttaaatccaaatacgaatctcttgttcgtactaacaggaatttgcttggagaagatcttggagaaatgggtgtgaaggaactgcaagcgctcgagaggcagctcgaagccgctcttaccgcgactcgacagcgcaagacacaagttatgatggaagaaatggaagaccttaggaaaaaggagaggcaactaggagacataaacaaacaactcaagattaagtttgaaacggaaggccatgctttcaaaacctttcaagacttatgggcaaactcggcggcatcggtggccggggatccaaacaattctgaatttccggtagagccttctcatcctaatgtattggattgcaacaccgaaccctttttacaaatagggtttcaacaacattactacgtgcaaggtgaagggtcttcggtatcaaagagtaacgtggcaggtgagactaatttcgtccaaggttgggttctttgactctctgttgattagaccacgatgccacggtcaggccaatttcagctctctacagttgttcttttttcaaattagatttctgggtttttttttcctataagaaaaacttttgcactagatgtttgtcatttaatttccagctcgtgtgaatctatattcgcatgtatgtgctttgaagaatttctcctcttactcctacttgatctaaaacattatttttgttttggtttt

SEQ ID NO: 43296 - protein, 286 aa, Arabidopsis thaliana
  peptide (1)..(286): Ceres Seq. ID no. 13647060
FIVYDTLFLLSILEKKLPILEKKKKSESREGERKMGRGRVEMKRIENKINRQVTFSKRRNGLLKKAYELSVLCDAEVALIIFSSRGKLYEFGSVGIESTIERYNRCYNCSLSNNKPEETTQSWCQEVTKLKSKYESLVRTNRNLLGEDLGEMGVKELQALERQLEAALTATRQRKTQVMMEEMEDLRKKERQLGDINKQLKIKFETEGHAFKTFQDLWANSAASVAGDPNNSEFPVEPSHPNVLDCNTEPFLQIGFQQHYYVQGEGSSVSKSNVAGETNFVQGWVL

SEQ ID NO: 43297 - protein, 252 aa, Arabidopsis thaliana
  peptide (1)..(252): Ceres Seq. ID no. 13647061
MGRGRVEMKRIENKINRQVTFSKRRNGLLKKAYELSVLCDAEVALIIFSSRGKLYEFGSVGIESTIERYNRCYNCSLSNNKPEETTQSWCQEVTKLKSKYESLVRTNRNLLGEDLGEMGVKELQALERQLEAALTATRQRKTQVMMEEMEDLRKKERQLGDINKQLKIKFETEGHAFKTFQDLWANSAASVAGDPNNSEFPVEPSHPNVLDCNTEPFLQIGFQQHYYVQGEGSSVSKSNVAGETNFVQGWVL

SEQ ID NO: 43298 - protein, 245 aa, Arabidopsis thaliana
  peptide (1)..(245): Ceres Seq. ID no. 13647062
MKRIENKINRQVTFSKRRNGLLKKAYELSVLCDAEVALIIFSSRGKLYEFGSVGIESTIERYNRCYNCSLSNNKPEETTQSWCQEVTKLKSKYESLVRTNRNLLGEDLGEMGVKELQALERQLEAALTATRQRKTQVMMEEMEDLRKKERQLGDINKQLKIKFETEGHAFKTFQDLWANSAASVAGDPNNSEFPVEPSHPNVLDCNTEPFLQIGFQQHYYVQGEGSSVSKSNVAGETNFVQGWVL

SEQ ID NO: 43299 - DNA, 1678 bp, Arabidopsis thaliana
  misc_feature (1)..(1678): Ceres Seq. ID no. 12700553
  misc_feature (1)..(1678): Ortholog of  Ceres SEQ ID NO 14315626 as cited in SEQ ID NO 52943
  misc_feature (1)..(1678): Ortholog of  Ceres SEQ ID NO 15174513 as cited in SEQ ID NO 58979
  misc_feature (1)..(1678): Ortholog of  Ceres SEQ ID NO 13584616 as cited in SEQ ID NO 65234
  misc_feature (1)..(1678): Ortholog of  Ceres SEQ ID NO 14302742 as cited in SEQ ID NO 66899
ccttttaagaccaaatctctctctacctctatctctctctccgccattaccagagctcaacgagctctcactttctttacgcacacttgttggaacgaaatatattcatagagaagaagaatctcgaaactcttgaatctaaaacaactcggagactctgttttccctttccggagatcagatcggatcaagatgcagacaaccaacggctcagattcgacgttggcaacttccggagccacaccgccgaatcaacaaacccctcctccacctcagcagtggcagcagcagcaacagcaacagcaacagtggatggctgccatgcaatatccaccagcggcggcgatgatgatgatgcagcagcaacagatgctgatgtatcctcatcaatatgttccgtataatcaaggtccttatcagcagcatcatcctcagcttcaccaatacgggtcttatcaacagcaccagcaccagcaacacaaggctattgaccgtggatctggagatgatgtcaagactctttgggttggtgatcttcttcattggatggatgagacttatctccattcttgcttttctcacaccggcgaggtttcttctgtgaaagttatacgtaacaagctcacttctcaatcagaagggtatgggtttgttgagtttctttcacgtgctgcagctgaagaagttcttcagaactatagtggttcagtgatgccaaactcggaccaacccttccgtataaactgggcatcttttagtactggtgaaaaaagagcagtggaaaatggtccagacctatctgtttttgtgggagacttgtctccagatgtcactgacgttttattgcatgagaccttttctgatagatatccttctgtcaaaagcgccaaagttgtgattgattccaacaccggccggtccaaaggttatggttttgtgaggttcggtgatgaaaatgagaggtcaagggctttgacagaaatgaatggagcttactgttcgaacaggcaaatgcgtgtaggtattgcaactcccaaaagagcgattgctaatcagcaacaacattcttcacaagctgtgattctggctggtggacatggatcaaatggttccatgggttatggctcgcagtctgatggcgaatcaactaacgcaacaatatttgttggcggcattgaccctgatgttattgatgaagacctcagacaacctttttcccagtttggagaggttgtttcagtgaagatcccagtagggaaaggatgtggatttgtccaatttgctgacaggaagagtgctgaagatgctatcgagagtttgaacgggacagtcatcggcaagaacactgtcagactctcctggggacgaagcccaaacaagcagtggagaggagactcagggcagcagtggaatggaggatactcacgaggacatggttacaacaatggaggaggatatgctaaccaccacgactccaacaactatcatggggagaattgaagagactcatcaagtgatcatcttcatcatggtttcacatatcaaagctaaaacctgtagtcgaaagaagaattttgttagatggatttgattttgatagacttgttgtttggaggagattcaaaaattttggttactggtttgtctcagactaatataaatggttgcaacttgttgg

SEQ ID NO: 43300 - protein, 435 aa, Arabidopsis thaliana
  peptide (1)..(435): Ceres Seq. ID no. 12700554
MQTTNGSDSTLATSGATPPNQQTPPPPQQWQQQQQQQQQWMAAMQYPPAAAMMMMQQQQMLMYPHQYVPYNQGPYQQHHPQLHQYGSYQQHQHQQHKAIDRGSGDDVKTLWVGDLLHWMDETYLHSCFSHTGEVSSVKVIRNKLTSQSEGYGFVEFLSRAAAEEVLQNYSGSVMPNSDQPFRINWASFSTGEKRAVENGPDLSVFVGDLSPDVTDVLLHETFSDRYPSVKSAKVVIDSNTGRSKGYGFVRFGDENERSRALTEMNGAYCSNRQMRVGIATPKRAIANQQQHSSQAVILAGGHGSNGSMGYGSQSDGESTNATIFVGGIDPDVIDEDLRQPFSQFGEVVSVKIPVGKGCGFVQFADRKSAEDAIESLNGTVIGKNTVRLSWGRSPNKQWRGDSGQQWNGGYSRGHGYNNGGGYANHHDSNNYHGEN

SEQ ID NO: 43301 - protein, 395 aa, Arabidopsis thaliana; identical to SEQ ID NO: 41131
  peptide (1)..(395): Ceres Seq. ID no. 12700555

SEQ ID NO: 43302 - protein, 392 aa, Arabidopsis thaliana; identical to SEQ ID NO: 41132
  peptide (1)..(392): Ceres Seq. ID no. 12700556

SEQ ID NO: 43303 - DNA, 1903 bp, Arabidopsis thaliana; identical to SEQ ID NO: 40379
  misc_feature (1)..(1903): Ceres Seq. ID no. 12336176
  misc_feature (1)..(1903): Ortholog of  Ceres SEQ ID NO 13596319 as cited in SEQ ID NO 67933

SEQ ID NO: 43304 - protein, 595 aa, Arabidopsis thaliana; identical to SEQ ID NO: 40380
  peptide (1)..(595): Ceres Seq. ID no. 12336177

SEQ ID NO: 43305 - protein, 583 aa, Arabidopsis thaliana; identical to SEQ ID NO: 40381
  peptide (1)..(583): Ceres Seq. ID no. 12336178

SEQ ID NO: 43306 - protein, 538 aa, Arabidopsis thaliana; identical to SEQ ID NO: 40382
  peptide (1)..(538): Ceres Seq. ID no. 12336179

SEQ ID NO: 43307 - DNA, 1279 bp, Arabidopsis thaliana
  misc_feature (1)..(1279): Ceres Seq. ID no. 12371362
  misc_feature (1)..(1279): Ortholog of  Ceres SEQ ID NO 13592961 as cited in SEQ ID NO 20522
  misc_feature (1)..(1279): Ortholog of  Ceres SEQ ID NO 12583469 as cited in SEQ ID NO 51031
  misc_feature (1)..(1279): Ortholog of  Ceres SEQ ID NO 13596527 as cited in SEQ ID NO 62582
  misc_feature (1)..(1279): Ortholog of  Ceres SEQ ID NO 15226378 as cited in SEQ ID NO 62741
  misc_feature (1)..(1279): Ortholog of  Ceres SEQ ID NO 13597389 as cited in SEQ ID NO 63426
  misc_feature (1)..(1279): Ortholog of  Ceres SEQ ID NO 15169639 as cited in SEQ ID NO 64624
  misc_feature (1)..(1279): Ortholog of  Ceres SEQ ID NO 14303071 as cited in SEQ ID NO 67114
  misc_feature (1)..(1279): Ortholog of  Ceres SEQ ID NO 13595998 as cited in SEQ ID NO 68161
  misc_feature (1)..(1279): Ortholog of  Ceres SEQ ID NO 14303635 as cited in SEQ ID NO 68503
aactgaatttgaaagaaaaaaaaaaaagaaatcataaaatgagaatcaatatgttattcatagtggcattctcatttttagtctctgttcggtcattaccgatgagaccaactctaaagtacgagtcaatctttaattttggcgattctttaagcgataccggaaactttttattatccggtgatgttgactctccgaacattggaagactaccgtacggacaaaccttttttaaccgttccaccggtcgttgctctgacggacgtctcatcatcgatttcatcgctgaggctagtggactaccgtacattccaccgtatctccaaagcttacggacgaatgattcggtagatttcaagagaggtgcaaattttgcggtggctggagcaacagcgaacgaatttagcttctttaaaaacagaggtctttcagtaacattgttgacaaacaagacactggatattcaacttgattggttcaagaagttgaaaccttctctgtgtaaaaccaagccagaatgtgagcgatattttagaaaatctctatttctcgtcggagaaattagtggaaacgattataactaccctcttttggcattccgaagtttcaaacatgctatggatttggtaccatttgttattaacaaaatcatggacgtcacaagtgcattgatagaggaaggtgccatgacactaatagttccaggaaaccttccaatcggttgttctgcggctctactagagcggtttaatgataatagtggatggctttatgactcgaggaaccaatgctacatgccattgaacaatttggctaagcttcacaatgataagctcaagaaaggcctcgcggctctaagaaaaaagtacccttatgccaaaattatatatgctgattattacagttctgccatgcaattcttcaactcaccttccaaatacggtttcactggaagtgtcctaaaggcatgttgtggaggaggagatggaagatacaacgtgcaaccaaacgtgcggtgcggagaaaagggttcaaccacttgcgaagatccatcaacgtacgcaaattgggacggaattcacctcactgaagcggcttaccgccacattgcaactggtctcatctccggccgtttcaccatgcctacttataattaataacaattaagttactcataagttgtaactttttttttaacacacaaacttttcatataactcctaattgaaaacctataaatcgatcatatttatatcaagctcgttcgagagcataagcc

SEQ ID NO: 43308 - protein, 384 aa, Arabidopsis thaliana
  peptide (1)..(384): Ceres Seq. ID no. 12371363
LNLKEKKKRNHKMRINMLFIVAFSFLVSVRSLPMRPTLKYESIFNFGDSLSDTGNFLLSGDVDSPNIGRLPYGQTFFNRSTGRCSDGRLIIDFIAEASGLPYIPPYLQSLRTNDSVDFKRGANFAVAGATANEFSFFKNRGLSVTLLTNKTLDIQLDWFKKLKPSLCKTKPECERYFRKSLFLVGEISGNDYNYPLLAFRSFKHAMDLVPFVINKIMDVTSALIEEGAMTLIVPGNLPIGCSAALLERFNDNSGWLYDSRNQCYMPLNNLAKLHNDKLKKGLAALRKKYPYAKIIYADYYSSAMQFFNSPSKYGFTGSVLKACCGGGDGRYNVQPNVRCGEKGSTTCEDPSTYANWDGIHLTEAAYRHIATGLISGRFTMPTYN

SEQ ID NO: 43309 - protein, 372 aa, Arabidopsis thaliana
  peptide (1)..(372): Ceres Seq. ID no. 12371364
MRINMLFIVAFSFLVSVRSLPMRPTLKYESIFNFGDSLSDTGNFLLSGDVDSPNIGRLPYGQTFFNRSTGRCSDGRLIIDFIAEASGLPYIPPYLQSLRTNDSVDFKRGANFAVAGATANEFSFFKNRGLSVTLLTNKTLDIQLDWFKKLKPSLCKTKPECERYFRKSLFLVGEISGNDYNYPLLAFRSFKHAMDLVPFVINKIMDVTSALIEEGAMTLIVPGNLPIGCSAALLERFNDNSGWLYDSRNQCYMPLNNLAKLHNDKLKKGLAALRKKYPYAKIIYADYYSSAMQFFNSPSKYGFTGSVLKACCGGGDGRYNVQPNVRCGEKGSTTCEDPSTYANWDGIHLTEAAYRHIATGLISGRFTMPTYN

SEQ ID NO: 43310 - protein, 368 aa, Arabidopsis thaliana
  peptide (1)..(368): Ceres Seq. ID no. 12371365
MLFIVAFSFLVSVRSLPMRPTLKYESIFNFGDSLSDTGNFLLSGDVDSPNIGRLPYGQTFFNRSTGRCSDGRLIIDFIAEASGLPYIPPYLQSLRTNDSVDFKRGANFAVAGATANEFSFFKNRGLSVTLLTNKTLDIQLDWFKKLKPSLCKTKPECERYFRKSLFLVGEISGNDYNYPLLAFRSFKHAMDLVPFVINKIMDVTSALIEEGAMTLIVPGNLPIGCSAALLERFNDNSGWLYDSRNQCYMPLNNLAKLHNDKLKKGLAALRKKYPYAKIIYADYYSSAMQFFNSPSKYGFTGSVLKACCGGGDGRYNVQPNVRCGEKGSTTCEDPSTYANWDGIHLTEAAYRHIATGLISGRFTMPTYN

SEQ ID NO: 43311 - DNA, 1620 bp, Arabidopsis thaliana
  misc_feature (1)..(1620): Ceres Seq. ID no. 12339135
  misc_feature (1)..(1620): Ortholog of  Ceres SEQ ID NO 13594128 as cited in SEQ ID NO 58608
  misc_feature (1)..(1620): Ortholog of  Ceres SEQ ID NO 15176122 as cited in SEQ ID NO 62462
  misc_feature (1)..(1620): Ortholog of  Ceres SEQ ID NO 12624849 as cited in SEQ ID NO 62773
ctctgcctctcatctcttgttctctccgcccatctctgctctcttttattttcccagaaagttttttttttttcccgaattccgttaatctcattggggtttccattgatagcaatggcgacggctttcgctcccactaagctcactgccacggttcctctgcatggatcccatgagaatcgtctcttgctcccgatccgattggctcctccttcttctttcctcggatccacccgttccctctcccttcgcagactcaatcactccaacgccacccgtcgatctcccgtcgtctctgtccaggaagttgtcaaggagaagcaatccaccaataataccagcctgttgataaccaaagaggaaggattggagttgtatgaagatatgatactaggtagatctttcgaagacatgtgtgctcaaatgtattaccgaggcaagatgtttggttttgttcacttgtacaatggccaagaggctgtttctactggctttatcaagctccttaccaagtctgactctgtcgttagtacctaccgtgaccatgtccatgccctcagcaaaggtgtctctgctcgtgctgttatgagcgagctcttcggcaaggttactggatgctgcagaggccaaggtggatccatgcacatgttctccaaagaacacaacatgcttggtggctttgcttttattggtgaaggcattcctgtcgccactggtgctgcctttagctccaagtacaggagggaagtcttgaaacaggattgtgatgatgtcactgtcgcctttttcggagatggaacttgtaacaacggacagttcttcgagtgtctcaacatggctgctctctataaactgcctattatctttgttgtcgagaataacttgtgggccattgggatgtctcacttgagagccacttctgaccccgagatttggaagaaaggtcctgcatttgggatgcctggtgttcatgttgacggtatggatgtcttgaaggtcagggaagtcgctaaagaggctgtcactagagctagaagaggagaaggtccaaccttggttgaatgtgagacttatagatttagaggacactccttggctgatcccgatgagctccgtgatgctgctgagaaagccaaatacgcggctagagacccaatcgcagcattgaagaagtatttgatagagaacaagcttgcaaaggaagcagagctaaagtcaatagagaaaaagatagacagttggtggaggaagcggttgagtttgcagacgctagtccacagcccggtcgcagtcagttgctagagaatgtgtttgctgatccaaaaggatttggaattggacctgatggacggtacagatgtgaggaccccaagtttaccgaaggcacagctcaagtctgagaagacaagtttaaccataagctgtctactgtctcttcgatgtttctatatatcttattaagttaaatgctacagagaatcagtttgaatcatttgcactttttgctttttgtttggtgttactaaattatcacaaggttcttcttgtagttcgttgggttttcattggttaccacttaccagagaattgtatttttttttttaaagataattattttgc

SEQ ID NO: 43312 - protein, 433 aa, Arabidopsis thaliana
  peptide (1)..(433): Ceres Seq. ID no. 12339136
LCLSSLVLSAHLCSLLFSQKVFFFSRIPLISLGFPLIAMATAFAPTKLTATVPLHGSHENRLLLPIRLAPPSSFLGSTRSLSLRRLNHSNATRRSPVVSVQEVVKEKQSTNNTSLLITKEEGLELYEDMILGRSFEDMCAQMYYRGKMFGFVHLYNGQEAVSTGFIKLLTKSDSVVSTYRDHVHALSKGVSARAVMSELFGKVTGCCRGQGGSMHMFSKEHNMLGGFAFIGEGIPVATGAAFSSKYRREVLKQDCDDVTVAFFGDGTCNNGQFFECLNMAALYKLPIIFVVENNLWAIGMSHLRATSDPEIWKKGPAFGMPGVHVDGMDVLKVREVAKEAVTRARRGEGPTLVECETYRFRGHSLADPDELRDAAEKAKYAARDPIAALKKYLIENKLAKEAELKSIEKKIDSWWRKRLSLQTLVHSPVAVSC

SEQ ID NO: 43313 - protein, 395 aa, Arabidopsis thaliana
  peptide (1)..(395): Ceres Seq. ID no. 12339138
MATAFAPTKLTATVPLHGSHENRLLLPIRLAPPSSFLGSTRSLSLRRLNHSNATRRSPVVSVQEVVKEKQSTNNTSLLITKEEGLELYEDMILGRSFEDMCAQMYYRGKMFGFVHLYNGQEAVSTGFIKLLTKSDSVVSTYRDHVHALSKGVSARAVMSELFGKVTGCCRGQGGSMHMFSKEHNMLGGFAFIGEGIPVATGAAFSSKYRREVLKQDCDDVTVAFFGDGTCNNGQFFECLNMAALYKLPIIFVVENNLWAIGMSHLRATSDPEIWKKGPAFGMPGVHVDGMDVLKVREVAKEAVTRARRGEGPTLVECETYRFRGHSLADPDELRDAAEKAKYAARDPIAALKKYLIENKLAKEAELKSIEKKIDSWWRKRLSLQTLVHSPVAVSC

SEQ ID NO: 43314 - protein, 305 aa, Arabidopsis thaliana
  peptide (1)..(305): Ceres Seq. ID no. 12339139
MILGRSFEDMCAQMYYRGKMFGFVHLYNGQEAVSTGFIKLLTKSDSVVSTYRDHVHALSKGVSARAVMSELFGKVTGCCRGQGGSMHMFSKEHNMLGGFAFIGEGIPVATGAAFSSKYRREVLKQDCDDVTVAFFGDGTCNNGQFFECLNMAALYKLPIIFVVENNLWAIGMSHLRATSDPEIWKKGPAFGMPGVHVDGMDVLKVREVAKEAVTRARRGEGPTLVECETYRFRGHSLADPDELRDAAEKAKYAARDPIAALKKYLIENKLAKEAELKSIEKKIDSWWRKRLSLQTLVHSPVAVSC

SEQ ID NO: 43315 - DNA, 1363 bp, Arabidopsis thaliana
  misc_feature (1)..(1363): Ceres Seq. ID no. 12326614
  misc_feature (1)..(1363): Ortholog of  Ceres SEQ ID NO 14303790 as cited in SEQ ID NO 55525
attcttccacaatggattcttcatcttcagtaaaaatcgtctcgaaaagcttcgtgaaacccaaaaccataccagaagagtcaaagcaaccatactatttatctccatgggactacgcaatgctctctgttcagtacatccaaaaaggtcttctctttcataagccaccacttgactccattgacactcttcttgagaagctaaaagattctctggccgtcacactagtccatttctaccctctcgcgggtcgcctctcatcgttagcaacggaaaacccgaaatcttactctgtttttgttgattgtaacgatagccctggcgcggggtttatctacgcgacctcagatttatgtgtagaagatattgtgggtgctaagtatgtcccttcaattgttcaatctttctttgaccaccacaaagctgtgaatcatgatggacacaccatgagcctcttatcggtccaggtgacagaattggtagatggaattttcataggactgtctatgaaccatgcgatgggagacggtactgcgttctggaagttctttaccgcatggtccgaaatcttccaaggacaagagagcaacaaaaacaatgacttgtgtcttaagaatccacccgtcttaaagcgttacatccctgaaggatacggtcctctattcagccttccatatagccatccagatgaatttatcagaacctacgaatctccaatcctcaaggagagaatgttctgtttctcatcagaaaccataagattgcttaaaacaaaggtcaaccaaatatgtggaacaacctccatctcatctttccaatcgctaaccgcggttatatggagatgcataacaagggcgaggagattacctctcgatcgagaaacaagttgtagagttgctgctgataacagaggaagaatgtatccaccgcttcacaaggattacttcggaaactgcctctctgctttgagaacggctgcaaaagctggtgaactattggagaatgatcttggatttgctgctttgaaagtgcatcaagcagtagctgaacatacgagcgaaaaggtatctcaaatgattgatcaatggctaaagtctccttatatttaccatattgatcggctatttgaaccgatgagcgttatgatgggaagctcgccgaggtttaataagtatggttgtgaatttgggatgggaaaaggagtgacgcttagaagtggctatgcgcataagttcgatggaaaggtatctgcttacccgggaagagaaggagggggaagtatagatttggaggtatgtcttgttccagagtttatggaagctttggaatcagatgaagagttcatgtcacttgtttctctttg

SEQ ID NO: 43316 - protein, 453 aa, Arabidopsis thaliana
  peptide (1)..(453): Ceres Seq. ID no. 12326615
SSTMDSSSSVKIVSKSFVKPKTIPEESKQPYYLSPWDYAMLSVQYIQKGLLFHKPPLDSIDTLLEKLKDSLAVTLVHFYPLAGRLSSLATENPKSYSVFVDCNDSPGAGFIYATSDLCVEDIVGAKYVPSIVQSFFDHHKAVNHDGHTMSLLSVQVTELVDGIFIGLSMNHAMGDGTAFWKFFTAWSEIFQGQESNKNNDLCLKNPPVLKRYIPEGYGPLFSLPYSHPDEFIRTYESPILKERMFCFSSETIRLLKTKVNQICGTTSISSFQSLTAVIWRCITRARRLPLDRETSCRVAADNRGRMYPPLHKDYFGNCLSALRTAAKAGELLENDLGFAALKVHQAVAEHTSEKVSQMIDQWLKSPYIYHIDRLFEPMSVMMGSSPRFNKYGCEFGMGKGVTLRSGYAHKFDGKVSAYPGREGGGSIDLEVCLVPEFMEALESDEEFMSLVSL

SEQ ID NO: 43317 - protein, 450 aa, Arabidopsis thaliana
  peptide (1)..(450): Ceres Seq. ID no. 12326616
MDSSSSVKIVSKSFVKPKTIPEESKQPYYLSPWDYAMLSVQYIQKGLLFHKPPLDSIDTLLEKLKDSLAVTLVHFYPLAGRLSSLATENPKSYSVFVDCNDSPGAGFIYATSDLCVEDIVGAKYVPSIVQSFFDHHKAVNHDGHTMSLLSVQVTELVDGIFIGLSMNHAMGDGTAFWKFFTAWSEIFQGQESNKNNDLCLKNPPVLKRYIPEGYGPLFSLPYSHPDEFIRTYESPILKERMFCFSSETIRLLKTKVNQICGTTSISSFQSLTAVIWRCITRARRLPLDRETSCRVAADNRGRMYPPLHKDYFGNCLSALRTAAKAGELLENDLGFAALKVHQAVAEHTSEKVSQMIDQWLKSPYIYHIDRLFEPMSVMMGSSPRFNKYGCEFGMGKGVTLRSGYAHKFDGKVSAYPGREGGGSIDLEVCLVPEFMEALESDEEFMSLVSL

SEQ ID NO: 43318 - protein, 414 aa, Arabidopsis thaliana
  peptide (1)..(414): Ceres Seq. ID no. 12326617
MLSVQYIQKGLLFHKPPLDSIDTLLEKLKDSLAVTLVHFYPLAGRLSSLATENPKSYSVFVDCNDSPGAGFIYATSDLCVEDIVGAKYVPSIVQSFFDHHKAVNHDGHTMSLLSVQVTELVDGIFIGLSMNHAMGDGTAFWKFFTAWSEIFQGQESNKNNDLCLKNPPVLKRYIPEGYGPLFSLPYSHPDEFIRTYESPILKERMFCFSSETIRLLKTKVNQICGTTSISSFQSLTAVIWRCITRARRLPLDRETSCRVAADNRGRMYPPLHKDYFGNCLSALRTAAKAGELLENDLGFAALKVHQAVAEHTSEKVSQMIDQWLKSPYIYHIDRLFEPMSVMMGSSPRFNKYGCEFGMGKGVTLRSGYAHKFDGKVSAYPGREGGGSIDLEVCLVPEFMEALESDEEFMSLVSL

SEQ ID NO: 43319 - DNA, 1636 bp, Arabidopsis thaliana
  misc_feature (1)..(1636): Ceres Seq. ID no. 12336180
  misc_feature (1)..(1636): Ortholog of  Ceres SEQ ID NO 12625120 as cited in SEQ ID NO 67706
  misc_feature (1)..(1636): Ortholog of  Ceres SEQ ID NO 13595999 as cited in SEQ ID NO 68173
ggagagtaacatcgagacaaagaagaaaagctaaaaaagagaaccccaaagaatcgaatatttattatttcgccccgaagattctatttctgatcatttacacccctaaaaagagtagagctttcgtgaagccaccatgtgtggaggagctataatctccgatttcatacctccgccgaggtccctccgcgtcactaacgagtttatctggccggatctgaaaaacaaagtgaaagcttcaaagaagagatcgaataagcgatccgatttcttcgatcttgacgatgatttcgaagctgatttccaagggtttaaggatgactcggcttttgactgcgaagacgatgatgatgtcttcgtcaatgttaagcctttcgtcttcaccgcaactactaagcccgtagcttccgctttcgtctccactggtatatatttggtaggttcagcatatgccaagaaaactgtagagtccgctgagcaagctgagaaatcttctaagaggaagaggaagaatcagtaccgagggattaggcagcgtccttggggaaaatgggctgcggagatccgtgatccgagaaaaggctcccgagaatggcttggaacattcgacactgctgaggaagcagcaagagcttatgatgctgcagcacgcagaatccgtggcacgaaagctaaggtgaattttcccgaggagaagaaccctagcgtcgtatcccagaaacgtcctagtgctaagactaataatcttcagaaatcagtggctaaaccaaacaaaagcgtaactttggttcagcagccaacacatctgagtcagcagtactgcaacaactcctttgacaactcttttggtgatatgagtttcatggaagagaagcctcagatgtacaacaatcagtttgggttaacaaactcgttcgatgctggaggtaacaatggataccagtatttcagttccgatcagggcagtaactccttcgactgttctgagttcgggtggagtgatcacggccctaaaacacccgagatctcttcaatgcttgtcaataacaacgaagcatcatttgttgaagaaaccaatgcagccaagaagctcaaaccaaactctgatgagtcagacgatctgatggcataccttgacaacgccttgtgggacaccccactagaagtggaagccatgcttggcgcagatgctggtgctgtgactcaggaagaggaaaacccagtggagctatggagcttagatgagatcaatttcatgctggaaggagacttttgaagtgatcgatggttccttagtttgtaaataaagctgtgttggattttgctgttgggggatggtacaagtcacacctcaagctctatgcattggtatctcatgagccttctcttccatagagagtttctcttttaattttgtcgaaataaaaaaggtgtgatgaagtaaatagaggtataataatatctatctattaagtcttgttttgttctttcatttttgtatttcttttctatttaaaagacagtttattagtcttctgagctctctttttgatctttgttatagcgtatcatcaccctcgaaagtgtaatgttttgtacccccaaacttgtttagcattataataaagtctctttg

SEQ ID NO: 43320 - protein, 379 aa, Arabidopsis thaliana
  peptide (1)..(379): Ceres Seq. ID no. 12336181
MCGGAIISDFIPPPRSLRVTNEFIWPDLKNKVKASKKRSNKRSDFFDLDDDFEADFQGFKDDSAFDCEDDDDVFVNVKPFVFTATTKPVASAFVSTGIYLVGSAYAKKTVESAEQAEKSSKRKRKNQYRGIRQRPWGKWAAEIRDPRKGSREWLGTFDTAEEAARAYDAAARRIRGTKAKVNFPEEKNPSVVSQKRPSAKTNNLQKSVAKPNKSVTLVQQPTHLSQQYCNNSFDNSFGDMSFMEEKPQMYNNQFGLTNSFDAGGNNGYQYFSSDQGSNSFDCSEFGWSDHGPKTPEISSMLVNNNEASFVEETNAAKKLKPNSDESDDLMAYLDNALWDTPLEVEAMLGADAGAVTQEEENPVELWSLDEINFMLEGDF

SEQ ID NO: 43321 - DNA, 1251 bp, Arabidopsis thaliana
  misc_feature (1)..(1251): Ceres Seq. ID no. 12389121
  misc_feature (1)..(1251): Ortholog of  Ceres SEQ ID NO 15177965 as cited in SEQ ID NO 58545
cttttacaattgaaaatattttgtaataccatctctaaatctccctcttttgatctccaagtcctccatggttttagggcttttgctttgccgattgatacctaggctctgatttgatttttcctttagaaaactttcaaaaagtttcagtagattggcttaattggctctgttggtccttgtaaagaggataccttttcgtggttggaaaaaaagtcacgttttggcgaaacgctagtttaatgagatagagacgtggccatctttgaaaagtcaacgtttggtcgcaatcggtgacccatggatgttatgattcactcttcaagctttctcctcccttgcgacgaaactagtacagggacgagatacgctctcgttgttctgaaccagagtttgccacgattcactcctcttctctgggaacatgcaaaacttcgtctctgtgctgatggaggcgctaatcgcatctacgacgaattgcctctcttcttccctaatgaagacgctttggccattcgaaacaggtataagccggatgttatcaaaggagatatggattctatacgtcgtgacgtcctcgacttttatataaacttgggaactaaggttatagatgaatctcatgatcaagacaccacagatcttgataaatgcattttgtatatccgtcactctactttgaatcaagagacttccggactccagattcttgccactggagcacttggaggaagatttgatcatgaagccggtaatctcaacgtcttatatcgatatccagatacaaggatagtccttttatctgacgattgcctcatccaactccttccaaagactcatcgacatgaaatacatattcagtcttctctagaagggcctcactgtggactcatacccattggaactccatctgctaaaaccacaacctcagggcttcaatgggatctcagcaacactgagatgagatttggtgggttgataagtacatccaacttggttaaagaagagaaaatcacagtcgaatcggattcggatcttctctggactatatccatcaagaaaacaggactttccatacaagaccatacaccttaggcccggtaacaaaacacactttagtatattatacgctactatgatgttcctgatgcaacgaactagttcaacattattgtgttgatttgttgttcactgtactagctaataatacttgtaccattactgtcgttatacattaagatgcttttttct

SEQ ID NO: 43322 - protein, 264 aa, Arabidopsis thaliana
  peptide (1)..(264): Ceres Seq. ID no. 12389122
MDVMIHSSSFLLPCDETSTGTRYALVVLNQSLPRFTPLLWEHAKLRLCADGGANRIYDELPLFFPNEDALAIRNRYKPDVIKGDMDSIRRDVLDFYINLGTKVIDESHDQDTTDLDKCILYIRHSTLNQETSGLQILATGALGGRFDHEAGNLNVLYRYPDTRIVLLSDDCLIQLLPKTHRHEIHIQSSLEGPHCGLIPIGTPSAKTTTSGLQWDLSNTEMRFGGLISTSNLVKEEKITVESDSDLLWTISIKKTGLSIQDHTP

SEQ ID NO: 43323 - protein, 261 aa, Arabidopsis thaliana
  peptide (1)..(261): Ceres Seq. ID no. 12389123
MIHSSSFLLPCDETSTGTRYALVVLNQSLPRFTPLLWEHAKLRLCADGGANRIYDELPLFFPNEDALAIRNRYKPDVIKGDMDSIRRDVLDFYINLGTKVIDESHDQDTTDLDKCILYIRHSTLNQETSGLQILATGALGGRFDHEAGNLNVLYRYPDTRIVLLSDDCLIQLLPKTHRHEIHIQSSLEGPHCGLIPIGTPSAKTTTSGLQWDLSNTEMRFGGLISTSNLVKEEKITVESDSDLLWTISIKKTGLSIQDHTP

SEQ ID NO: 43324 - protein, 180 aa, Arabidopsis thaliana
  peptide (1)..(180): Ceres Seq. ID no. 12389124
MDSIRRDVLDFYINLGTKVIDESHDQDTTDLDKCILYIRHSTLNQETSGLQILATGALGGRFDHEAGNLNVLYRYPDTRIVLLSDDCLIQLLPKTHRHEIHIQSSLEGPHCGLIPIGTPSAKTTTSGLQWDLSNTEMRFGGLISTSNLVKEEKITVESDSDLLWTISIKKTGLSIQDHTP

SEQ ID NO: 43325 - DNA, 1459 bp, Arabidopsis thaliana
  misc_feature (1)..(1459): Ceres Seq. ID no. 12488248
  misc_feature (1)..(1459): Ortholog of  Ceres SEQ ID NO 14315063 as cited in SEQ ID NO 52256
  misc_feature (1)..(1459): Ortholog of  Ceres SEQ ID NO 13594345 as cited in SEQ ID NO 58043
  misc_feature (1)..(1459): Ortholog of  Ceres SEQ ID NO 14308594 as cited in SEQ ID NO 60384
  misc_feature (1)..(1459): Ortholog of  Ceres SEQ ID NO 12614112 as cited in SEQ ID NO 60891
  misc_feature (1)..(1459): Ortholog of  Ceres SEQ ID NO 13597574 as cited in SEQ ID NO 64677
  misc_feature (1)..(1459): Ortholog of  Ceres SEQ ID NO 13597678 as cited in SEQ ID NO 65375
  misc_feature (1)..(1459): Ortholog of  Ceres SEQ ID NO 13662880 as cited in SEQ ID NO 65422
  misc_feature (1)..(1459): Ortholog of  Ceres SEQ ID NO 12779098 as cited in SEQ ID NO 67698
  misc_feature (1)..(1459): Ortholog of  Ceres SEQ ID NO 13596180 as cited in SEQ ID NO 67941
  misc_feature (1)..(1459): Ortholog of  Ceres SEQ ID NO 13591190 as cited in SEQ ID NO 68044
  misc_feature (1)..(1459): Ortholog of  Ceres SEQ ID NO 13596089 as cited in SEQ ID NO 68373
atgagagaaggatctcatcttatcgtcttgcctttcccaggacaaggccacataactccaatgtcccagttctgcaaacgcttagcctcaaaaggtcttaagctcactctggtcctcgtctccgacaaaccctctcctccatacaaaacagagcacgactcaatcactgtcttccccatctccaacggcttccaagaaggcgaggaaccattacaagacctcgatgattacatggaaagagtagaaaccagcatcaaaaacaccttaccgaagttggttgaagacatgaaactgtcgggaaatccacctagggctatcgtgtacgactccaccatgccatggcttcttgatgtagctcatagttatggattgagcggtgccgtgtttttcacgcaaccttggcttgtcacagctatttactaccatgttttcaagggttcgttctctgtaccgtctacaaagtacggtcactcgacattagcatctttcccttcgttcccgatgctgactgcaaatgatttgccgtctttcctctgcgaatcgtcctcatacccgaatatactgaggattgtggtggatcagctctcaaacattgatcgagtcgacatagtgttgtgcaacactttcgataaattggaggaaaagttgttgaaatgggtccaaagcttgtggccagtcttgaatattggaccaacggttccatcgatgtatttagacaaacgactgtctgaagacaagaactacggttttagcctcttcaatgcgaaagtcgctgaatgcatggagtggctaaactcaaaggagcctaattctgttgtctatttatcattcggaagtttggtgattctaaaagaagatcaaatgttggaactcgctgcgggtctgaaacagagcggacgtttctttctgtgggttgtgagagagacagagacacacaaacttccaagaaactatgtcgaggaaatcggtgaaaaaggacttattgtaagctggagtcctcagcttgacgtacttgcacataaatcaatcggttgtttcttgacacactgtggatggaactcgacgttagagggattgagtttgggagttccaatgattggtatgccacactggactgatcagcccacgaatgctaagttcatgcaggatgtgtggaaggttggggtaagggttaaggcagaaggtgatgggtttgtgagaagagaagagattatgagaagtgtggaagaagttatggagggagagaaagggaaagagattagaaagaatgctgagaaatggaaagtgttggctcaagaggcagtttctgaaggaggtagctctgataagagcatcaatgagtttgtttctatgttttgttgaatgatttaaattgatatgttcaaaagtacatcgtcttttgcaagtccaattgtaattcttgttgttgttgtagtaataactaataatatagtttctc

SEQ ID NO: 43326 - protein, 453 aa, Arabidopsis thaliana
  peptide (1)..(453): Ceres Seq. ID no. 12488249
MREGSHLIVLPFPGQGHITPMSQFCKRLASKGLKLTLVLVSDKPSPPYKTEHDSITVFPISNGFQEGEEPLQDLDDYMERVETSIKNTLPKLVEDMKLSGNPPRAIVYDSTMPWLLDVAHSYGLSGAVFFTQPWLVTAIYYHVFKGSFSVPSTKYGHSTLASFPSFPMLTANDLPSFLCESSSYPNILRIVVDQLSNIDRVDIVLCNTFDKLEEKLLKWVQSLWPVLNIGPTVPSMYLDKRLSEDKNYGFSLFNAKVAECMEWLNSKEPNSVVYLSFGSLVILKEDQMLELAAGLKQSGRFFLWVVRETETHKLPRNYVEEIGEKGLIVSWSPQLDVLAHKSIGCFLTHCGWNSTLEGLSLGVPMIGMPHWTDQPTNAKFMQDVWKVGVRVKAEGDGFVRREEIMRSVEEVMEGEKGKEIRKNAEKWKVLAQEAVSEGGSSDKSINEFVSMFC

SEQ ID NO: 43327 - protein, 433 aa, Arabidopsis thaliana
  peptide (1)..(433): Ceres Seq. ID no. 12488250
MSQFCKRLASKGLKLTLVLVSDKPSPPYKTEHDSITVFPISNGFQEGEEPLQDLDDYMERVETSIKNTLPKLVEDMKLSGNPPRAIVYDSTMPWLLDVAHSYGLSGAVFFTQPWLVTAIYYHVFKGSFSVPSTKYGHSTLASFPSFPMLTANDLPSFLCESSSYPNILRIVVDQLSNIDRVDIVLCNTFDKLEEKLLKWVQSLWPVLNIGPTVPSMYLDKRLSEDKNYGFSLFNAKVAECMEWLNSKEPNSVVYLSFGSLVILKEDQMLELAAGLKQSGRFFLWVVRETETHKLPRNYVEEIGEKGLIVSWSPQLDVLAHKSIGCFLTHCGWNSTLEGLSLGVPMIGMPHWTDQPTNAKFMQDVWKVGVRVKAEGDGFVRREEIMRSVEEVMEGEKGKEIRKNAEKWKVLAQEAVSEGGSSDKSINEFVSMFC

SEQ ID NO: 43328 - protein, 376 aa, Arabidopsis thaliana
  peptide (1)..(376): Ceres Seq. ID no. 12488251
MERVETSIKNTLPKLVEDMKLSGNPPRAIVYDSTMPWLLDVAHSYGLSGAVFFTQPWLVTAIYYHVFKGSFSVPSTKYGHSTLASFPSFPMLTANDLPSFLCESSSYPNILRIVVDQLSNIDRVDIVLCNTFDKLEEKLLKWVQSLWPVLNIGPTVPSMYLDKRLSEDKNYGFSLFNAKVAECMEWLNSKEPNSVVYLSFGSLVILKEDQMLELAAGLKQSGRFFLWVVRETETHKLPRNYVEEIGEKGLIVSWSPQLDVLAHKSIGCFLTHCGWNSTLEGLSLGVPMIGMPHWTDQPTNAKFMQDVWKVGVRVKAEGDGFVRREEIMRSVEEVMEGEKGKEIRKNAEKWKVLAQEAVSEGGSSDKSINEFVSMFC

SEQ ID NO: 43329 - DNA, 877 bp, Arabidopsis thaliana
  misc_feature (1)..(877): Ceres Seq. ID no. 13497392
  misc_feature (1)..(877): Ortholog of  Ceres SEQ ID NO 13661890 as cited in SEQ ID NO 61482
taaaagtcagcaaaacacaaggcatattcctcttctcttcctcagccttatttttctgatattcagtttcaaggatatatccatggcgatccagaagatcctctttgcttcacttctcatatgctcactgatccaatccatccacggggcggaaaaactaagactcttcaaagagctggacaaaggtgcacttgatgtcaccactaaacccagccgagaaggaccaggtgttgttttggatgccggcaaggatacgttgaacattacatggacgctaagctcgattgggtctaaaagagaggctgaatttaagatcatcaaagttaagctatgctacgctccacctagccaagttgaccgaccatggcgcaaaacccatgacgagctcttcaaagacaagacctgcccacacaagatcatagccaagccttatgacaaaacacttcaatcaactacttggactcttgagcgtgacatccccaccggaacctacttcgttcgtgcctacgcggttgatgccattggccatgaagttgcctatggacagagcaccgacgatgccaagaaaaccaatctcttcagcgttcaggctatcagtggccgccacgcgtccctagatattgcctccatctgtttcagtgtcttctccgtcgtggctcttgtcgtcttctttgtcaatgagaagaggaaggccaagatagagcaaagcaaatgagtcgtttactttgcgtatttgtgacgttgaacccaaaaaaagttgactttgaactttcttgtttaccaattccttttgtcttgttgcacacttcttctttcttatatgcttttatttatgtgtttgtacaattaagccattgatatggaacaaaactaatcc

SEQ ID NO: 43330 - protein, 237 aa, Arabidopsis thaliana
  peptide (1)..(237): Ceres Seq. ID no. 13497393
KSQQNTRHIPLLFLSLIFLIFSFKDISMAIQKILFASLLICSLIQSIHGAEKLRLFKELDKGALDVTTKPSREGPGVVLDAGKDTLNITWTLSSIGSKREAEFKIIKVKLCYAPPSQVDRPWRKTHDELFKDKTCPHKIIAKPYDKTLQSTTWTLERDIPTGTYFVRAYAVDAIGHEVAYGQSTDDAKKTNLFSVQAISGRHASLDIASICFSVFSVVALVVFFVNEKRKAKIEQSK

SEQ ID NO: 43331 - protein, 210 aa, Arabidopsis thaliana
  peptide (1)..(210): Ceres Seq. ID no. 13497394
MAIQKILFASLLICSLIQSIHGAEKLRLFKELDKGALDVTTKPSREGPGVVLDAGKDTLNITWTLSSIGSKREAEFKIIKVKLCYAPPSQVDRPWRKTHDELFKDKTCPHKIIAKPYDKTLQSTTWTLERDIPTGTYFVRAYAVDAIGHEVAYGQSTDDAKKTNLFSVQAISGRHASLDIASICFSVFSVVALVVFFVNEKRKAKIEQSK

SEQ ID NO: 43332 - DNA, 1876 bp, Arabidopsis thaliana
  misc_feature (1)..(1876): Ceres Seq. ID no. 12602845
  misc_feature (1)..(1876): Ortholog of  Ceres SEQ ID NO 15178728 as cited in SEQ ID NO 67280
tacgtctttcaaaaactaatctttctggtttcccgatgcattggtttggattcgagttccacgagaagccaccaaatcaaataggatcagatggatgattcttcaactttacaagacatgttgtgaaagatcttgactcttgatcatattataaacgaacaagaagctataccttgttaggagtcatttgttggtattgaatctatttgtaactacctgcgttgatataatggaggaagcatcaacatcgacaccagcaccaatggctgcaaaaccaaccgttgttaaaaagacaatggcgaagcaattcaccgggaaacgcgaagattcgcagctccattcggctgtgagacgcggagatttctctgcggtgaaagagattttgagtaatcatatggaatcagaagatgaactaagagatttgttgcggaaacagaaccaatgcggtgagaccgctctttatgtggcggcagaatatggtgatgcggacgtggttgcagagctcatcaagtactatgatcttgaagacgctgagaccaaagctagaaatgggttcgatcctttccacattgctgctaaacaaggcgaattagatgttttgagagtactaatggaagaacatccggagctatcaatgacggtggacttatcaaacacgacggctctacacacggcggcagctcagggacacgtagaggtcgtagagtatctactagaagcagcagggagtagcctagccgcgatcgcaaaaagcaacgggaaaacagcattgcactcggcggctaggaatggtcacgcggaagtggtaaaagcgattgtggcggtggaaccggacacggcaacgaggactgataaaaagggtcagacgccacttcacatggcggtgaaaggacaaagcattgatgtggtggttgagttaatgaagggacatcggtcttcgttgaatatggctgattctaaagggaacactgcgttacatgttgctactaggaaaggtcgcattaagatagtggaattacttctagataacaacgagacaagcccaagcacaaaagcgataaacagagcaggagaaacgccgcttgacacggctgagaaaaccggccatcctcagatcgccgcggttctcaaaacccgcggcgttccctcggctaaagctatcaacaacactactaggccaaacgcggcgcgtgagctcaaacaaacggtgagcgacatcaaacatgaagttcatcaccagctagaacacgctcgagagacaagaaaacgcgttcaaggaatcgccaaacgcattaacaaaatgcacgtagaaggtcttgacaatgcgattaactcaaccacagtcgtggcggttctaattgcaaccgtcgctttcgccgccattttcactgtcccggggcaatatgcagacgaattgagttcgctcttaccgggacaatctctcggagaagcgaacatcgcggatagacccgcgtttgcgatcttcttcatattcgattcaatcgctctttttatatctttagcggttgtggtggttcagacttcagtggttgcgattgaacacaaggcaaagaagaatatgatggctgtgataaacaagttgatgtggttagcttgcgttttgatatctgtggcatttttggcgttagcgtttgtggtggttggtgaagaagagcggtggctagcggttggcgtgacggtgtttggtgcaacgataatgctcacgacgcttgggaccatgtgttattgggtcattatgcatcgaatcgaggcttcgaatgttagaaagtcgagaaaagagtcgatggcaagatcgagacaatcaggtttattggaattttctgggattttaactaagagaatgtatgctatttag

SEQ ID NO: 43333 - protein, 548 aa, Arabidopsis thaliana
  peptide (1)..(548): Ceres Seq. ID no. 12602846
MEEASTSTPAPMAAKPTVVKKTMAKQFTGKREDSQLHSAVRRGDFSAVKEILSNHMESEDELRDLLRKQNQCGETALYVAAEYGDADVVAELIKYYDLEDAETKARNGFDPFHIAAKQGELDVLRVLMEEHPELSMTVDLSNTTALHTAAAQGHVEVVEYLLEAAGSSLAAIAKSNGKTALHSAARNGHAEVVKAIVAVEPDTATRTDKKGQTPLHMAVKGQSIDVVVELMKGHRSSLNMADSKGNTALHVATRKGRIKIVELLLDNNETSPSTKAINRAGETPLDTAEKTGHPQIAAVLKTRGVPSAKAINNTTRPNAARELKQTVSDIKHEVHHQLEHARETRKRVQGIAKRINKMHVEGLDNAINSTTVVAVLIATVAFAAIFTVPGQYADELSSLLPGQSLGEANIADRPAFAIFFIFDSIALFISLAVVVVQTSVVAIEHKAKKNMMAVINKLMWLACVLISVAFLALAFVVVGEEERWLAVGVTVFGATIMLTTLGTMCYWVIMHRIEASNVRKSRKESMARSRQSGLLEFSGILTKRMYAI

SEQ ID NO: 43334 - protein, 537 aa, Arabidopsis thaliana
  peptide (1)..(537): Ceres Seq. ID no. 12602847
MAAKPTVVKKTMAKQFTGKREDSQLHSAVRRGDFSAVKEILSNHMESEDELRDLLRKQNQCGETALYVAAEYGDADVVAELIKYYDLEDAETKARNGFDPFHIAAKQGELDVLRVLMEEHPELSMTVDLSNTTALHTAAAQGHVEVVEYLLEAAGSSLAAIAKSNGKTALHSAARNGHAEVVKAIVAVEPDTATRTDKKGQTPLHMAVKGQSIDVVVELMKGHRSSLNMADSKGNTALHVATRKGRIKIVELLLDNNETSPSTKAINRAGETPLDTAEKTGHPQIAAVLKTRGVPSAKAINNTTRPNAARELKQTVSDIKHEVHHQLEHARETRKRVQGIAKRINKMHVEGLDNAINSTTVVAVLIATVAFAAIFTVPGQYADELSSLLPGQSLGEANIADRPAFAIFFIFDSIALFISLAVVVVQTSVVAIEHKAKKNMMAVINKLMWLACVLISVAFLALAFVVVGEEERWLAVGVTVFGATIMLTTLGTMCYWVIMHRIEASNVRKSRKESMARSRQSGLLEFSGILTKRMYAI

SEQ ID NO: 43335 - protein, 526 aa, Arabidopsis thaliana
  peptide (1)..(526): Ceres Seq. ID no. 12602848
MAKQFTGKREDSQLHSAVRRGDFSAVKEILSNHMESEDELRDLLRKQNQCGETALYVAAEYGDADVVAELIKYYDLEDAETKARNGFDPFHIAAKQGELDVLRVLMEEHPELSMTVDLSNTTALHTAAAQGHVEVVEYLLEAAGSSLAAIAKSNGKTALHSAARNGHAEVVKAIVAVEPDTATRTDKKGQTPLHMAVKGQSIDVVVELMKGHRSSLNMADSKGNTALHVATRKGRIKIVELLLDNNETSPSTKAINRAGETPLDTAEKTGHPQIAAVLKTRGVPSAKAINNTTRPNAARELKQTVSDIKHEVHHQLEHARETRKRVQGIAKRINKMHVEGLDNAINSTTVVAVLIATVAFAAIFTVPGQYADELSSLLPGQSLGEANIADRPAFAIFFIFDSIALFISLAVVVVQTSVVAIEHKAKKNMMAVINKLMWLACVLISVAFLALAFVVVGEEERWLAVGVTVFGATIMLTTLGTMCYWVIMHRIEASNVRKSRKESMARSRQSGLLEFSGILTKRMYAI

SEQ ID NO: 43336 - DNA, 1420 bp, Arabidopsis thaliana
  misc_feature (1)..(1420): Ceres Seq. ID no. 13499680
  misc_feature (1)..(1420): Ortholog of  Ceres SEQ ID NO 14311713 as cited in SEQ ID NO 51356
  misc_feature (1)..(1420): Ortholog of  Ceres SEQ ID NO 14303126 as cited in SEQ ID NO 67219
  misc_feature (1)..(1420): Ortholog of  Ceres SEQ ID NO 12635836 as cited in SEQ ID NO 0
aaagattcttggtctccgatccagtcacctgaagattctcggagcttcttttgaccacacactttcaatggcggatgctgtgaacgctcaaactccatcgctctccgagcaatatcatttggagaaagaagtgaagcaagacacaagtgcaaagcctgttgaagtgaaagaggtggcaccagaagttactacacaagctgaagaggttaagacggagcaagctaaggaagaatctcctgttgaggaagcggtttctgtagttgaagagaagtctgaatctgctcctgaatcaacggaagtggcttctgaggctcctgctgcagcggaagacaatgctgaagagactcctgctgctgctgaagaaaataatgacgaaaacgctagtgaagaagttgctgaagaaacccctgatgagatcaagcttgagacagctcctgcttgatctcatcaggggtttcttttttttttttttttttgaattttttcaccaagtgttcgttcacggcattgcttgtcctccagtatgagtatctccggtgctgcagttggttcaggcagaaatttaagaagagcggtagagtttgggaaaactcatgtggttaggcctaaagggaaacatcaagcaactattgtctggttacatgggcttggggacaatggctcgagctggtcccagcttttggagacccttccccttccaaatatcaaatggatttgcccgactgctccttctcaaccaataagtttatttggtggttttccctccacagcttggtttgatgttgtggacatcaatgaagatggacctgatgatatggaaggattggatgtggctgctgcacatgttgcaaatctgttgtcgaatgagcctgctgacattaaattaggtgttggaggattcagcatgggtgcggcgacatctctatattctgcaacttgttttgctctcggtaaatatggaaatggcaatccataccctatcaatttaagcgcaatcataggcttaagcggctggcttccttgtgcaaagacattggctggcaaactagaagaggaacagatcaagaaccgagctgcatcgttgcccattgttgtctgtcatggaaaagctgatgatgtggtaccgttcaagtttggggagaaatcttcacaggctttgctttcaaatgggtttaagaaggtgaccttcaaaccttacagtgcacttggtcaccacacaatcccacaggagttggatgagttgtgcgcatggttgacatccacgctcagcctcgaaggttgatacttcctatgatgtagctttctgatgaaaacccttcaactcttgagagtttgattgaattggatgtttcaggatttcacaatgttttcattggaatatttgtgtaagacacattcgtctagtagcaaatcttctcct

SEQ ID NO: 43337 - protein, 252 aa, Arabidopsis thaliana; identical to SEQ ID NO: 37738
  peptide (1)..(252): Ceres Seq. ID no. 13499681

SEQ ID NO: 43338 - protein, 155 aa, Arabidopsis thaliana; identical to SEQ ID NO: 37739
  peptide (1)..(155): Ceres Seq. ID no. 13499682

SEQ ID NO: 43339 - protein, 146 aa, Arabidopsis thaliana
  peptide (1)..(146): Ceres Seq. ID no. 13499683
KILGLRSSHLKILGASFDHTLSMADAVNAQTPSLSEQYHLEKEVKQDTSAKPVEVKEVAPEVTTQAEEVKTEQAKEESPVEEAVSVVEEKSESAPESTEVASEAPAAAEDNAEETPAAAEENNDENASEEVAEETPDEIKLETAPA

SEQ ID NO: 43340 - DNA, 1689 bp, Arabidopsis thaliana
  misc_feature (1)..(1689): Ceres Seq. ID no. 12370311
  misc_feature (1)..(1689): Ortholog of  Ceres SEQ ID NO 12474478 as cited in SEQ ID NO 96
  misc_feature (1)..(1689): Ortholog of  Ceres SEQ ID NO 14309053 as cited in SEQ ID NO 0
accgactctctctctctctctctccgtaacaaaaaaatcaccaatggcaaaacaatatctctttgtactcctctcaatctcctatctcttatcactggagctcacggcggccaccgcagcctcacagaccggagcttccaaaaaagccataaacttcatccaatcttcttaaaaaaccaccacataccctgccttatgtgtccactcactctccgtctacgcaaacgacatccaaacaagccctaaacgtttagctgagaccgctatagccgtgacactaagccgagcccaatccacgaagctcttcgtctcgcgtctaacacgtatgaagggtcttaagaagcgcgaggtcgaagccatcaaagattgcgtcgaggagatgaacgataccgttgaccgtttgaccaaatctgttcaagaactgaagttgtgtgggagtgtcaaacagaagaaagagtcgagttctgaagagtcgggatcggaggaagagtgaaacagaaatgagattttacattgataaacaaaacaaaaaatacaatacttttgtcctaatcttgacggaaacttttttttttgctgcggaacatttcctttattttaatataatggtatgtgaaaatgaattcatctaaagacaaactgaaaaacatgaaacaagactctctttttgtagcagatagagagagacacagagagaaaaagagatggcaaacgaaacggctagtaaagtagcgggttacttatctaaccaagactcaagacaccaaaacagacatgtttgcatctaagatatgcttatttgttgacagattaataatactcagggtagtggcactggtggaacttggccgttgcttcctgtgccagctccaatggtcggggttggcgcttcaaatccggggtttgggacaagcgtatcatcgccaccagggagttgggtgtgaggtccggccccttgtccaccattatatgatgggattcccccaccagtaagtggagctccggtgacaggattgtaagggtagaacggcttcttgcatttgggaggaagcaagaaccttccaacaccgggaatgagaatagttggtttgggctcaatggttacaagaaagtcagggtgtttgacatcagtggtcttaggggacttgggaacgtgacgtagtccactcacttgctctacagatccaagcactaggcttaaaaccacgacaatgactgcggaggtgataagtgaagaagccattaattttattttattttgttgtagaggagaaagctcgtgtgtttgtttgaccaaatctgttcaagaactgaagttgtgtgggagtgccaaagatcaagaccagtttgcgtaccacattagtaatgctcagacttggactagtgcggctttgactgacgagaacacttgctccgatgggttctcgggtcgggttatggatgggaggatcaagaactcggttcgggctagaatcatgaacgtgggacatgaaaccagcaacgctttgtccttgattaatgcctttgctaaaacttactaatttaaaactatattttgtcctgtaaaatatatatatagataaatgtaatgtcttgctaagagtttgatgtgatatatttttttcgattttggtagtttctttttgttttgtaacgtggtttataatagtataatgtgtattttgagct

SEQ ID NO: 43341 - protein, 109 aa, Arabidopsis thaliana
  peptide (1)..(109): Ceres Seq. ID no. 12370312
MTAEVISEEAINFILFCCRGESSCVCLTKSVQELKLCGSAKDQDQFAYHISNAQTWTSAALTDENTCSDGFSGRVMDGRIKNSVRARIMNVGHETSNALSLINAFAKTY

SEQ ID NO: 43342 - protein, 81 aa, Arabidopsis thaliana
  peptide (1)..(81): Ceres Seq. ID no. 12370313
TDSLSLSLRNKKITNGKTISLCTPLNLLSLITGAHGGHRSLTDRSFQKSHKLHPIFLKNHHIPCLMCPLTLRLRKRHPNKP

SEQ ID NO: 43343 - protein, 72 aa, Arabidopsis thaliana
  peptide (1)..(72): Ceres Seq. ID no. 12370314
MFASKICLFVDRLIILRVVALVELGRCFLCQLQWSGLALQIRGLGQAYHRHQGVGCEVRPLVHHYMMGFPHQ

SEQ ID NO: 43344 - DNA, 1206 bp, Arabidopsis thaliana
  misc_feature (1)..(1206): Ceres Seq. ID no. 12329920
  misc_feature (1)..(1206): Ortholog of  Ceres SEQ ID NO 14304057 as cited in SEQ ID NO 53782
ccggcgaagagtttcggagaacaagtttggtctttttaggggtttgagcagtggagtcggtaaccatgttatgcggaggctctcgcgcctccgtgcatttgtgggaccatcgtcatcctcctaggctcggtgctaaggttttgcggaaatcttcgttcatgctcagaccttgttcggctatatcgcagcagcggataaagtcgtcgtttaggtctcactgtaaaactccaagaaaaatcccagctcctctcgattgtttcagccagggagatgatcatcctgagctttcagctgaagggctttccccagttgcaggaggcattgttgctctagggaagtttgatgccctgcatatcggtcatcgagagcttgcaattcaagctgcaagaattggtactccatatctactgtcgtttgttggattggctgaagtacttggttggaagcctagagcaccgatagtagccaaatgcgacagaaaacgagtgctttcctcttgggcatcgtattgtggtagcatagcaccggtagagtttgagattgaatttgccagcgttcgacaccttaacccacaacagtttgtcgagaagttgtcaagagagcttagagtctgcggagttgtggcaggcgaaaattacaggtttggataccgggcttctggtgacgcctctgaacttgtgaggttatgcaaagactttggtatcagcgcttacatcattaactccgtgatggataagaaccaagtctctgtaaacacagaggaggaggactcaaagtcgaaagaaagaggtcaagtctcatccacacgagtccgtcatgctctagctgcaggagatgtgaggtatgtaacagagctcctcggcagaccacacagggtcatctctcggacaagaacacaagatataacgagcaaaagagggaggatctcgcttcagacatcttcgctactaaatttaccaccagggaatggagtttacaaagcatgctcgcttatagttggtgataagcatccaatttcgtgtaaggttattgtcgatacatcgaatctctatatagaaacagaggaagaacgtttccacaactcagatgagtctcaagagtttcaactcttagggattgagttcggttaattcacacattgataatcaaaagaataacatttccatttcaagataacgattaacaaagatgttaactttgactccg

SEQ ID NO: 43345 - protein, 354 aa, Arabidopsis thaliana
  peptide (1)..(354): Ceres Seq. ID no. 12329921
MLCGGSRASVHLWDHRHPPRLGAKVLRKSSFMLRPCSAISQQRIKSSFRSHCKTPRKIPAPLDCFSQGDDHPELSAEGLSPVAGGIVALGKFDALHIGHRELAIQAARIGTPYLLSFVGLAEVLGWKPRAPIVAKCDRKRVLSSWASYCGSIAPVEFEIEFASVRHLNPQQFVEKLSRELRVCGVVAGENYRFGYRASGDASELVRLCKDFGISAYIINSVMDKNQVSVNTEEEDSKSKERGQVSSTRVRHALAAGDVRYVTELLGRPHRVISRTRTQDITSKRGRISLQTSSLLNLPPGNGVYKACSLIVGDKHPISCKVIVDTSNLYIETEEERFHNSDESQEFQLLGIEFG

SEQ ID NO: 43346 - protein, 323 aa, Arabidopsis thaliana
  peptide (1)..(323): Ceres Seq. ID no. 12329922
MLRPCSAISQQRIKSSFRSHCKTPRKIPAPLDCFSQGDDHPELSAEGLSPVAGGIVALGKFDALHIGHRELAIQAARIGTPYLLSFVGLAEVLGWKPRAPIVAKCDRKRVLSSWASYCGSIAPVEFEIEFASVRHLNPQQFVEKLSRELRVCGVVAGENYRFGYRASGDASELVRLCKDFGISAYIINSVMDKNQVSVNTEEEDSKSKERGQVSSTRVRHALAAGDVRYVTELLGRPHRVISRTRTQDITSKRGRISLQTSSLLNLPPGNGVYKACSLIVGDKHPISCKVIVDTSNLYIETEEERFHNSDESQEFQLLGIEFG

SEQ ID NO: 43347 - DNA, 611 bp, Arabidopsis thaliana
  misc_feature (1)..(611): Ceres Seq. ID no. 12336560
  misc_feature (1)..(611): Ortholog of  Ceres SEQ ID NO 12581874 as cited in SEQ ID NO 55321
accaaacacttgcccttcacacttctttgtcatcttccctctttccttcttctttcttcctcaaattcacttattcacattctctcaccagacacaaactccagattcatccgacaatggaaactttcagaacattccatctttttctcttcttcttcttcttcacattcactactaccctgacgtcaccatctcagatcgcagactgtacaatgtgcacttcttgtgacaacccttgtcaaccaaacccttctcctcctcctccaccgtcaaatccatctcctcctcctccatctcccaccaccaccgcctgtcctccacctcctagctccagtggtggtggtccttactactactaccctcctgcttctcaatctggctcttaccgtccaccaccttcttcctccagtggtggctactactatccacctcctaaaagtggaggaaactacccttatacaccgcctccaaaccctatcgttccatattttccgttttactattacaaccctccgccgcaatctgttatgtccggatccgatgcaaagatcagattctcttacggagtttcatttattttaattttctctctttatttcggttgcttctag

SEQ ID NO: 43348 - protein, 202 aa, Arabidopsis thaliana
  peptide (1)..(202): Ceres Seq. ID no. 12336561
QTLALHTSLSSSLFPSSFFLKFTYSHSLTRHKLQIHPTMETFRTFHLFLFFFFFTFTTTLTSPSQIADCTMCTSCDNPCQPNPSPPPPPSNPSPPPPSPTTTACPPPPSSSGGGPYYYYPPASQSGSYRPPPSSSSGGYYYPPPKSGGNYPYTPPPNPIVPYFPFYYYNPPPQSVMSGSDAKIRFSYGVSFILIFSLYFGCF

SEQ ID NO: 43349 - protein, 164 aa, Arabidopsis thaliana
  peptide (1)..(164): Ceres Seq. ID no. 12336562
METFRTFHLFLFFFFFTFTTTLTSPSQIADCTMCTSCDNPCQPNPSPPPPPSNPSPPPPSPTTTACPPPPSSSGGGPYYYYPPASQSGSYRPPPSSSSGGYYYPPPKSGGNYPYTPPPNPIVPYFPFYYYNPPPQSVMSGSDAKIRFSYGVSFILIFSLYFGCF

SEQ ID NO: 43350 - protein, 132 aa, Arabidopsis thaliana
  peptide (1)..(132): Ceres Seq. ID no. 12336563
MCTSCDNPCQPNPSPPPPPSNPSPPPPSPTTTACPPPPSSSGGGPYYYYPPASQSGSYRPPPSSSSGGYYYPPPKSGGNYPYTPPPNPIVPYFPFYYYNPPPQSVMSGSDAKIRFSYGVSFILIFSLYFGCF

SEQ ID NO: 43351 - DNA, 1566 bp, Arabidopsis thaliana
  misc_feature (1)..(1566): Ceres Seq. ID no. 13576649
  misc_feature (1)..(1566): Ortholog of  Ceres SEQ ID NO 14313074 as cited in SEQ ID NO 59199
acaacagttagatattttcaattaatgacatcttcttcttctcctttcactgcaaaaccgaaagcttgagactttgagattatgtctatgtcatcttcttcttcttccatcgatcacttcatcacctttcgtcatcttgatcttattctccactgtataaaatcagcgagattttaagggattgtgaaggtaccatcttaaacacaaaatgggtacttctactacagagagtgtggtggcgtgtgaattttgcggcgagagaacggcggttctgttttgtagagccgatacggcgaagctttgtttgccttgtgaccagcacgtgcactcggcgaaccttctctcgaggaagcatgttcgttctcagatctgtgataactgtagcaaagagccggtgtccgtacgttgcttcacagataatctcgtattgtgtcaggagtgtgattgggatgttcacggaagctgttcctcctccgcgacgcatgaacgctccgccgtggaagggttttcaggttgtccttcggttttggagcttgctgctgtgtggggaatcgatttaaagggtaagaagaaagaagatgacgaagacgaattgactaagaattttgggatggggttggattcgtggggttctggatctaacatcgttcaagaactgattgttccttatgatgtgtcttgcaaaaagcaaagctttagctttgggaggtctaagcaggtagtgtttgaacagcttgagttactgaagagaggcttcgttgaaggcgaaggagagattatggttccggagggaatcaatggcggaggaagcatttctcagccatctccgacgacgtcgtttacttctttgcttatgtctcaaagtctttgtggtaatggtatgcaatggaatgctactaatcatagcactggccagaacactcagatatgggattttaacttgggacagtcgaggaaccctgatgaacctagtccagtcgaaactaaaggctctactttcacattcaacaacgttactcatctcaagaacgatacccgaaccaccaatatgaatgctttcaaagagagttaccagcaggaggattccgtccactcaacttctaccaagggacaggaaacatctaagagcaacaatattcctgctgccattcactcgcataaaagttctaacgactcctgtggcttgcattgcacggaacatattgctattactagtaatagagccacaagattggtggcggtaacgaatgctgatctagagcagatggcacagaacagagataatgctatgcagcggtacaaggaaaagaagaaaacgcggagatatgataagaccataagatatgaaacgaggaaggcgagagccgagaccaggttgcgtgttaagggcagatttgtgaaagctacagatccttagatgtctctccacgttaggttttacatttgagatcctaagttaggaactttttttgttttttctactttcaactaccttgtaaatgtaaatgatcgatcttcagctgcataatgtgtggccagatttttgtaatttttacgtttaacctt

SEQ ID NO: 43352 - protein, 402 aa, Arabidopsis thaliana
  peptide (1)..(402): Ceres Seq. ID no. 13576650
MGTSTTESVVACEFCGERTAVLFCRADTAKLCLPCDQHVHSANLLSRKHVRSQICDNCSKEPVSVRCFTDNLVLCQECDWDVHGSCSSSATHERSAVEGFSGCPSVLELAAVWGIDLKGKKKEDDEDELTKNFGMGLDSWGSGSNIVQELIVPYDVSCKKQSFSFGRSKQVVFEQLELLKRGFVEGEGEIMVPEGINGGGSISQPSPTTSFTSLLMSQSLCGNGMQWNATNHSTGQNTQIWDFNLGQSRNPDEPSPVETKGSTFTFNNVTHLKNDTRTTNMNAFKESYQQEDSVHSTSTKGQETSKSNNIPAAIHSHKSSNDSCGLHCTEHIAITSNRATRLVAVTNADLEQMAQNRDNAMQRYKEKKKTRRYDKTIRYETRKARAETRLRVKGRFVKATDP

SEQ ID NO: 43353 - protein, 268 aa, Arabidopsis thaliana
  peptide (1)..(268): Ceres Seq. ID no. 13576651
MGLDSWGSGSNIVQELIVPYDVSCKKQSFSFGRSKQVVFEQLELLKRGFVEGEGEIMVPEGINGGGSISQPSPTTSFTSLLMSQSLCGNGMQWNATNHSTGQNTQIWDFNLGQSRNPDEPSPVETKGSTFTFNNVTHLKNDTRTTNMNAFKESYQQEDSVHSTSTKGQETSKSNNIPAAIHSHKSSNDSCGLHCTEHIAITSNRATRLVAVTNADLEQMAQNRDNAMQRYKEKKKTRRYDKTIRYETRKARAETRLRVKGRFVKATDP

SEQ ID NO: 43354 - protein, 212 aa, Arabidopsis thaliana
  peptide (1)..(212): Ceres Seq. ID no. 13576652
MVPEGINGGGSISQPSPTTSFTSLLMSQSLCGNGMQWNATNHSTGQNTQIWDFNLGQSRNPDEPSPVETKGSTFTFNNVTHLKNDTRTTNMNAFKESYQQEDSVHSTSTKGQETSKSNNIPAAIHSHKSSNDSCGLHCTEHIAITSNRATRLVAVTNADLEQMAQNRDNAMQRYKEKKKTRRYDKTIRYETRKARAETRLRVKGRFVKATDP

SEQ ID NO: 43355 - DNA, 1294 bp, Arabidopsis thaliana
  misc_feature (1)..(1294): Ceres Seq. ID no. 13491599
  misc_feature (1)..(1294): Ortholog of  Ceres SEQ ID NO 15224418 as cited in SEQ ID NO 51528
  misc_feature (1)..(1294): Ortholog of  Ceres SEQ ID NO 13593846 as cited in SEQ ID NO 53152
  misc_feature (1)..(1294): Ortholog of  Ceres SEQ ID NO 12781936 as cited in SEQ ID NO 56320
  misc_feature (1)..(1294): Ortholog of  Ceres SEQ ID NO 13659489 as cited in SEQ ID NO 66986
  misc_feature (1)..(1294): Ortholog of  Ceres SEQ ID NO 15175169 as cited in SEQ ID NO 0
cctttcccaattgcttccacgacgacggaggaggagaagcaaacccagaaaccttaaaaattcagaaaaagggacgaccttttttccgatcttatcgatttttgaatgagattagaagaacctatcttctaagtttttctttgatatctttttctctttgatcgatggatgagtcgttcgctaatctacaatcaagccatttgcttggttcagttccggctgtgatcagcgacgacaagagaagcacaaatgtaccaatagcaagcgtcaatgaaggcccttctgcaagcatgcaaatatttccaccgaatctaggaaacaatacaaagggttatcaaactcttgagagcccaacagaaggaccagcacaacagccatcaaacaactggaagggcttttttaatgtctactcatatacccaatacttcgacgtggacacggacgttgttttgaacagattaatgagctctttatatcctactagtggagattttttcaacaagattgatgcaaaccctgatttgtatggacttgtctggatctgcactacgcttgtgtttgtgcttgcttctctcggaaattgtgctacatatctcgtgaagaaacgaaccgacagtaatgctccttggatctttgatgtgaactatatgaatttggcagcatctataatatatggatatgcaataattgtgcctctgggattttattttgcactccgttatatggggtccaaagctgatcttctaagattctggtgcctttggggatactctctcttcattttcgttccaacctctcttccattgcttattccagtagagtttctgagatgggtgattatactcttagctggtagtgcatcatcgtgttttgttgccctgaatctacggtcttacctcgagacgaacaatgatatcacggttgtaatggctgcagcatttggtctgcaaatggttctttcaatcttcatcaaggtctggttctttccttaatctccatgagacggtcaacaccagacaaaacatatatatgtaaaaacctttagattttgatgtgctgcggtagaactaagaatgtcgttaccagaaaatgaaacccacaaagtagaagaaggaacatatccgctaaatcattcggtttcgtttttactggcggattttcatcgttgcttgtaacgattgtgttttttcattttttggttttgtttgctaccacttattttgcttatggagtaaaaatatataaaagaaaaaaaggaagttttcaagatttattgcaatttactctcttttgc

SEQ ID NO: 43356 - protein, 275 aa, Arabidopsis thaliana
  peptide (1)..(275): Ceres Seq. ID no. 13491600
MDESFANLQSSHLLGSVPAVISDDKRSTNVPIASVNEGPSASMQIFPPNLGNNTKGYQTLESPTEGPAQQPSNNWKGFFNVYSYTQYFDVDTDVVLNRLMSSLYPTSGDFFNKIDANPDLYGLVWICTTLVFVLASLGNCATYLVKKRTDSNAPWIFDVNYMNLAASIIYGYAIIVPLGFYFALRYMGSKADLLRFWCLWGYSLFIFVPTSLPLLIPVEFLRWVIILLAGSASSCFVALNLRSYLETNNDITVVMAAAFGLQMVLSIFIKVWFFP

SEQ ID NO: 43357 - protein, 233 aa, Arabidopsis thaliana
  peptide (1)..(233): Ceres Seq. ID no. 13491601
MQIFPPNLGNNTKGYQTLESPTEGPAQQPSNNWKGFFNVYSYTQYFDVDTDVVLNRLMSSLYPTSGDFFNKIDANPDLYGLVWICTTLVFVLASLGNCATYLVKKRTDSNAPWIFDVNYMNLAASIIYGYAIIVPLGFYFALRYMGSKADLLRFWCLWGYSLFIFVPTSLPLLIPVEFLRWVIILLAGSASSCFVALNLRSYLETNNDITVVMAAAFGLQMVLSIFIKVWFFP

SEQ ID NO: 43358 - protein, 176 aa, Arabidopsis thaliana
  peptide (1)..(176): Ceres Seq. ID no. 13491602
MSSLYPTSGDFFNKIDANPDLYGLVWICTTLVFVLASLGNCATYLVKKRTDSNAPWIFDVNYMNLAASIIYGYAIIVPLGFYFALRYMGSKADLLRFWCLWGYSLFIFVPTSLPLLIPVEFLRWVIILLAGSASSCFVALNLRSYLETNNDITVVMAAAFGLQMVLSIFIKVWFFP

SEQ ID NO: 43359 - DNA, 1679 bp, Arabidopsis thaliana
  misc_feature (1)..(1679): Ceres Seq. ID no. 12394522
  misc_feature (1)..(1679): Ortholog of  Ceres SEQ ID NO 13657915 as cited in SEQ ID NO 66051
gctcaaaagaaattgtgatacgcgaaagaaagaaaaaaattactttcaactaaaagaagcacacagcacaaaagaggtagtctcgttgtgatgtcagtataaagccagttgacgcaattccatctcccgatcgaacctgtacaaaccatggcaacaacgagctccgaccggttaatcgccggtttaacggcgtcgatcggctcaatcgaatctcgttacgcaaatccagctcaatccgtttctctaatctgtcgaaatcaaatcaatggcgcaccgcctatcgtcttgcggtcctctcgaaggtccaggctgtggttaatcgaggcgattcctccggcaaagtcctggaacggatctaacgatggcgacgaagatatcaagaagtcagacactcgtaattacgcgatcggtggaaccggtggtcacgcggtcgccggaaaagatgacagaacgatggagatagtaatagcagcggcgaccacggcggcgctgggtgtcgggaatcgcgtactgtataagctggctcttattcctctcaagcaatatcccttcttcctccgcaactctccacattcgggtatgtagctgtatacttttcgattttgtatttcagataccgagctggaattgttacaaaagagatgctatcagttccaaaacttccatttttaattgttggcgtcttggagtctcttgctctagctgctgggatggcggccgcatcaaatctttctggaccatctactacagttttatctcagacatttcttgtctggcaaattcttttctccattatatttctcgggaggagatatagaataaatcaaatattgggatgtactcttgtagcatttggtgtaatcgtcagtgtagcaagtgggtcgggtgccgctcattcatttaaagatacaggaatactttggagtcttcttatggtgttttcttttctgcttcaaggagcagatacagtaatgaaggaagtcatctttctagatagcaaaaagcgattgaagggtgcttcacttgatttgtttgttgtaaactcatatggttcaattttccaagtcatatgcattgcgttgcttcttccttttctttcaaagctttggggcataccgtttaaccaactaccgagctatatcagagacgggggtgcttgctttctaaatattggttctagaataacaggatgcgaaggggctccccttcttcctgtaatgtttgtcatgatgaacatggcttataacatctctcttctacgcctcatcaagatttcatctgcagttgtgtcgtctctggcatccaccgtttcagtgcccatagcggtgtactgtttcacgcttcccctaccataccttggggtggcatctacactaccaagggggtttgttgcaggcacaatcatccttgtagtcggcatgcttctatatgcttggacaccatctactaacacttccgattcaattatcccctcaccccnatccacatagcggcaggaaaattggtttttgtaacattatttggtttccttctctcttctcatcttagcatatgctcttttcttgtcaaataagaaatttttttatgcattctttacaaaagaatggttagttttcagttttgcttttcaaaaactatgcagaggataatgtactttgtaatgatgtatatcaattatc

SEQ ID NO: 43360 - protein, 282 aa, Arabidopsis thaliana
  peptide (1)..(282): Ceres Seq. ID no. 12394523
  misc_feature (280)..(280): Xaa is any aa, unknown or other
MLSVPKLPFLIVGVLESLALAAGMAAASNLSGPSTTVLSQTFLVWQILFSIIFLGRRYRINQILGCTLVAFGVIVSVASGSGAAHSFKDTGILWSLLMVFSFLLQGADTVMKEVIFLDSKKRLKGASLDLFVVNSYGSIFQVICIALLLPFLSKLWGIPFNQLPSYIRDGGACFLNIGSRITGCEGAPLLPVMFVMMNMAYNISLLRLIKISSAVVSSLASTVSVPIAVYCFTLPLPYLGVASTLPRGFVAGTIILVVGMLLYAWTPSTNTSDSIIPSPXST

SEQ ID NO: 43361 - protein, 259 aa, Arabidopsis thaliana
  peptide (1)..(259): Ceres Seq. ID no. 12394524
  misc_feature (257)..(257): Xaa is any aa, unknown or other
MAAASNLSGPSTTVLSQTFLVWQILFSIIFLGRRYRINQILGCTLVAFGVIVSVASGSGAAHSFKDTGILWSLLMVFSFLLQGADTVMKEVIFLDSKKRLKGASLDLFVVNSYGSIFQVICIALLLPFLSKLWGIPFNQLPSYIRDGGACFLNIGSRITGCEGAPLLPVMFVMMNMAYNISLLRLIKISSAVVSSLASTVSVPIAVYCFTLPLPYLGVASTLPRGFVAGTIILVVGMLLYAWTPSTNTSDSIIPSPXST

SEQ ID NO: 43362 - protein, 185 aa, Arabidopsis thaliana
  peptide (1)..(185): Ceres Seq. ID no. 12394525
  misc_feature (183)..(183): Xaa is any aa, unknown or other
MVFSFLLQGADTVMKEVIFLDSKKRLKGASLDLFVVNSYGSIFQVICIALLLPFLSKLWGIPFNQLPSYIRDGGACFLNIGSRITGCEGAPLLPVMFVMMNMAYNISLLRLIKISSAVVSSLASTVSVPIAVYCFTLPLPYLGVASTLPRGFVAGTIILVVGMLLYAWTPSTNTSDSIIPSPXST

SEQ ID NO: 43363 - DNA, 1360 bp, Arabidopsis thaliana
  misc_feature (1)..(1360): Ceres Seq. ID no. 12336182
  misc_feature (1)..(1360): Ortholog of  Ceres SEQ ID NO 15171265 as cited in SEQ ID NO 52326
ataacaaaacctatctctctctgtctttactcattgtcgttatggtcgcgccgcctatagccgccgcgtcgttagagctccctcctccgttccccgccgtcttcgaacaaccaatggagaaactcaccttccctaacgagttcccttacgagtttgcctcctcaacgttttcaacttctccggaagactcaacggagacagaagatgaaacaaccgacgacgaagatgacttcttagccgggttaactcgcagactcgctctctcgactcagcgcctctcttctccttccttcgtcaccgacaagtctcagatgaaacccaaagtcacagagtcaactcagagtggactcggaagtcctaatggtccgttttctcaagtcccttcaccgccgacatctccgtctcgtgaagaagactctttgaaagtgttatctgctgcagctggagaagtcgccaagatcaaaaaggccaattttgatgctaaacccatcagctacccaaaccctaaccctaattacttaaccagctttcctcaaaacgtggcgtattataactgctactggttatgggagccgcattatcctcaatctcagatgggaatagttccaaatgcttggcatatacctccttctcccgttagagccttttacacccttccaaccgccgttaaatcgccgtcgactggtaccggcgttttccttccccggaaatactcaaacccttctgattccccgaagaagaaatcaggagatggatgtgttaaggttgttaaccagcaaaaacctaaaattgaagtgttaccggttcgctgtaaaccaaattcgaaagctggtctctctacaggacgcagcaaaatcgattacgtagctggtggtggatgtctgaagcatgaaaagcctcttctacaagaatggatgtactgagtttgaattaggttgtaggattcaggactttttggaagaagaaaatacagaaatggtcgtagttagtgggttgaatttatagtgttgattgtgatggttactggttatagtaaagaataattttgcggggttaagttggattgggatttatttatatttacttaggagaatagcaaaatcagtttctaataagcataattttttggccttgagagagttttgcatcgaactcttctttggcataaggttagtgcaacaacatagaggatgtattgagagtactttagggtgttttctgcagttttggaatctatggggttgcaatgaagtaatctgtatttttttttttttggtttgtttgattaaaagaagcaaagttgtagtgaattatagtggactagtggtaatagaagagattgtatctcaagttgttccct

SEQ ID NO: 43364 - protein, 306 aa, Arabidopsis thaliana
  peptide (1)..(306): Ceres Seq. ID no. 12336183
NKTYLSLSLLIVVMVAPPIAAASLELPPPFPAVFEQPMEKLTFPNEFPYEFASSTFSTSPEDSTETEDETTDDEDDFLAGLTRRLALSTQRLSSPSFVTDKSQMKPKVTESTQSGLGSPNGPFSQVPSPPTSPSREEDSLKVLSAAAGEVAKIKKANFDAKPISYPNPNPNYLTSFPQNVAYYNCYWLWEPHYPQSQMGIVPNAWHIPPSPVRAFYTLPTAVKSPSTGTGVFLPRKYSNPSDSPKKKSGDGCVKVVNQQKPKIEVLPVRCKPNSKAGLSTGRSKIDYVAGGGCLKHEKPLLQEWMY

SEQ ID NO: 43365 - protein, 293 aa, Arabidopsis thaliana
  peptide (1)..(293): Ceres Seq. ID no. 12336184
MVAPPIAAASLELPPPFPAVFEQPMEKLTFPNEFPYEFASSTFSTSPEDSTETEDETTDDEDDFLAGLTRRLALSTQRLSSPSFVTDKSQMKPKVTESTQSGLGSPNGPFSQVPSPPTSPSREEDSLKVLSAAAGEVAKIKKANFDAKPISYPNPNPNYLTSFPQNVAYYNCYWLWEPHYPQSQMGIVPNAWHIPPSPVRAFYTLPTAVKSPSTGTGVFLPRKYSNPSDSPKKKSGDGCVKVVNQQKPKIEVLPVRCKPNSKAGLSTGRSKIDYVAGGGCLKHEKPLLQEWMY

SEQ ID NO: 43366 - protein, 269 aa, Arabidopsis thaliana
  peptide (1)..(269): Ceres Seq. ID no. 12336185
MEKLTFPNEFPYEFASSTFSTSPEDSTETEDETTDDEDDFLAGLTRRLALSTQRLSSPSFVTDKSQMKPKVTESTQSGLGSPNGPFSQVPSPPTSPSREEDSLKVLSAAAGEVAKIKKANFDAKPISYPNPNPNYLTSFPQNVAYYNCYWLWEPHYPQSQMGIVPNAWHIPPSPVRAFYTLPTAVKSPSTGTGVFLPRKYSNPSDSPKKKSGDGCVKVVNQQKPKIEVLPVRCKPNSKAGLSTGRSKIDYVAGGGCLKHEKPLLQEWMY

SEQ ID NO: 43367 - DNA, 1328 bp, Arabidopsis thaliana
  misc_feature (1)..(1328): Ceres Seq. ID no. 12602849
  misc_feature (1)..(1328): Ortholog of  Ceres SEQ ID NO 13598368 as cited in SEQ ID NO 62140
acttattatctccttacacacaccatttctctctaatggctacaacaaccacatcatgggaagaactcttaggctcaaagaattgggacactatcttagacccattagaccaatcacttagggaactcatcttacgttgtggcgacttttgtcaagccacctacgatgccttcgtcaacgaccaaaactccaagtactgtggagccagccgctacggcaaatcttctttcttcgacaaggtcatgctcgaaaacgcttccgactacgaggttgtaaacttcctctacgccacagctcgtgtttctctccccgaaggtttgcttctccaatcacaatcaagagattcttgggaccgtgagtctaactggtttggctacattgctgtcacgtctgatgaacggtctaaggctttaggacgccgtgagatctatatagctttgagaggaacgagcaggaactatgagtgggtcaatgttttgggtgctaggccaacttcagctgaccccttgctgcacggacccgagcaggatggttctggtggtgtagttgaaggtacgacttttgatagtgacagtgaagatgaagaagggtgtaaggtgatgctcgggtggctcacaatctatacttctaatcaccccgaatcgaaattcactaagctgagtctacggtcacagttgttagccaagatcaaggagcttctgttgaagtataaggacgagaaaccgagcattgtgttgactggacatagcttgggagctacagaggctgttctggccgcctatgatatagctgagaacggttccagtgatgatgttccggtcactgctatagtctttggttgtccacaggtaggaaacaaggagttcagagacgaagtaatgagtcacaagaacttaaagatcctccatgtaaggaacacgattgatctcttaactcgatacccagggggacttttagggtatgtggacataggaataaactttgtgatcgatacaaagaagtcaccgttcctaagcgattcaaggaatccaggggattggcataatcttcaggcgatgttacatgttgtagctggatggaatgggaagaaaggagagtttaaactgatggttaagagaagtattgcattagtgaacaagtcatgcgagttcttgaaagctgagtgtttggtgccaggatcttggtgggtagagaagaacaaaggactgatcaagaacgaagatggtgaatgggttcttgctcccgttgaagaagaacctgtacctgaattctaaattgtatttctgtatttttctctaaggtcatgataaatcaacaataagcagttc

SEQ ID NO: 43368 - protein, 423 aa, Arabidopsis thaliana
  peptide (1)..(423): Ceres Seq. ID no. 12602850
LLSPYTHHFSLMATTTTSWEELLGSKNWDTILDPLDQSLRELILRCGDFCQATYDAFVNDQNSKYCGASRYGKSSFFDKVMLENASDYEVVNFLYATARVSLPEGLLLQSQSRDSWDRESNWFGYIAVTSDERSKALGRREIYIALRGTSRNYEWVNVLGARPTSADPLLHGPEQDGSGGVVEGTTFDSDSEDEEGCKVMLGWLTIYTSNHPESKFTKLSLRSQLLAKIKELLLKYKDEKPSIVLTGHSLGATEAVLAAYDIAENGSSDDVPVTAIVFGCPQVGNKEFRDEVMSHKNLKILHVRNTIDLLTRYPGGLLGYVDIGINFVIDTKKSPFLSDSRNPGDWHNLQAMLHVVAGWNGKKGEFKLMVKRSIALVNKSCEFLKAECLVPGSWWVEKNKGLIKNEDGEWVLAPVEEEPVPEF

SEQ ID NO: 43369 - protein, 412 aa, Arabidopsis thaliana
  peptide (1)..(412): Ceres Seq. ID no. 12602851
MATTTTSWEELLGSKNWDTILDPLDQSLRELILRCGDFCQATYDAFVNDQNSKYCGASRYGKSSFFDKVMLENASDYEVVNFLYATARVSLPEGLLLQSQSRDSWDRESNWFGYIAVTSDERSKALGRREIYIALRGTSRNYEWVNVLGARPTSADPLLHGPEQDGSGGVVEGTTFDSDSEDEEGCKVMLGWLTIYTSNHPESKFTKLSLRSQLLAKIKELLLKYKDEKPSIVLTGHSLGATEAVLAAYDIAENGSSDDVPVTAIVFGCPQVGNKEFRDEVMSHKNLKILHVRNTIDLLTRYPGGLLGYVDIGINFVIDTKKSPFLSDSRNPGDWHNLQAMLHVVAGWNGKKGEFKLMVKRSIALVNKSCEFLKAECLVPGSWWVEKNKGLIKNEDGEWVLAPVEEEPVPEF

SEQ ID NO: 43370 - protein, 343 aa, Arabidopsis thaliana
  peptide (1)..(343): Ceres Seq. ID no. 12602852
MLENASDYEVVNFLYATARVSLPEGLLLQSQSRDSWDRESNWFGYIAVTSDERSKALGRREIYIALRGTSRNYEWVNVLGARPTSADPLLHGPEQDGSGGVVEGTTFDSDSEDEEGCKVMLGWLTIYTSNHPESKFTKLSLRSQLLAKIKELLLKYKDEKPSIVLTGHSLGATEAVLAAYDIAENGSSDDVPVTAIVFGCPQVGNKEFRDEVMSHKNLKILHVRNTIDLLTRYPGGLLGYVDIGINFVIDTKKSPFLSDSRNPGDWHNLQAMLHVVAGWNGKKGEFKLMVKRSIALVNKSCEFLKAECLVPGSWWVEKNKGLIKNEDGEWVLAPVEEEPVPEF

SEQ ID NO: 43371 - DNA, 1099 bp, Arabidopsis thaliana
  misc_feature (1)..(1099): Ceres Seq. ID no. 12337087
  misc_feature (1)..(1099): Ortholog of  Ceres SEQ ID NO 12364737 as cited in SEQ ID NO 51089
  misc_feature (1)..(1099): Ortholog of  Ceres SEQ ID NO 12581561 as cited in SEQ ID NO 53617
  misc_feature (1)..(1099): Ortholog of  Ceres SEQ ID NO 12625474 as cited in SEQ ID NO 64169
atttcatagcaaaacaccaaaacagagttcacagaaacatattcaaagatttttcacaaatattaccattttaaatctataaacaatgacgaactcggtggctaagttggcactactagggttttgcattctgcaagtgacgagcttacttgttccgcaagcaaatgctagggctttccttgtgtttggagattctctcgttgacaatggtaacaatgactttcttgctaccactgctcgtgccgataattacccttatggtatcgattttccaactcatcgtcctacgggccgtttctccaatggtctaaacattccagatctcgtcaattctctcttcctgactacgttgtctttgtcatttctgaataccgcaaagtcttacggaaaatgtacgatttgggtgctcgacgtgtccttgtgactggaacaggaccaatgggttgcgtcccggccgagctggcgcaacgtagccgcaacgggcgagtgtgctaccgaactccaacgagccgcgtcactattcaacccacaactaattcaaatgataacagacctcaacaacgaagttggatcttcggccttcattgccgctaatactcaacaaatgcacatggacttcattagcgacccacaagcatatggattcgtcacgtcgaaggtggcttgttgtggacaagggccgtacaatgggatagggctatgcactccattatcaaatctttgcccaaacagagatctctttgccttttgggatccttttcacccatcagaaaaagcaagtagaatcatagctcaacaaatcctcaatggctctcctgaatacatgcatcccatgaatcttagcaccatcctcaccgttgattccatgacctaagcttctattcctcatctatcccaaatccactttatgctttgtttttgttttgcctttctcgtttattatatatttttacattggtgctttaattagtttccttgagttatgttgtgagttttgtgttgttcatcaataattagtcaccaattgtgagctgagaagtaatattcaacaatcttacgaatgttcactatcatttttttttgttcaatctttttattt

SEQ ID NO: 43372 - protein, 112 aa, Arabidopsis thaliana
  peptide (1)..(112): Ceres Seq. ID no. 12337088
MTNSVAKLALLGFCILQVTSLLVPQANARAFLVFGDSLVDNGNNDFLATTARADNYPYGIDFPTHRPTGRFSNGLNIPDLVNSLFLTTLSLSFLNTAKSYGKCTIWVLDVSL

SEQ ID NO: 43373 - protein, 110 aa, Arabidopsis thaliana
  peptide (1)..(110): Ceres Seq. ID no. 12337089
MITDLNNEVGSSAFIAANTQQMHMDFISDPQAYGFVTSKVACCGQGPYNGIGLCTPLSNLCPNRDLFAFWDPFHPSEKASRIIAQQILNGSPEYMHPMNLSTILTVDSMT

SEQ ID NO: 43374 - protein, 89 aa, Arabidopsis thaliana
  peptide (1)..(89): Ceres Seq. ID no. 12337090
MHMDFISDPQAYGFVTSKVACCGQGPYNGIGLCTPLSNLCPNRDLFAFWDPFHPSEKASRIIAQQILNGSPEYMHPMNLSTILTVDSMT

SEQ ID NO: 43375 - DNA, 1368 bp, Arabidopsis thaliana
  misc_feature (1)..(1368): Ceres Seq. ID no. 12422296
  misc_feature (1)..(1368): Ortholog of  Ceres SEQ ID NO 12614739 as cited in SEQ ID NO 68587
aactgataaagtgataacggagttggttggaacgtgaaacgcttataaaaataaaccggtttaatttcaccggtttaccttccgccgtagatatcagccgcaatgtacattctcgacaccggagctcgattctccgccgtcagattctcaccggtattcaatcctcctccaacatctctccgtagacgatacttcatcgtaagagctaatcttccattcccaaagcatcaagctaagtatcataaagagcttgaggtcgccattgatgctgttgatcgagcttgtcgtctctgtgttgatgtcaaaagatctcttttttcttctaaagagaagattgttgagaagaatgatcaaactccagttacaattgcagattttggagttcaagctttagtcagcttggagctttcgaaattgtttccttcaataccattagtggctgaggaagactctcattttgtgcgtgctaataaccttgtaagctctgtggtaagtgaagtcaaatcaaaagcaagcattggagacaatcacttgtctgatgctgatgtacttgaagcaattgatagaggtggcaaagatgcttacacgttttgcaacaaaccagctacttattgggttttggatccaattgatggcaccaggggatttcttaaaggagatgaggctttatatgtggtaggattggcccttgttgtagataatgaaattgtgctaggagtcatgggttgtccaaactggccaggagattcttcagatggatctactggaaccctaatgctctcgcatataggctgtggaacgtggaccaagaagttacaaaatgtctctggcaatgtagccggtgattggataaggtgtttcgttgatgcttgtgttttaatgaacaaagcaagattttgtatacaagaaagccaaacctgggaatcacttcctctctctggtttcttcgacgcaagtactgtttcagaggacttaaaacataaagagattcttcttttgcccacatgttgtggaagtttgtgcaagtatctgatggtagcttctggcagagcatcagtttttcttctccgagccaaaactcagagaacaataaagtcgtgggatcatgctgttgggatcatatgtgtacatgaagctggaggaaaggtaacagattgggaaggagatgaaataaatttggaggaagatcaatcagaaaggaggctcatttttccggcgggcggtgttgtagtaagcaacggaagtttacataatcagattcttgagatgatctcttctgcttcaccaactctttgatttatgacactactactctctatacacttgttaatgtttaccgttactatttatttatcataatccttttct

SEQ ID NO: 43376 - protein, 397 aa, Arabidopsis thaliana
  peptide (1)..(397): Ceres Seq. ID no. 12422297
MYILDTGARFSAVRFSPVFNPPPTSLRRRYFIVRANLPFPKHQAKYHKELEVAIDAVDRACRLCVDVKRSLFSSKEKIVEKNDQTPVTIADFGVQALVSLELSKLFPSIPLVAEEDSHFVRANNLVSSVVSEVKSKASIGDNHLSDADVLEAIDRGGKDAYTFCNKPATYWVLDPIDGTRGFLKGDEALYVVGLALVVDNEIVLGVMGCPNWPGDSSDGSTGTLMLSHIGCGTWTKKLQNVSGNVAGDWIRCFVDACVLMNKARFCIQESQTWESLPLSGFFDASTVSEDLKHKEILLLPTCCGSLCKYLMVASGRASVFLLRAKTQRTIKSWDHAVGIICVHEAGGKVTDWEGDEINLEEDQSERRLIFPAGGVVVSNGSLHNQILEMISSASPTL

SEQ ID NO: 43377 - DNA, 625 bp, Arabidopsis thaliana
  misc_feature (1)..(625): Ceres Seq. ID no. 12396021
  misc_feature (1)..(625): Ortholog of  Ceres SEQ ID NO 13594501 as cited in SEQ ID NO 51327
atcttcatcgtttctcaatttcaaaactcagattaataaaattttcgcgttgttcctttctctcaattcatcgacgatgccgagcagatacccagaagcagtaacacaagactgggaaccagtagttctccacaaatcaaaacaaaagagccaagacctacgcgatccgaaagcggttaacgcagctctgagaaacggtgtcgcggttcaaacggttaagaaattcgatgccggttcgaacaaaaaggggaaatctacggcggttccggtgattaacacgaagaagctggaagaagaaacagagcctgcggcgatggatcgtgtgaaagcagaggtgaggttgatgatacagaaagcgagattggagaagaagatgtcacaagcggatttggcgaaacagatcaatgagaggactcaggtagttcaggaatatgagaatggtaaagctgttcctaatcaggctgtgcttgcgaagatggagaaggttctaggtgttaaacttaggggtaaaattgggaaatgattaaacgatgtcgtttatcttgtattttgttgaccaatgtaaaaagtaaaaaaaaagtcttgttgttttgtttgataaatgaaaaaacaatatatatctttt

SEQ ID NO: 43378 - protein, 173 aa, Arabidopsis thaliana
  peptide (1)..(173): Ceres Seq. ID no. 12396022
SSSFLNFKTQINKIFALFLSLNSSTMPSRYPEAVTQDWEPVVLHKSKQKSQDLRDPKAVNAALRNGVAVQTVKKFDAGSNKKGKSTAVPVINTKKLEEETEPAAMDRVKAEVRLMIQKARLEKKMSQADLAKQINERTQVVQEYENGKAVPNQAVLAKMEKVLGVKLRGKIGK

SEQ ID NO: 43379 - protein, 148 aa, Arabidopsis thaliana
  peptide (1)..(148): Ceres Seq. ID no. 12396023
MPSRYPEAVTQDWEPVVLHKSKQKSQDLRDPKAVNAALRNGVAVQTVKKFDAGSNKKGKSTAVPVINTKKLEEETEPAAMDRVKAEVRLMIQKARLEKKMSQADLAKQINERTQVVQEYENGKAVPNQAVLAKMEKVLGVKLRGKIGK

SEQ ID NO: 43380 - DNA, 627 bp, Arabidopsis thaliana
  misc_feature (1)..(627): Ceres Seq. ID no. 13592805
  misc_feature (1)..(627): Ortholog of  Ceres SEQ ID NO 14307526 as cited in SEQ ID NO 58875
tctctctcgaatctctctctataatccgatctgagaaatttcgccggagctaggttttgttgtttaccgatcaatcctttaatttgactcatatgagattgaaggtggggaaacaaagggagaaatattgcagaatctggccgagttccaattctcttgtgtgatgttcaatgcggttctggagaatgcatgtagtgagatgggagcaagaatgtctgccatggacagctcaagcagaaacgcaggagaaatgctcgaccgtctcaccctcacatacaacaggactcgtcaagcttctattacaacagagcttattgagattatctctggagcttctgctcttgaagctgctaaataagcccatccgtgttagttctcttttcttcgctttgatatttacccccaccttgaaggagaagaatgtgttaaaattttactgaatcagtttcctttgctggcttcttgttgagacctaccaatgtttgctcaacgatttttaataaacatacctgtaatttccagcaggatttcgaataattgcattaacattttgttctgattcagactcgcttcctccagagtctgtagtgttgttttgtgcaaacaccatgtactccggtttatttg

SEQ ID NO: 43381 - protein, 89 aa, Arabidopsis thaliana
  peptide (1)..(89): Ceres Seq. ID no. 13592806
MRFWRMHVVRWEQECLPWTAQAETQEKCSTVSPSHTTGLVKLLLQQSLLRLSLELLLLKLLNKPIRVSSLFFALIFTPTLKEKNVLKFY

SEQ ID NO: 43382 - protein, 84 aa, Arabidopsis thaliana
  peptide (1)..(84): Ceres Seq. ID no. 13592807
MHVVRWEQECLPWTAQAETQEKCSTVSPSHTTGLVKLLLQQSLLRLSLELLLLKLLNKPIRVSSLFFALIFTPTLKEKNVLKFY

SEQ ID NO: 43383 - protein, 64 aa, Arabidopsis thaliana
  peptide (1)..(64): Ceres Seq. ID no. 13592808
MFNAVLENACSEMGARMSAMDSSSRNAGEMLDRLTLTYNRTRQASITTELIEIISGASALEAAK

SEQ ID NO: 43384 - DNA, 1819 bp, Arabidopsis thaliana
  misc_feature (1)..(1819): Ceres Seq. ID no. 12370303
  misc_feature (1)..(1819): Ortholog of  Ceres SEQ ID NO 15175923 as cited in SEQ ID NO 54037
  misc_feature (1)..(1819): Ortholog of  Ceres SEQ ID NO 13503610 as cited in SEQ ID NO 62416
  misc_feature (1)..(1819): Ortholog of  Ceres SEQ ID NO 13657610 as cited in SEQ ID NO 66165
  misc_feature (1)..(1819): Ortholog of  Ceres SEQ ID NO 13598312 as cited in SEQ ID NO 68448
  misc_feature (1)..(1819): Ortholog of  Ceres SEQ ID NO 13596100 as cited in SEQ ID NO 68573
gtcttttggtgggtcttcgtcaaagctctctcctttacggtccttttctccagcgcatgaaataataaaggacacctgtatttattaaaatcactacattttccgtaacaaaaaaaatcaaactttgttttctcaatggacggtgcgggagaatcacgactcggtggtgatggtggtggtgatggttctgttggagttcagatccgacaaacacggatgctaccggattttctccagagcgtgaatctcaagtatgtgaaattaggttacaattacttaatctcaaatctcttgactctctgtttattccctctcgccgttgttatctccgtcgaagcctctcagatgaacccagatgatctcaaacagctctggatccatctacaatacaatctggttagtatcatcatctgttcagcgattctagtcttcgggttaacggtttatgttacgacccgacctagacccgtttacttggttgatttctcttgttatctcccacctgatcatctcaaagctccttacgctcggttcatggaacattctagactcaccggagatttcgatgactctgctctcgagtttcaacgcaagatccttgagcgttctggtttaggggaagacacttgtccctgaagctatgcattatgttccaccgagaatttcaatggctgctgctagagaagaagctgaacaagtcatgtttggtgctttagataaccttttcgctaacactaatgtgaaaccaaaggatattggaatccttgttgtgaattgtagtctctttaatccaactccttcgttatctgcaatgattgtgaacaagtataagcttagaggtaacattagaagctacaatctaggcggtatgggttgcagcgcgggagttatcgctgtggatcttgctaaagacatgttgttggtacataggaacacttatgcggttgttgtttctactgagaacattactcagaattggtattttggtaacaagaaatcgatgttgataccgaactgcttgtttcgagttggtggctctgcggttttgctatcgaacaagtcgagggacaagagacggtctaagtacaggcttgtacatgtagtcaggactcaccgtggagcagatgataaagctttccgttgtgtttatcaagagcaggatgatacagggagaaccggggtttcgttgtcgaaagatctaatggcgattgcaggggaaactctcaaaaccaatatcactacattgggtcctcttgttctaccgataagtgagcagattctcttctttatgactctagttgtgaagaagctctttaacggtaaagtgaaaccgtatatcccggatttcaaacttgctttcgagcatttctgtatccatgctggtggaagagctgtgatcgatgagttagagaagaatctgcagctttcaccagttcatgtcgaggcttcgaggatgactcttcatcgatttggtaacacatcttcgagctccatttggtatgaattggcttacattgaagcgaagggaaggatgcgaagaggtaatcgtgtttggcaaatcgcgttcggaagtggatttaaatgtaatagcgcgatttgggaagcattaaggcatgtgaaaccttcgaacaacagtccttgtgaagattgtattgacaagtatccggtaactttaagttattagcttcgtttgaggaactgttattgtgtaacttcgagactaatccatggttgttttttttcttagagaagaaacccttagatttgatctctgacaatgtcaatgtgtttgttgtttatgtgttttggagagtttgtg

SEQ ID NO: 43385 - protein, 347 aa, Arabidopsis thaliana
  peptide (1)..(347): Ceres Seq. ID no. 12370304
MHYVPPRISMAAAREEAEQVMFGALDNLFANTNVKPKDIGILVVNCSLFNPTPSLSAMIVNKYKLRGNIRSYNLGGMGCSAGVIAVDLAKDMLLVHRNTYAVVVSTENITQNWYFGNKKSMLIPNCLFRVGGSAVLLSNKSRDKRRSKYRLVHVVRTHRGADDKAFRCVYQEQDDTGRTGVSLSKDLMAIAGETLKTNITTLGPLVLPISEQILFFMTLVVKKLFNGKVKPYIPDFKLAFEHFCIHAGGRAVIDELEKNLQLSPVHVEASRMTLHRFGNTSSSSIWYELAYIEAKGRMRRGNRVWQIAFGSGFKCNSAIWEALRHVKPSNNSPCEDCIDKYPVTLSY

SEQ ID NO: 43386 - protein, 338 aa, Arabidopsis thaliana
  peptide (1)..(338): Ceres Seq. ID no. 12370305
MAAAREEAEQVMFGALDNLFANTNVKPKDIGILVVNCSLFNPTPSLSAMIVNKYKLRGNIRSYNLGGMGCSAGVIAVDLAKDMLLVHRNTYAVVVSTENITQNWYFGNKKSMLIPNCLFRVGGSAVLLSNKSRDKRRSKYRLVHVVRTHRGADDKAFRCVYQEQDDTGRTGVSLSKDLMAIAGETLKTNITTLGPLVLPISEQILFFMTLVVKKLFNGKVKPYIPDFKLAFEHFCIHAGGRAVIDELEKNLQLSPVHVEASRMTLHRFGNTSSSSIWYELAYIEAKGRMRRGNRVWQIAFGSGFKCNSAIWEALRHVKPSNNSPCEDCIDKYPVTLSY

SEQ ID NO: 43387 - protein, 327 aa, Arabidopsis thaliana
  peptide (1)..(327): Ceres Seq. ID no. 12370306
MFGALDNLFANTNVKPKDIGILVVNCSLFNPTPSLSAMIVNKYKLRGNIRSYNLGGMGCSAGVIAVDLAKDMLLVHRNTYAVVVSTENITQNWYFGNKKSMLIPNCLFRVGGSAVLLSNKSRDKRRSKYRLVHVVRTHRGADDKAFRCVYQEQDDTGRTGVSLSKDLMAIAGETLKTNITTLGPLVLPISEQILFFMTLVVKKLFNGKVKPYIPDFKLAFEHFCIHAGGRAVIDELEKNLQLSPVHVEASRMTLHRFGNTSSSSIWYELAYIEAKGRMRRGNRVWQIAFGSGFKCNSAIWEALRHVKPSNNSPCEDCIDKYPVTLSY

SEQ ID NO: 43388 - DNA, 1130 bp, Arabidopsis thaliana
  misc_feature (1)..(1130): Ceres Seq. ID no. 12739117
  misc_feature (1)..(1130): Ortholog of  Ceres SEQ ID NO 12609146 as cited in SEQ ID NO 52118
  misc_feature (1)..(1130): Ortholog of  Ceres SEQ ID NO 14303397 as cited in SEQ ID NO 54614
  misc_feature (1)..(1130): Ortholog of  Ceres SEQ ID NO 13594056 as cited in SEQ ID NO 55691
  misc_feature (1)..(1130): Ortholog of  Ceres SEQ ID NO 14314186 as cited in SEQ ID NO 57457
  misc_feature (1)..(1130): Ortholog of  Ceres SEQ ID NO 13638136 as cited in SEQ ID NO 58644
  misc_feature (1)..(1130): Ortholog of  Ceres SEQ ID NO 13596868 as cited in SEQ ID NO 62806
  misc_feature (1)..(1130): Ortholog of  Ceres SEQ ID NO 13595885 as cited in SEQ ID NO 69265
  misc_feature (1)..(1130): Ortholog of  Ceres SEQ ID NO 12566239 as cited in SEQ ID NO 0
  misc_feature (1)..(1130): Ortholog of  Ceres SEQ ID NO 13599119 as cited in SEQ ID NO 0
  misc_feature (1)..(1130): Ortholog of  Ceres SEQ ID NO 14308987 as cited in SEQ ID NO 0
gcgaagccgcaaagaaagcggcggtggaagctgagacatgcaacaatggcgttcgtgtcattctcttcttctccttctctctctcttacactcgcgattcaacattaatttcgttcttcttcatacacatatatagatagtgtcttcattttccaaccatgaccggtagagaaatcctccacaatatgaaggaatccgtcaaggagaaagttgggcttggtgcatctgcttcatctgcagattcagggaaaggtaagagcaagatgtcgaagcagatcacacatggttttcatttggtgaaagggaaagcttttcacgagatggaagattatgtggttgccaaattcaaggaagttgatgataatgagcttggtctgtttgctatcttcgatggccatcttagccacgagattccggactacttgtgctcccatttgtttgagaacatcttgaaagagccgaatttctggcaagaacctgagaaagcgataaagaaagcttactatataacggatacaacgattctagacaaggcagatgatttgggaaaaggaggttctactgctgtgactgcgatattgatcaattgccagaagctggtggttgctaatgttggtgactctcgagctgttatttgccaaaatggtgttgcgaagccactctcagttgatcatgagccgaacatggagaaggatgaaatcgagaacagaggaggattcgtttctaactttcctggggatgttcctcgagttgatggtcaactggctgtggcaagggcatttggtgataagagtttaaagatgcatttgagttcagaaccatatgttacggtggagatagttgatgatgatgcagaatttcttatcctagcaagtgatggactatggaaggtcatgtcaaaccaagaagccgttgactcaatcaagggaataaaagatgcgaaggctgcagcaaagcaccttgcagaggaggctgttgcaaggaaaagctcagacgatatctcagtcgtcgtcgtgaaatttcagtgacattagctttcggttagtcttttcttcttcttttgggcgactctaacactttacttgaatctgtattataagccttttcaattaagacgttacgcaaataag

SEQ ID NO: 43389 - protein, 289 aa, Arabidopsis thaliana
  peptide (1)..(289): Ceres Seq. ID no. 12739118
MTGREILHNMKESVKEKVGLGASASSADSGKGKSKMSKQITHGFHLVKGKAFHEMEDYVVAKFKEVDDNELGLFAIFDGHLSHEIPDYLCSHLFENILKEPNFWQEPEKAIKKAYYITDTTILDKADDLGKGGSTAVTAILINCQKLVVANVGDSRAVICQNGVAKPLSVDHEPNMEKDEIENRGGFVSNFPGDVPRVDGQLAVARAFGDKSLKMHLSSEPYVTVEIVDDDAEFLILASDGLWKVMSNQEAVDSIKGIKDAKAAAKHLAEEAVARKSSDDISVVVVKFQ

SEQ ID NO: 43390 - protein, 280 aa, Arabidopsis thaliana
  peptide (1)..(280): Ceres Seq. ID no. 12739119
MKESVKEKVGLGASASSADSGKGKSKMSKQITHGFHLVKGKAFHEMEDYVVAKFKEVDDNELGLFAIFDGHLSHEIPDYLCSHLFENILKEPNFWQEPEKAIKKAYYITDTTILDKADDLGKGGSTAVTAILINCQKLVVANVGDSRAVICQNGVAKPLSVDHEPNMEKDEIENRGGFVSNFPGDVPRVDGQLAVARAFGDKSLKMHLSSEPYVTVEIVDDDAEFLILASDGLWKVMSNQEAVDSIKGIKDAKAAAKHLAEEAVARKSSDDISVVVVKFQ

SEQ ID NO: 43391 - protein, 254 aa, Arabidopsis thaliana
  peptide (1)..(254): Ceres Seq. ID no. 12739120
MSKQITHGFHLVKGKAFHEMEDYVVAKFKEVDDNELGLFAIFDGHLSHEIPDYLCSHLFENILKEPNFWQEPEKAIKKAYYITDTTILDKADDLGKGGSTAVTAILINCQKLVVANVGDSRAVICQNGVAKPLSVDHEPNMEKDEIENRGGFVSNFPGDVPRVDGQLAVARAFGDKSLKMHLSSEPYVTVEIVDDDAEFLILASDGLWKVMSNQEAVDSIKGIKDAKAAAKHLAEEAVARKSSDDISVVVVKFQ

SEQ ID NO: 43392 - DNA, 1484 bp, Arabidopsis thaliana; identical to SEQ ID NO: 42237
  misc_feature (1)..(1484): Ceres Seq. ID no. 12389109
  misc_feature (1)..(1484): Ortholog of  Ceres SEQ ID NO 15170155 as cited in SEQ ID NO 64363

SEQ ID NO: 43393 - protein, 382 aa, Arabidopsis thaliana; identical to SEQ ID NO: 42238
  peptide (1)..(382): Ceres Seq. ID no. 12389110

SEQ ID NO: 43394 - protein, 380 aa, Arabidopsis thaliana; identical to SEQ ID NO: 42239
  peptide (1)..(380): Ceres Seq. ID no. 12389111

SEQ ID NO: 43395 - protein, 355 aa, Arabidopsis thaliana; identical to SEQ ID NO: 42240
  peptide (1)..(355): Ceres Seq. ID no. 12389112

SEQ ID NO: 43396 - DNA, 1031 bp, Arabidopsis thaliana
  misc_feature (1)..(1031): Ceres Seq. ID no. 12329917
  misc_feature (1)..(1031): Ortholog of  Ceres SEQ ID NO 12620190 as cited in SEQ ID NO 66274
cccacttcttatccattcgaagcaatgaagtcttcttctatcttcttcttcttcctcttctcatggccattctacttcactccctctctcttcatccaccaaaccctaaacctcaaaacccttataaacccaaaattctctcttcttctgctacctttcggagagatgtggtgcttagaacagcatcactctgtttcgtctccttcatctttcaaaaccaaattccagagtcattagctgatcctttgaagtctaccaaaccgttacgactcggcattgcgaacactaagtcttggttccagtactttggtagtgggttcgctattagggttcctcctgactttgaagacgtcaatgagcctgaggattactctgcgggattgtctctctatggtgacaaggcaaagccacaaactttcgccgctcggttccaaactcctgatggatcagaagttttgagtgtagtcattcgtccttcaaatcaacttaagatcactttcttagaggctaaagatatatctgatttgggatcattgaaggcagctgcaagactttttgttccaggtgcggcaacaatttactctgctcgtacaatcaaggtaaaggaagaagaaggtttaagaaattactacttctacgagtttggtagagatgaagaacgcatagctctagtagcctctgtgaacagagggaaggtttatatcgctggagcagctgcaccggaatccaaatggaaagacgatgagttgaagctccgatctgctgccatttctttcactattctatagtcaaaaggcagcttcttctaacagaaaactcgaaaatcactctctagtcgactcgaaaatgtggaactaagaacaaactggccaaatgcgataaccagacattgttctgagacacatttgtcattccattttcgtttatctgtttatttttggttgatgtaatatgttcattgatgttctgtataatgagaaaacaaatcatgattctttgtaccgcgaaagtcctagaacgtgtttttaccg

SEQ ID NO: 43397 - protein, 261 aa, Arabidopsis thaliana
  peptide (1)..(261): Ceres Seq. ID no. 12329918
HFLSIRSNEVFFYLLLLPLLMAILLHSLSLHPPNPKPQNPYKPKILSSSATFRRDVVLRTASLCFVSFIFQNQIPESLADPLKSTKPLRLGIANTKSWFQYFGSGFAIRVPPDFEDVNEPEDYSAGLSLYGDKAKPQTFAARFQTPDGSEVLSVVIRPSNQLKITFLEAKDISDLGSLKAAARLFVPGAATIYSARTIKVKEEEGLRNYYFYEFGRDEERIALVASVNRGKVYIAGAAAPESKWKDDELKLRSAAISFTIL

SEQ ID NO: 43398 - protein, 241 aa, Arabidopsis thaliana
  peptide (1)..(241): Ceres Seq. ID no. 12329919
MAILLHSLSLHPPNPKPQNPYKPKILSSSATFRRDVVLRTASLCFVSFIFQNQIPESLADPLKSTKPLRLGIANTKSWFQYFGSGFAIRVPPDFEDVNEPEDYSAGLSLYGDKAKPQTFAARFQTPDGSEVLSVVIRPSNQLKITFLEAKDISDLGSLKAAARLFVPGAATIYSARTIKVKEEEGLRNYYFYEFGRDEERIALVASVNRGKVYIAGAAAPESKWKDDELKLRSAAISFTIL

SEQ ID NO: 43399 - DNA, 1031 bp, Arabidopsis thaliana
  misc_feature (1)..(1031): Ceres Seq. ID no. 12602943
  misc_feature (1)..(1031): Ortholog of  Ceres SEQ ID NO 15226473 as cited in SEQ ID NO 50919
  misc_feature (1)..(1031): Ortholog of  Ceres SEQ ID NO 13639704 as cited in SEQ ID NO 51325
  misc_feature (1)..(1031): Ortholog of  Ceres SEQ ID NO 13661747 as cited in SEQ ID NO 60578
  misc_feature (1)..(1031): Ortholog of  Ceres SEQ ID NO 13661672 as cited in SEQ ID NO 61462
  misc_feature (1)..(1031): Ortholog of  Ceres SEQ ID NO 13599646 as cited in SEQ ID NO 0
actttcaacttaatcacacacaaggagagaagagagaaagagagaaagagagacagagataatggcgtacagtgcgtgtttcctacaccagagcgcattggcttcatcagccgcacgatcatcatcttcctcctcatcccagcgtcacgtgtcgctctccaaacctgttcagatcatctgtaaagctcaacagtctcatgaagacgataactccgccgtctcccgccgtcttgctctcactctcctcgtcggcgccgctgctgttggttccaaagtatctcctgctgatgccgcctacggtgaagctgcaaacgtgtttgggaagccaaagacgaacacagacttcttgccatacaatggagatgggttcaaagtgcaggttccagcaaaatggaacccaagcaaagagattgagtatccaggacaagtccttaggttcgaagacaacttcgatgctactagcaatctcaatgtcatggtcactcctaccgacaagaagtccatcactgattacggttctcccgaagagttcctctctcaggttaattacctcctagggaaacaagcttacttcggtgagactgcctctgagggaggctttgacaacaatgcagtggcaacagcaaacattctggagtcatcatctcaggaagttggtgggaaaccctactattacttgtctgtgttgacaagaacggctgatggagacgaaggtgggaagcatcagctgatcacagcaaccgtgaatggagggaagctttacatctgcaaagcacaagctggagacaagaggtggttcaagggagccaggaaatttgtcgagagcgcagccacttctttcagtgttgcttgagtgaaagcaacacaacgtaacaatgctctgcttgctttcttcatttgtctcttgtaaaaaatggaaaatgaaactgagcttttgagaactatcaagatgatgttaccttttcggcatcacttgtgtacctatgataacagactcgttttccaagttttcttaaaaaacaactatattc

SEQ ID NO: 43400 - protein, 263 aa, Arabidopsis thaliana; identical to SEQ ID NO: 22602
  peptide (1)..(263): Ceres Seq. ID no. 12602944

SEQ ID NO: 43401 - DNA, 1352 bp, Arabidopsis thaliana
  misc_feature (1)..(1352): Ceres Seq. ID no. 12603503
  misc_feature (1)..(1352): Ortholog of  Ceres SEQ ID NO 13590671 as cited in SEQ ID NO 68208
atacttttctttgagctcaagaaatatagtttactaaaaggctgggtttttctggatttcttactcccaaaccgatacaagatcgaagctttgccttctgtttcttttgagaatctaccatggctgctctacaataccttgaatcgcagaaaaatgcgcacccagagcttggtgagtggtacaattcgctcgcagatctgtaccagaagaagctctggcatcagctcactcttaagctcgagcagttcatcgctctctctgtctttcaggctggagatgctttaatacagctttacaacaatttcatcactgactttgagacgaggatcaatcttctgaagcttgcgcatttcgctgttgtagtctcccgacagtatcctgagaaagaagctgcagttagttatcttgaaggagtgattgagaagcttaaagctactaaagagtcaaggataaatgaaccaattagctatatagaaacacaaatagctttgttcaagcttgagcaaggtgaccagaaggagtgcaagaaaatcttggacgatggaaaaagcctgcttgatagtatgactgacattgatccatcagtttatgccaacttcttttgggtctcttctcagtaccataaagtccgtcaagagttctctgagttctataaaaatgctcttctttacctcgcttatacgtctgtggactcactctcggaatcatttaagctggatttggcttttgatttgtcgctttcagctctacttggggagaatatctataactttggggaactgttagcccatccaattttgaaaagtctgcttggaacaaatgtggaatggctttaccacattctacaagcattcaaccacggagatttagttcagtaccaagaactctgtcgtgtgcacaatgcatcgttgagtgctcaaccagcactggttgagaatgagaagaaactattagagaagatcaacattctctgccttattgagatcattttcagccgacctgctgaagataggaccatacctttgagtgtcattgccgagcgtactaaactttcaatcgaagatgttgagcaccttctcatgaagagcttatcgactcgaaatcttcttgaatgtgtgattctgtattggttgattgtgaaaactgaggagaatgagttattgcaggtgcacttgatagagggaatactagatcaggtgaatggaacagtttacgtctcatgggcgcaaccgagggtgttaggaataccgcagatcaagtcattgagggatcagctagacagctgggtcgataaggttcacaccacattgttatctgttgaggccgagacacctgatcttgttgcagcttaa

SEQ ID NO: 43402 - protein, 410 aa, Arabidopsis thaliana
  peptide (1)..(410): Ceres Seq. ID no. 12603504
MAALQYLESQKNAHPELGEWYNSLADLYQKKLWHQLTLKLEQFIALSVFQAGDALIQLYNNFITDFETRINLLKLAHFAVVVSRQYPEKEAAVSYLEGVIEKLKATKESRINEPISYIETQIALFKLEQGDQKECKKILDDGKSLLDSMTDIDPSVYANFFWVSSQYHKVRQEFSEFYKNALLYLAYTSVDSLSESFKLDLAFDLSLSALLGENIYNFGELLAHPILKSLLGTNVEWLYHILQAFNHGDLVQYQELCRVHNASLSAQPALVENEKKLLEKINILCLIEIIFSRPAEDRTIPLSVIAERTKLSIEDVEHLLMKSLSTRNLLECVILYWLIVKTEENELLQVHLIEGILDQVNGTVYVSWAQPRVLGIPQIKSLRDQLDSWVDKVHTTLLSVEAETPDLVAA

SEQ ID NO: 43403 - protein, 262 aa, Arabidopsis thaliana
  peptide (1)..(262): Ceres Seq. ID no. 12603505
MTDIDPSVYANFFWVSSQYHKVRQEFSEFYKNALLYLAYTSVDSLSESFKLDLAFDLSLSALLGENIYNFGELLAHPILKSLLGTNVEWLYHILQAFNHGDLVQYQELCRVHNASLSAQPALVENEKKLLEKINILCLIEIIFSRPAEDRTIPLSVIAERTKLSIEDVEHLLMKSLSTRNLLECVILYWLIVKTEENELLQVHLIEGILDQVNGTVYVSWAQPRVLGIPQIKSLRDQLDSWVDKVHTTLLSVEAETPDLVAA

SEQ ID NO: 43404 - DNA, 870 bp, Arabidopsis thaliana
  misc_feature (1)..(870): Ceres Seq. ID no. 12326553
  misc_feature (1)..(870): Ortholog of  Ceres SEQ ID NO 12611101 as cited in SEQ ID NO 55920
aaagcaattgtcagatttcagcatctcccatggaggaatcaagattcgattctgaagatgttgattatgctgagattgttgttgttcgtcatggtgaaacatcttggaatgccgagagaaaaatccagggtcatttggatgttgagttaaatgatgcaggaagacaacaagcacaaagagttgcagagcggttatcgaaggagcagaagatatctcatgtatactcttctgacttgaagagagcctttgagactgctcagatcattgctgctaaatgcggcaagcttgaggtgcttaccgatcgtgatttgcgggaaagacatttaggagatatgcaagggcttgtgtatcaagaagcttcgaaaattcgtccggaagcttacaaggctttttcatctaaccgcacagacgttgatattccaggtggaggagaaagtcttgataaactttacgatagatgtacaactgcattacagagaatcggcgacaaacataaaggtgaaagagtagtagtagtgactcatggaggtgtgattcgatctctctacgaaagagctcgtccaagcgcaagaaaagttgaaaagatactcaatacatcggttaatgtgttccgtttattcgacggagacaaatggaccatccaagtttggggtgatgtgagtcatctcgaccaaaccggcttcttacaatcaggttttggtggtgatagaacctctggttagattctatactcttcttccccttggaagagcatttatgtaatttaagtttccgattttaacatttgaccccataactttaataaagtgatttgggaggattgataaagtaaattgctataaatttctactgtcaaatgttatatggttc

SEQ ID NO: 43405 - protein, 239 aa, Arabidopsis thaliana
  peptide (1)..(239): Ceres Seq. ID no. 12326554
SNCQISASPMEESRFDSEDVDYAEIVVVRHGETSWNAERKIQGHLDVELNDAGRQQAQRVAERLSKEQKISHVYSSDLKRAFETAQIIAAKCGKLEVLTDRDLRERHLGDMQGLVYQEASKIRPEAYKAFSSNRTDVDIPGGGESLDKLYDRCTTALQRIGDKHKGERVVVVTHGGVIRSLYERARPSARKVEKILNTSVNVFRLFDGDKWTIQVWGDVSHLDQTGFLQSGFGGDRTSG

SEQ ID NO: 43406 - protein, 230 aa, Arabidopsis thaliana
  peptide (1)..(230): Ceres Seq. ID no. 12326555
MEESRFDSEDVDYAEIVVVRHGETSWNAERKIQGHLDVELNDAGRQQAQRVAERLSKEQKISHVYSSDLKRAFETAQIIAAKCGKLEVLTDRDLRERHLGDMQGLVYQEASKIRPEAYKAFSSNRTDVDIPGGGESLDKLYDRCTTALQRIGDKHKGERVVVVTHGGVIRSLYERARPSARKVEKILNTSVNVFRLFDGDKWTIQVWGDVSHLDQTGFLQSGFGGDRTSG

SEQ ID NO: 43407 - protein, 129 aa, Arabidopsis thaliana
  peptide (1)..(129): Ceres Seq. ID no. 12326556
MQGLVYQEASKIRPEAYKAFSSNRTDVDIPGGGESLDKLYDRCTTALQRIGDKHKGERVVVVTHGGVIRSLYERARPSARKVEKILNTSVNVFRLFDGDKWTIQVWGDVSHLDQTGFLQSGFGGDRTSG

SEQ ID NO: 43408 - DNA, 1475 bp, Arabidopsis thaliana
  misc_feature (1)..(1475): Ceres Seq. ID no. 12336500
  misc_feature (1)..(1475): Ortholog of  Ceres SEQ ID NO 14310740 as cited in SEQ ID NO 53755
  misc_feature (1)..(1475): Ortholog of  Ceres SEQ ID NO 13596202 as cited in SEQ ID NO 68492
aagcaacctcatttataaacccctcgatttcttgcgttgttttcgaatttttattctctttcttttttttcttctcctctcgattcgaaaatttcacatctccggaattttcatttctggagaatattgtttcacatccctacaatggcgtctgagaatctgaatgacaagatctctgtttttaagaaactcaaagccaaatcagataataagatttgttttgattgcaatgcgaagaacccaacatgggcttccgttacttacgggatctttctctgcatcgattgctcagctgttcatcggagtcttggcgtccacattagcttcgtcaggtcaaccaatttagattcatggagctcagagcaattgaaaatgatgatatatggaggaaacaacagggcacaagtctttttcaaacagtacggatggagcgatggaggtaaaaccgaggctaagtatacctcaagagctgctgatttgtataaacagatacttgctaaagaagttgcaaaaagcaaggctgaggaagaattggatttgcctccatctcctcctgattcaacacaagtgcctaatggactctccagcatcaaaaccagtgaagctcttaaagagagtaatactctaaagcagcaagaaaagcctgatgttgttcccgtctcaccaagaatttctcgcagcgttaagaaacctcttggtgctaagaagacaggcaaaactggcggacttggcgcccggaagctaactactaagtcgagcgggactctttatgatcaaaagccagaggaatctgttattatacaagcgacatcaccagtttcagctaaatcagccaggtcatcgttttcctctcgttttgattatgcggacaatgttcaaaacagggaagattacatgagccctcaagtcgttagtcatgtagctccaccaaaatcatcaggcttctttgaggaagagttggagatgaacggaggcaggtttcagaagaaaccaatcacaagttcctcaaaactgcaaattcaagaaacagacgaagcacggaagaaattcacaaacgccaaatcaatatcctctgctcagtactttggaaatgacaacaactctgctgaccttgaggccaaaagttcattgaagaagttttctggttcatcagcaatctctagtgctgatctgtttggagacggtgatggagatttccctcttgatctcactgcgggtgatcttctcaaccgcctatctctccaggcacaacaagacatatcatcattgaagaacatggcagaggagacaaagaagaagcttggctctgttgcttccagcttatgggtttgaaatgttcataattttctctaaagtccatcaaaacttttttattttattttttcttactctaatttccatttacaaaagcagttatcctattcttttactagggaaactctgttttgtttaattgaaagttaccaatattttgt

SEQ ID NO: 43409 - protein, 395 aa, Arabidopsis thaliana
  peptide (1)..(395): Ceres Seq. ID no. 12336501
MASENLNDKISVFKKLKAKSDNKICFDCNAKNPTWASVTYGIFLCIDCSAVHRSLGVHISFVRSTNLDSWSSEQLKMMIYGGNNRAQVFFKQYGWSDGGKTEAKYTSRAADLYKQILAKEVAKSKAEEELDLPPSPPDSTQVPNGLSSIKTSEALKESNTLKQQEKPDVVPVSPRISRSVKKPLGAKKTGKTGGLGARKLTTKSSGTLYDQKPEESVIIQATSPVSAKSARSSFSSRFDYADNVQNREDYMSPQVVSHVAPPKSSGFFEEELEMNGGRFQKKPITSSSKLQIQETDEARKKFTNAKSISSAQYFGNDNNSADLEAKSSLKKFSGSSAISSADLFGDGDGDFPLDLTAGDLLNRLSLQAQQDISSLKNMAEETKKKLGSVASSLWV

SEQ ID NO: 43410 - protein, 319 aa, Arabidopsis thaliana
  peptide (1)..(319): Ceres Seq. ID no. 12336502
MMIYGGNNRAQVFFKQYGWSDGGKTEAKYTSRAADLYKQILAKEVAKSKAEEELDLPPSPPDSTQVPNGLSSIKTSEALKESNTLKQQEKPDVVPVSPRISRSVKKPLGAKKTGKTGGLGARKLTTKSSGTLYDQKPEESVIIQATSPVSAKSARSSFSSRFDYADNVQNREDYMSPQVVSHVAPPKSSGFFEEELEMNGGRFQKKPITSSSKLQIQETDEARKKFTNAKSISSAQYFGNDNNSADLEAKSSLKKFSGSSAISSADLFGDGDGDFPLDLTAGDLLNRLSLQAQQDISSLKNMAEETKKKLGSVASSLWV

SEQ ID NO: 43411 - protein, 318 aa, Arabidopsis thaliana
  peptide (1)..(318): Ceres Seq. ID no. 12336503
MIYGGNNRAQVFFKQYGWSDGGKTEAKYTSRAADLYKQILAKEVAKSKAEEELDLPPSPPDSTQVPNGLSSIKTSEALKESNTLKQQEKPDVVPVSPRISRSVKKPLGAKKTGKTGGLGARKLTTKSSGTLYDQKPEESVIIQATSPVSAKSARSSFSSRFDYADNVQNREDYMSPQVVSHVAPPKSSGFFEEELEMNGGRFQKKPITSSSKLQIQETDEARKKFTNAKSISSAQYFGNDNNSADLEAKSSLKKFSGSSAISSADLFGDGDGDFPLDLTAGDLLNRLSLQAQQDISSLKNMAEETKKKLGSVASSLWV

SEQ ID NO: 43412 - DNA, 1407 bp, Arabidopsis thaliana
  misc_feature (1)..(1407): Ceres Seq. ID no. 12439618
  misc_feature (1)..(1407): Ortholog of  Ceres SEQ ID NO 12781552 as cited in SEQ ID NO 51997
  misc_feature (1)..(1407): Ortholog of  Ceres SEQ ID NO 13597237 as cited in SEQ ID NO 64136
  misc_feature (1)..(1407): Ortholog of  Ceres SEQ ID NO 13598601 as cited in SEQ ID NO 69129
atcgaaaatgagatcagagagagaggaggagtctctcatcgtgagtagggcttttgactccctccctactttgcctacttcttcttcttcctctgtggccactctacagtccacacctacttcaagacacctttctcatccttgagatcggcgtcagatcctccgccgcttctcctcttcactatctccggtcacaactcgtttttctctgtttttctttatctctactttatgcacaatctgactttctaagtggatttacagtgttaaagatgatggaatctggcgctggtttcgtggccatggaagagaggatctctcctggaagtttcttccagtatcctctttctggattccgtgcttctcctaatcgatccccttgtcctccctctgatcgtgaaaggtacttgactgaattattgcaagagagacaaaagttgggtccctttttgcaagttatgccaaattgctgcagactgcttaatcatgaaatcaggagggtctctagttttcctgatcttgatagatatgagcatggcagtccatttagatcgcttggtcagccgacaaatggaaagcttgatttagagggatggtcgatgatgcaagccgaggaaaactgtcacctccagagagcttctccatttcgcggtccttccccagtgggctggattgggatgccgggactccctaacccacccattgtgaaaaaagtgattagacttgatgtcccagtggataaatatccaagctataattttgttgggaggattcttgggccacgtggaaactccctaaaaagagttgagctagcaacccactgcagggtgtttatcagaggacgaggatctgtgaaggatactgtcaaggaggaaaaattaaaaggtaagccagggtacgagcatctctgcgagccactacatgtactgatcgaggccgagcttccagaagacataataaactctcgattggagcatgcagtgcatttcctggaatcactcctgaagccgatggacgagtcaatggatcactacaagagggaacagctgaaggagttagcggctttgaatggtacactaagggaggagagtccgagtccgagcttgagcccttgtttgagccccagcatgtcccctttcaacagcaagcgtgctaagacagagatatgatcaagagaaaccactagtgcatgggtcttgtgggcaggatcatgagtttgctaagttctaacgtttggactcttgaattaatttattttgtcattaactttattctttatttttgttggttagctgagatgaccattaaccagtgggtaataaactaataatggtgtttatgaaattgtaatctccttctcaatcattgtaacctttatttaagttttaaaccccaaacgtttatttc

SEQ ID NO: 43413 - protein, 298 aa, Arabidopsis thaliana; identical to SEQ ID NO: 30428
  peptide (1)..(298): Ceres Seq. ID no. 12439619

SEQ ID NO: 43414 - protein, 297 aa, Arabidopsis thaliana; identical to SEQ ID NO: 30429
  peptide (1)..(297): Ceres Seq. ID no. 12439620

SEQ ID NO: 43415 - protein, 288 aa, Arabidopsis thaliana; identical to SEQ ID NO: 30430
  peptide (1)..(288): Ceres Seq. ID no. 12439621

SEQ ID NO: 43416 - DNA, 1177 bp, Arabidopsis thaliana
  misc_feature (1)..(1177): Ceres Seq. ID no. 13493986
  misc_feature (1)..(1177): Ortholog of  Ceres SEQ ID NO 13594163 as cited in SEQ ID NO 60426
agccgagaaacaacgcaaactccgattgagaggtgtttgcatgattcctgagcttgtctgtgtcaatagtgaggcactacatcgaggaataagaaagaagatctaaggagctaaagctattatgtcaacgaacactgaatcttcttcttattcttctcttcctagtcaaaggcttttgggtaaagtggcattgatcactggaggagccacagggataggtgagagcattgttcgtctgttccacaagcacggtgccaaagtctgcattgttgatctgcaagatgatctcggaggtgaggtgtgtaaaagtctgcttcgtggtgagtccaaggagacggcttttttcatccatggcgatgttagagtggaagatgacattagcaatgcggttgactttgcagtcaaaaattttgggacgcttgatatacttatcaacaatgcaggattatgtggagcaccgtgccctgatattcgtaattatagtttgagtgagttcgagatgacctttgatgtgaatgtgaaaggagcttttctaagcatgaaacatgcagctcgtgtaatgataccggagaagaaagggtcgatagtttccttatgtagtgtgggaggtgttgtgggaggcgttggtccacattcttatgttggttccaagcatgctgttctaggcttgactaggagtgttgcagcggagcttggacagcacgggatacgtgtgaactgtgtttcgccttacgcggttgcaactaaactcgctttggctcatttgccggaggaagaaagaacggaggatgcatttgttggtttcaggaattttgctgctgcaaacgcgaatctaaaaggggtggaactgacggttgatgatgtagcgaacgctgttctgtttttggctagcgatgactcgcggtacataagcggagataatttgatgattgatggaggattcacttgcactaaccactcctttaaagtcttcagatgatgcattttgctaaagaatgttgtttaatgtttattgtccgccaatttatcatgtctatcaaataatttaactgtggagcttattgtggttttaattgttacttttagcattgtagaaatgtttgatgttaactacatttcttactggtagacattgaacaaaatcagattctcataatgattaaaaagattgagtagc

SEQ ID NO: 43417 - protein, 285 aa, Arabidopsis thaliana
  peptide (1)..(285): Ceres Seq. ID no. 13493987
MSTNTESSSYSSLPSQRLLGKVALITGGATGIGESIVRLFHKHGAKVCIVDLQDDLGGEVCKSLLRGESKETAFFIHGDVRVEDDISNAVDFAVKNFGTLDILINNAGLCGAPCPDIRNYSLSEFEMTFDVNVKGAFLSMKHAARVMIPEKKGSIVSLCSVGGVVGGVGPHSYVGSKHAVLGLTRSVAAELGQHGIRVNCVSPYAVATKLALAHLPEEERTEDAFVGFRNFAAANANLKGVELTVDDVANAVLFLASDDSRYISGDNLMIDGGFTCTNHSFKVFR

SEQ ID NO: 43418 - protein, 159 aa, Arabidopsis thaliana
  peptide (1)..(159): Ceres Seq. ID no. 13493988
MTFDVNVKGAFLSMKHAARVMIPEKKGSIVSLCSVGGVVGGVGPHSYVGSKHAVLGLTRSVAAELGQHGIRVNCVSPYAVATKLALAHLPEEERTEDAFVGFRNFAAANANLKGVELTVDDVANAVLFLASDDSRYISGDNLMIDGGFTCTNHSFKVFR

SEQ ID NO: 43419 - protein, 146 aa, Arabidopsis thaliana
  peptide (1)..(146): Ceres Seq. ID no. 13493989
MKHAARVMIPEKKGSIVSLCSVGGVVGGVGPHSYVGSKHAVLGLTRSVAAELGQHGIRVNCVSPYAVATKLALAHLPEEERTEDAFVGFRNFAAANANLKGVELTVDDVANAVLFLASDDSRYISGDNLMIDGGFTCTNHSFKVFR

SEQ ID NO: 43420 - DNA, 1836 bp, Arabidopsis thaliana
  misc_feature (1)..(1836): Ceres Seq. ID no. 13575767
  misc_feature (1)..(1836): Ortholog of  Ceres SEQ ID NO 15171476 as cited in SEQ ID NO 55569
  misc_feature (1)..(1836): Ortholog of  Ceres SEQ ID NO 14312069 as cited in SEQ ID NO 59191
gtagttgcaaacaccgatcagtcacagacagtagcctctcaccatcaccaccacggcggccgtcaccgacgccgatacaccatgaaattacatttacaccctctctcacttgtcttcttctttttcttcttcttcttccgaccgacaatgtcgtcgaaccagcacgattactccgacgcactctcaaaatcaattctcttcttcgaaggccagcgctccggttacctcccaaacgaccagcgtatgacctggcgccgtaactccggtctgagcgacggttggacacacaacatcgatttaaccggcggttattacgacgccggagacaacgtcaaattcaatttcccgatggctttcaccaccacaatgctcgcctggagcgtaattgagttcggcgaattcatgccttcgtcggagctacgtaactctctcgtggctctccggtggagctctaattacctcctcaaatccgtttcacagctacctaaccggatcttcgtccaggtaggtgatccgatagcagatcataattgctgggaaagaccagaagacatggatacaccacggactgcttacgccgttaatgccccgaatccggcttctgaagttgccggagaaactacggcggccctctcagctgcttcgattgctttccgatcatcggatccaggatactctcaaacattgctccaaaatgctgtcaaaacttttcagttcgctgatatgtatcgcggtgcttatagcagcaatgacgatatcaaaaatgatgtgtgtcctttctactgcgatttcaacggatttcaggatgagttattgtggggagcagcttggctaagaaaagcgactggtgatgaaagctaccttaattacatagagagtaaccgtgaaccgtttggtgctaacgataacgtagacgaatttggctgggacaacaaagttggtggacttaatgttctcgtttcgaaggaagttattgaaggaaatatgtacaacttagaggcgtacaaggcatcagcagagagcttcatgtgtagtctggtcccggaatcttcgggaccgcatgttgagtatacttccgctggtctactttacaagcccggcggtagccagctccaacatgcgaccaccatatctttcctcctcctcgtatacgctcaatatctttcaagaagctctctctccctcaattgcggcacccttaccgtccctcctgattatctccgccgtcttgccaagaaacaggtggactatatattggggaataatccgatgggattatcgtacatggtcggatacggagagagatatccaaagaggatccatcaccgtggctcatcattgccatcgattgtggaccatccagaagccatcagatgcaaagacgggtcggtttatttcaattctaccgaaccgaacccgaacgttttgattggagcggtggtgggtgggcccggagaggacgatatgtacgatgatgatcggtccgatttccgcaagtccgagcccactacttacatcaatgctcctttcgttggcgttttggcgtactttgcagccaatcctggttctagctaagctgacgacatgggagtaaaattggaaaacattattcttaagttccaagagtatgggagttcttttttttcttacaagtctctcatcttcttgcccaagtaaagaaggaaaaagttcttacagttaaaatagtttttcttttacgcaaaattaatctgaataacttattcggattattcacctgttgatcatttgatacttctttttttatcaaatgtaattaatagtctattcatatatacatatatataagtggttgct

SEQ ID NO: 43421 - protein, 524 aa, Arabidopsis thaliana
  peptide (1)..(524): Ceres Seq. ID no. 13575768
VVANTDQSQTVASHHHHHGGRHRRRYTMKLHLHPLSLVFFFFFFFFRPTMSSNQHDYSDALSKSILFFEGQRSGYLPNDQRMTWRRNSGLSDGWTHNIDLTGGYYDAGDNVKFNFPMAFTTTMLAWSVIEFGEFMPSSELRNSLVALRWSSNYLLKSVSQLPNRIFVQVGDPIADHNCWERPEDMDTPRTAYAVNAPNPASEVAGETTAALSAASIAFRSSDPGYSQTLLQNAVKTFQFADMYRGAYSSNDDIKNDVCPFYCDFNGFQDELLWGAAWLRKATGDESYLNYIESNREPFGANDNVDEFGWDNKVGGLNVLVSKEVIEGNMYNLEAYKASAESFMCSLVPESSGPHVEYTSAGLLYKPGGSQLQHATTISFLLLVYAQYLSRSSLSLNCGTLTVPPDYLRRLAKKQVDYILGNNPMGLSYMVGYGERYPKRIHHRGSSLPSIVDHPEAIRCKDGSVYFNSTEPNPNVLIGAVVGGPGEDDMYDDDRSDFRKSEPTTYINAPFVGVLAYFAANPGSS

SEQ ID NO: 43422 - protein, 497 aa, Arabidopsis thaliana
  peptide (1)..(497): Ceres Seq. ID no. 13575769
MKLHLHPLSLVFFFFFFFFRPTMSSNQHDYSDALSKSILFFEGQRSGYLPNDQRMTWRRNSGLSDGWTHNIDLTGGYYDAGDNVKFNFPMAFTTTMLAWSVIEFGEFMPSSELRNSLVALRWSSNYLLKSVSQLPNRIFVQVGDPIADHNCWERPEDMDTPRTAYAVNAPNPASEVAGETTAALSAASIAFRSSDPGYSQTLLQNAVKTFQFADMYRGAYSSNDDIKNDVCPFYCDFNGFQDELLWGAAWLRKATGDESYLNYIESNREPFGANDNVDEFGWDNKVGGLNVLVSKEVIEGNMYNLEAYKASAESFMCSLVPESSGPHVEYTSAGLLYKPGGSQLQHATTISFLLLVYAQYLSRSSLSLNCGTLTVPPDYLRRLAKKQVDYILGNNPMGLSYMVGYGERYPKRIHHRGSSLPSIVDHPEAIRCKDGSVYFNSTEPNPNVLIGAVVGGPGEDDMYDDDRSDFRKSEPTTYINAPFVGVLAYFAANPGSS

SEQ ID NO: 43423 - protein, 475 aa, Arabidopsis thaliana
  peptide (1)..(475): Ceres Seq. ID no. 13575770
MSSNQHDYSDALSKSILFFEGQRSGYLPNDQRMTWRRNSGLSDGWTHNIDLTGGYYDAGDNVKFNFPMAFTTTMLAWSVIEFGEFMPSSELRNSLVALRWSSNYLLKSVSQLPNRIFVQVGDPIADHNCWERPEDMDTPRTAYAVNAPNPASEVAGETTAALSAASIAFRSSDPGYSQTLLQNAVKTFQFADMYRGAYSSNDDIKNDVCPFYCDFNGFQDELLWGAAWLRKATGDESYLNYIESNREPFGANDNVDEFGWDNKVGGLNVLVSKEVIEGNMYNLEAYKASAESFMCSLVPESSGPHVEYTSAGLLYKPGGSQLQHATTISFLLLVYAQYLSRSSLSLNCGTLTVPPDYLRRLAKKQVDYILGNNPMGLSYMVGYGERYPKRIHHRGSSLPSIVDHPEAIRCKDGSVYFNSTEPNPNVLIGAVVGGPGEDDMYDDDRSDFRKSEPTTYINAPFVGVLAYFAANPGSS

SEQ ID NO: 43424 - DNA, 1850 bp, Arabidopsis thaliana
  misc_feature (1)..(1850): Ceres Seq. ID no. 13592577
  misc_feature (1)..(1850): Ortholog of  Ceres SEQ ID NO 13656177 as cited in SEQ ID NO 64997
ggactctcgttcggccgtttcatcaacaactctctcctgtaaacgaaacaaagaaatggctggacaaaagcaagagcttcccgtctccggcgaacctttagccgtcgagagtccgatgaccaacaagaagaagaagaaaagcaagaagaacaaacatacagaggaaaatcatgaagtcgaagaagtgcctcaagaggtcactaatggtgtagaggaagagttgagtaataaagagaagaagaagaaacgtaagagagaggagaaagagtctgagaagaataagaagaaggatgtcccggagaagaagcttgaagctgaggatttaggagaaggagagagtgaacaacagaaggttgttgtgactgggaaaggtgtggaagaagcaaagtacgcagctttgaagacttttgctgaatcgaatttgccggagaatgttttagattgttgtaagactttcgagaagccgtctccgattcagtcacatacgtggccgtttttgttagatgggcgtgatcttatcgggattgcgaaaactgggtcaggtaagacattggcttttgggattcctgcgattatgcatgtgttgaagaaaaataagaagattggtggaggatcaaagaaggttaatcctacttgtttagttctttctcctacacgagaattggctgttcagatttctgatgttttgcgtgaagctggagaaccgtgtggtttgaaatcgatttgtgtgtatggtggaagctctaaagggcctcaaataagtgcaattcgatctggagttgatattgtcattggtacgcctggtcgtttgagagacttgattgagtctaatgtgcttcgtctctcggatgtttcctttgtcgtattggatgaagcagatcgaatgcttgatatgggtttcgaggaacctgtccggtttatattgagtaacacaaataaagttcgtcaaatggttatgttcagtgcaacttggcctttggatgttcacaaattggcccaggaattcatggatccaaatccaatcaaggtgatcataggttctgtagacttagctgccaaccacgacgttatgcaaatcattgaggtcttggatgaacgtgcgcgtgatcagcgtctcattgcattactagaaaaataccataaatctcaaaagaacagggttttggtatttgctttatacaaggtggaagctgaacgtctcgagcgttttcttcagcaaagaggttggaaagctgtatctatacacggaaacaaagcacagagcgaacgtaccaggtctttatcattgttcaaagaaggatcctgcccgttactggtggctactgatgttgcagcaagagggcttgatatcccggacgtggaagttgtgataaactacactttccctttaacaacagaggattatgtacacagaatcgggaggacaggaagagcgggtaaaaagggcgttgcacacaccttcttcacgccactgaacaagggtcttgcaggagaacttgtgaatgttcttagggaagcaggacaagtagtgccagctgatcttttgaagtttggcactcatgtaaagaaaaaggaatcaaaattgtatggagctcatttcaaagaaatagctgctgatgctcctaaagctacgaagatcacattcgataattctgatgacgaagactagcttagtttattattttaatggtatcattattttattatatttacttggacaatgaaacctgcatttgattttcgtttgtggtctggggcttggcccgaataacaaaaacaaatatatttcagaattttcattatatttgtatgcaattttgtgttactagttattaaacttttatttgtcc

SEQ ID NO: 43425 - protein, 555 aa, Arabidopsis thaliana
  peptide (1)..(555): Ceres Seq. ID no. 13592578
DSRSAVSSTTLSCKRNKEMAGQKQELPVSGEPLAVESPMTNKKKKKSKKNKHTEENHEVEEVPQEVTNGVEEELSNKEKKKKRKREEKESEKNKKKDVPEKKLEAEDLGEGESEQQKVVVTGKGVEEAKYAALKTFAESNLPENVLDCCKTFEKPSPIQSHTWPFLLDGRDLIGIAKTGSGKTLAFGIPAIMHVLKKNKKIGGGSKKVNPTCLVLSPTRELAVQISDVLREAGEPCGLKSICVYGGSSKGPQISAIRSGVDIVIGTPGRLRDLIESNVLRLSDVSFVVLDEADRMLDMGFEEPVRFILSNTNKVRQMVMFSATWPLDVHKLAQEFMDPNPIKVIIGSVDLAANHDVMQIIEVLDERARDQRLIALLEKYHKSQKNRVLVFALYKVEAERLERFLQQRGWKAVSIHGNKAQSERTRSLSLFKEGSCPLLVATDVAARGLDIPDVEVVINYTFPLTTEDYVHRIGRTGRAGKKGVAHTFFTPLNKGLAGELVNVLREAGQVVPADLLKFGTHVKKKESKLYGAHFKEIAADAPKATKITFDNSDDED

SEQ ID NO: 43426 - protein, 537 aa, Arabidopsis thaliana
  peptide (1)..(537): Ceres Seq. ID no. 13592579
MAGQKQELPVSGEPLAVESPMTNKKKKKSKKNKHTEENHEVEEVPQEVTNGVEEELSNKEKKKKRKREEKESEKNKKKDVPEKKLEAEDLGEGESEQQKVVVTGKGVEEAKYAALKTFAESNLPENVLDCCKTFEKPSPIQSHTWPFLLDGRDLIGIAKTGSGKTLAFGIPAIMHVLKKNKKIGGGSKKVNPTCLVLSPTRELAVQISDVLREAGEPCGLKSICVYGGSSKGPQISAIRSGVDIVIGTPGRLRDLIESNVLRLSDVSFVVLDEADRMLDMGFEEPVRFILSNTNKVRQMVMFSATWPLDVHKLAQEFMDPNPIKVIIGSVDLAANHDVMQIIEVLDERARDQRLIALLEKYHKSQKNRVLVFALYKVEAERLERFLQQRGWKAVSIHGNKAQSERTRSLSLFKEGSCPLLVATDVAARGLDIPDVEVVINYTFPLTTEDYVHRIGRTGRAGKKGVAHTFFTPLNKGLAGELVNVLREAGQVVPADLLKFGTHVKKKESKLYGAHFKEIAADAPKATKITFDNSDDED

SEQ ID NO: 43427 - protein, 517 aa, Arabidopsis thaliana
  peptide (1)..(517): Ceres Seq. ID no. 13592580
MTNKKKKKSKKNKHTEENHEVEEVPQEVTNGVEEELSNKEKKKKRKREEKESEKNKKKDVPEKKLEAEDLGEGESEQQKVVVTGKGVEEAKYAALKTFAESNLPENVLDCCKTFEKPSPIQSHTWPFLLDGRDLIGIAKTGSGKTLAFGIPAIMHVLKKNKKIGGGSKKVNPTCLVLSPTRELAVQISDVLREAGEPCGLKSICVYGGSSKGPQISAIRSGVDIVIGTPGRLRDLIESNVLRLSDVSFVVLDEADRMLDMGFEEPVRFILSNTNKVRQMVMFSATWPLDVHKLAQEFMDPNPIKVIIGSVDLAANHDVMQIIEVLDERARDQRLIALLEKYHKSQKNRVLVFALYKVEAERLERFLQQRGWKAVSIHGNKAQSERTRSLSLFKEGSCPLLVATDVAARGLDIPDVEVVINYTFPLTTEDYVHRIGRTGRAGKKGVAHTFFTPLNKGLAGELVNVLREAGQVVPADLLKFGTHVKKKESKLYGAHFKEIAADAPKATKITFDNSDDED

SEQ ID NO: 43428 - DNA, 1647 bp, Arabidopsis thaliana
  misc_feature (1)..(1647): Ceres Seq. ID no. 12357594
  misc_feature (1)..(1647): Ortholog of  Ceres SEQ ID NO 13657220 as cited in SEQ ID NO 66169
  misc_feature (1)..(1647): Ortholog of  Ceres SEQ ID NO 13663074 as cited in SEQ ID NO 69191
cttcttcttcgtcttcttctcggtactctgagagagtgagagagaagcaacaatggaggttttctactacttggtgtttggagtcatggctgccgtagtggcagcgttggagcttagcaagacgaacaaggatcggatcaacacttcgtcttccttcaattcattcaagaacaattacctcctcgttttctctattatgatggctggggattggcttcagggtccttatgtgtattacctttacagcacttatggttttggaaaaggagatattggtcagctattcattgctggttttggttcgtcaatgttgtttggaactattgttggatctctggctgacaaacagggtcgaaagagggcatgtgttacatactgtatagtttacatactaagttgcatcaccaagcactctccacagtacaaagttttgatggttggccgtatcttgggtggtattgctacatctctcttgttttctgctttcgagtcctggctaattgcagagcacaataagaggaactttgagcaacagtggctgtcacttacattctctaaggctgtatttcttggaaacggtctggtggctatcctttcgggattgtttggcaatcttcttgttgacactttttcctttggtcctgttgctccctttgacgccgctgcgtgctttcttgcaattggaatggcgatcatattgggaacatggtctgagaattttggagatccatctgacagcaaagacttgctgactcagttcaaagttgctgccatagcaattgcttcagatgaaaagattgcattgctgggcgctattcagtctctattcgaagcctcgatgtacacctttgttttcctctggacaccagctcttagcccaaacgatgaagaaattccacatggcttcgtctttgcaaccttcatgttagcctcaatgttgggaagctcccttacagctcgtctcatgtctcgctcatctctcagagtcgaaaactacatgcaaattgtctttctagtctcggctgcttcacttcttcttcccattacaacaagtgtcttggttgacaccgtcaaaggtgaaagacgaaggattgtcgttaactagctccattcagctgcttggtttctgtgtttttgagtcttgtgtcggaatattttggccttcgataatgaagatgaggtcgcagtatatacctgaagaagcacgaagcaccataatgaatttcttccgtgttccactcaacatctttgtctgcatcgtcttgtacaacgtggacgcatttccgatcacaatcatgtttggtatgtgctcaatcttcctcttcgtagcctccatattacaacggcggcttatggtcatctccgaaaagccaaaggcagaagattggagtccgatgaaggagcgaaactcggaagttgatcctcttaccctctgattgtgtccactcctaagctcgtcaaattcctaatttcattttttggtgattttttttctttgagaaatagaaaaagaacaatcagaatgaagaaaggtaatgatttgctcttagctttttacatgtatggttagtgatgctgattgtttgatagggtatgtaactctatatttacctttacgcacaattaccaatcaagtcttattatttt

SEQ ID NO: 43429 - protein, 350 aa, Arabidopsis thaliana
  peptide (1)..(350): Ceres Seq. ID no. 12357595
MEVFYYLVFGVMAAVVAALELSKTNKDRINTSSSFNSFKNNYLLVFSIMMAGDWLQGPYVYYLYSTYGFGKGDIGQLFIAGFGSSMLFGTIVGSLADKQGRKRACVTYCIVYILSCITKHSPQYKVLMVGRILGGIATSLLFSAFESWLIAEHNKRNFEQQWLSLTFSKAVFLGNGLVAILSGLFGNLLVDTFSFGPVAPFDAAACFLAIGMAIILGTWSENFGDPSDSKDLLTQFKVAAIAIASDEKIALLGAIQSLFEASMYTFVFLWTPALSPNDEEIPHGFVFATFMLASMLGSSLTARLMSRSSLRVENYMQIVFLVSAASLLLPITTSVLVDTVKGERRRIVVN

SEQ ID NO: 43430 - protein, 339 aa, Arabidopsis thaliana
  peptide (1)..(339): Ceres Seq. ID no. 12357596
MAAVVAALELSKTNKDRINTSSSFNSFKNNYLLVFSIMMAGDWLQGPYVYYLYSTYGFGKGDIGQLFIAGFGSSMLFGTIVGSLADKQGRKRACVTYCIVYILSCITKHSPQYKVLMVGRILGGIATSLLFSAFESWLIAEHNKRNFEQQWLSLTFSKAVFLGNGLVAILSGLFGNLLVDTFSFGPVAPFDAAACFLAIGMAIILGTWSENFGDPSDSKDLLTQFKVAAIAIASDEKIALLGAIQSLFEASMYTFVFLWTPALSPNDEEIPHGFVFATFMLASMLGSSLTARLMSRSSLRVENYMQIVFLVSAASLLLPITTSVLVDTVKGERRRIVVN

SEQ ID NO: 43431 - protein, 302 aa, Arabidopsis thaliana
  peptide (1)..(302): Ceres Seq. ID no. 12357597
MMAGDWLQGPYVYYLYSTYGFGKGDIGQLFIAGFGSSMLFGTIVGSLADKQGRKRACVTYCIVYILSCITKHSPQYKVLMVGRILGGIATSLLFSAFESWLIAEHNKRNFEQQWLSLTFSKAVFLGNGLVAILSGLFGNLLVDTFSFGPVAPFDAAACFLAIGMAIILGTWSENFGDPSDSKDLLTQFKVAAIAIASDEKIALLGAIQSLFEASMYTFVFLWTPALSPNDEEIPHGFVFATFMLASMLGSSLTARLMSRSSLRVENYMQIVFLVSAASLLLPITTSVLVDTVKGERRRIVVN

SEQ ID NO: 43432 - DNA, 779 bp, Arabidopsis thaliana; identical to SEQ ID NO: 36727
  misc_feature (1)..(779): Ceres Seq. ID no. 12580269
  misc_feature (1)..(779): Ortholog of  Ceres SEQ ID NO 13595763 as cited in SEQ ID NO 57864

SEQ ID NO: 43433 - protein, 122 aa, Arabidopsis thaliana; identical to SEQ ID NO: 36728
  peptide (1)..(122): Ceres Seq. ID no. 12580270

SEQ ID NO: 43434 - protein, 117 aa, Arabidopsis thaliana; identical to SEQ ID NO: 36729
  peptide (1)..(117): Ceres Seq. ID no. 12580271

SEQ ID NO: 43435 - protein, 89 aa, Arabidopsis thaliana; identical to SEQ ID NO: 36730
  peptide (1)..(89): Ceres Seq. ID no. 12580272

SEQ ID NO: 43436 - DNA, 1146 bp, Arabidopsis thaliana; identical to SEQ ID NO: 25459
  misc_feature (1)..(1146): Ceres Seq. ID no. 12336445
  misc_feature (1)..(1146): Ortholog of  Ceres SEQ ID NO 13599585 as cited in SEQ ID NO 988
  misc_feature (1)..(1146): Ortholog of  Ceres SEQ ID NO 13594624 as cited in SEQ ID NO 55765
  misc_feature (1)..(1146): Ortholog of  Ceres SEQ ID NO 15177682 as cited in SEQ ID NO 0

SEQ ID NO: 43437 - protein, 115 aa, Arabidopsis thaliana; identical to SEQ ID NO: 25460
  peptide (1)..(115): Ceres Seq. ID no. 12336446

SEQ ID NO: 43438 - protein, 97 aa, Arabidopsis thaliana; identical to SEQ ID NO: 25461
  peptide (1)..(97): Ceres Seq. ID no. 12336447

SEQ ID NO: 43439 - protein, 80 aa, Arabidopsis thaliana; identical to SEQ ID NO: 25462
  peptide (1)..(80): Ceres Seq. ID no. 12336448

SEQ ID NO: 43440 - protein, 69 aa, Arabidopsis thaliana; identical to SEQ ID NO: 25463
  peptide (1)..(69): Ceres Seq. ID no. 12336449

SEQ ID NO: 43441 - DNA, 1256 bp, Arabidopsis thaliana
  misc_feature (1)..(1256): Ceres Seq. ID no. 13489544
  misc_feature (1)..(1256): Ortholog of  Ceres SEQ ID NO 13595492 as cited in SEQ ID NO 51124
actattggttcctctgctctggctcatggatgaaactaccagagagatgttctcacctcataatcttcctcttgaaatgatggaagagattctcttaagactacccgtaaagtcattgacgcgattcaaatgcgtttgcagctcctggagatctttgatctcagagactctgtttgctctgaaacacgctttgatcttggagacatcgaaggcaactacttccacgaagagtccttacggagtcataacaacgtctcggtaccatctcaagtcatgctgcatccattctctctacaacgcgtcaacggtctacgtctcagaacatgatggtgagcttttaggaagagattactatcaagtcgtggggacgtgccatggattggtttgtttccacgtagattacgacaaaagtctctacctgtggaatccaaccatcaagcttcaacaaagattgtctagttcggatcttgaaacgagcgatgatgagtgtgttgtaacgtatgggtttggttatgatgaatctgaagatgactataaagtggttgcgttgttgcaacaaagacaccaagtgaagatagagacaaagatctactcaacgagacaaaagctatggagaagcaacacaagtttcccatctggagttgttgttgctgacaaatcaagatccggaatctacatcaacgggacactaaactgggcagccacttcctcatcatcgtcatggacgatcatatcgtatgatatgtcacgcgatgagttcaaggagcttccagggccagtttgttgtggcagaggatgttttacaatgacgcttggagatttaagaggatgtctttcgatggtgtgttattgcaaaggagctaatgcagatgtttgggtgatgaaggagtttggagaagtatattcttggtctaaactcttgagcattcctggtttgaccgactttgttcgaccgctttggatctcagacggtttagtggttttattggagtttagatccggtttagctctctataactgttccaatggaaggtttcattacccagtttcaaacagcataagtggttgtcgtgacgccaaagtttatctcaagacaatggtttctccaaatgatctttgagatataaaaaattgttcctaatgtttctatccaagattttatttaaaaaattagctcgattcgatttaactaagattggtatcaattggtagaaaagaaacagtacttatatggatctttaaattcaagaattaat

SEQ ID NO: 43442 - protein, 372 aa, Arabidopsis thaliana
  peptide (1)..(372): Ceres Seq. ID no. 13489545
LLVPLLWLMDETTREMFSPHNLPLEMMEEILLRLPVKSLTRFKCVCSSWRSLISETLFALKHALILETSKATTSTKSPYGVITTSRYHLKSCCIHSLYNASTVYVSEHDGELLGRDYYQVVGTCHGLVCFHVDYDKSLYLWNPTIKLQQRLSSSDLETSDDECVVTYGFGYDESEDDYKVVALLQQRHQVKIETKIYSTRQKLWRSNTSFPSGVVVADKSRSGIYINGTLNWAATSSSSSWTIISYDMSRDEFKELPGPVCCGRGCFTMTLGDLRGCLSMVCYCKGANADVWVMKEFGEVYSWSKLLSIPGLTDFVRPLWISDGLVVLLEFRSGLALYNCSNGRFHYPVSNSISGCRDAKVYLKTMVSPNDL

SEQ ID NO: 43443 - protein, 364 aa, Arabidopsis thaliana
  peptide (1)..(364): Ceres Seq. ID no. 13489546
MDETTREMFSPHNLPLEMMEEILLRLPVKSLTRFKCVCSSWRSLISETLFALKHALILETSKATTSTKSPYGVITTSRYHLKSCCIHSLYNASTVYVSEHDGELLGRDYYQVVGTCHGLVCFHVDYDKSLYLWNPTIKLQQRLSSSDLETSDDECVVTYGFGYDESEDDYKVVALLQQRHQVKIETKIYSTRQKLWRSNTSFPSGVVVADKSRSGIYINGTLNWAATSSSSSWTIISYDMSRDEFKELPGPVCCGRGCFTMTLGDLRGCLSMVCYCKGANADVWVMKEFGEVYSWSKLLSIPGLTDFVRPLWISDGLVVLLEFRSGLALYNCSNGRFHYPVSNSISGCRDAKVYLKTMVSPNDL

SEQ ID NO: 43444 - protein, 357 aa, Arabidopsis thaliana
  peptide (1)..(357): Ceres Seq. ID no. 13489547
MFSPHNLPLEMMEEILLRLPVKSLTRFKCVCSSWRSLISETLFALKHALILETSKATTSTKSPYGVITTSRYHLKSCCIHSLYNASTVYVSEHDGELLGRDYYQVVGTCHGLVCFHVDYDKSLYLWNPTIKLQQRLSSSDLETSDDECVVTYGFGYDESEDDYKVVALLQQRHQVKIETKIYSTRQKLWRSNTSFPSGVVVADKSRSGIYINGTLNWAATSSSSSWTIISYDMSRDEFKELPGPVCCGRGCFTMTLGDLRGCLSMVCYCKGANADVWVMKEFGEVYSWSKLLSIPGLTDFVRPLWISDGLVVLLEFRSGLALYNCSNGRFHYPVSNSISGCRDAKVYLKTMVSPNDL

SEQ ID NO: 43445 - DNA, 1484 bp, Arabidopsis thaliana
  misc_feature (1)..(1484): Ceres Seq. ID no. 12350415
  misc_feature (1)..(1484): Ortholog of  Ceres SEQ ID NO 13639243 as cited in SEQ ID NO 56820
  misc_feature (1)..(1484): Ortholog of  Ceres SEQ ID NO 13496409 as cited in SEQ ID NO 65697
aaccaacaagttctcctttctacccatttcgtctccttcattttgacgttttctttagatctgttaataatccatccatggcttggtctagtcactagtggtgttatctctctgtgtggaagaaaaagcaaggttttttgatcacttggattgttttaagatatggcaactttgaacccttttgatttgttggatgatgatgctgaggatccaagccagctcgctgtttccatcgagaagattgataagtccaagaaatctggaccggtttcgagcttgcctgctaagtcagctcctaagcttccctctaagccacttcctcctgctcaagccgtgagagaggccaggagtgatgccccacgtggtggtggaggccgtggaggatttaatcgtggtcgtcgtggttacaaccgtgatgatggtaacaatggatatttagggggatacactaagccctcagatgaaggagatgtttcaaagtcttcttacgagaggcgtggcggtggtggtggcggtggtgctcctcgtggttccttccgtggtgaaggtggtggacctggtggtagtcgtcgtggtggattcagcaatgagggtggtgaaggggagcgtcctcgaagggcctttgagcgtcgtagtggaactggcagagggagtgacttcaagcgtgacggatctggtcgtgggaattggggaactccaggggaagagatagctgctgagactgaagcagtagctggtgttgagactgagaaggatgttggagagaagccagctgttgatgatgtagctgctgatgctaacaaggagaatactgttgttgaggagaaagagcctgaggataaggaaatgactcttgatgagtatgagaaaatacttgaggagaagaaaaaggcacttcaatcattaaccacctctgagaggaaagttgatacgaaagtgtttgaatcaatgcaacaactgtcaaacaagaagtctaatgatgaaatcttcatcaagctgggttctgataaggacaaacgcaaagatgacaaagaagagaaggctaagaaggctgtgagcatcaatgagtttctgaagccagcagagggtgggaactactaccgaggaggccgtggtggccgtggacgtggtggtcgtggccgtggaggtgtttctagtggcgaatctggtggttaccgtaatgaagctgcaccagctattggagatgctgctcagttcccatctcttgggggcaagtaagatacatccatgataacgtccatactcgtgcatcctcctttaggattttgtgcgaggatttactgtttactggtctctcgttgtcagatgtaaataattaggtgtcgtcgtcagtttttagattttatgctaaactttacacttgttggtgttctttacttttgaaacactacactcttcttagttttaccattttactcgttttgtgtttgttgttttcttattgggatatgaaacatgttttg

SEQ ID NO: 43446 - protein, 358 aa, Arabidopsis thaliana
  peptide (1)..(358): Ceres Seq. ID no. 12350416
MATLNPFDLLDDDAEDPSQLAVSIEKIDKSKKSGPVSSLPAKSAPKLPSKPLPPAQAVREARSDAPRGGGGRGGFNRGRRGYNRDDGNNGYLGGYTKPSDEGDVSKSSYERRGGGGGGGAPRGSFRGEGGGPGGSRRGGFSNEGGEGERPRRAFERRSGTGRGSDFKRDGSGRGNWGTPGEEIAAETEAVAGVETEKDVGEKPAVDDVAADANKENTVVEEKEPEDKEMTLDEYEKILEEKKKALQSLTTSERKVDTKVFESMQQLSNKKSNDEIFIKLGSDKDKRKDDKEEKAKKAVSINEFLKPAEGGNYYRGGRGGRGRGGRGRGGVSSGESGGYRNEAAPAIGDAAQFPSLGGK

SEQ ID NO: 43447 - DNA, 1786 bp, Arabidopsis thaliana
  misc_feature (1)..(1786): Ceres Seq. ID no. 12336194
  misc_feature (1)..(1786): Ortholog of  Ceres SEQ ID NO 12611314 as cited in SEQ ID NO 56535
  misc_feature (1)..(1786): Ortholog of  Ceres SEQ ID NO 15178046 as cited in SEQ ID NO 60380
  misc_feature (1)..(1786): Ortholog of  Ceres SEQ ID NO 14312016 as cited in SEQ ID NO 60412
  misc_feature (1)..(1786): Ortholog of  Ceres SEQ ID NO 13661438 as cited in SEQ ID NO 61414
agattcagcagatgacacgaatcactccaccaaagcttcttctctcttttttgttttcttctgattctgcgttagaacatttgttgttgggtttggtttcgattgattcttgaaattggttttggtaaaaaatctcaccttttaagtataaacactttactttctctctctaaacgtatcttcttagctccatttaccatctgggttttgcttcatttactgtgattcctacaatctatcaagcttcagatgtcttctctttaagatttttcgaaaagatacattcttgcatgtgcgtagatcagccttgtatagaactgagattttggtgaagctttggattggtttctttgttctctctgttcttgtgaagggaacaacacaaagacggtggctttgctcggtaaatagattatggaacatggtttaccgtctattaaatcatggaagtcacttgtcaagagaagaaacaatgctcaagaagggggtaaatcgtcatggaaaatgaaaccagttgtggtgctaatgtgtacagtacttttgatcttttggtataagactacaaatattcagtatgaacagacagagatagaagaaacagattatccatttgagatggcaaaggaatctgaaccggtcagtgaaaagttgaaaggtttgccttttggtatcatgcaacctagatcagatttggagttaaagccactttggtcaagtagtagtttgaggtcaaagagcggcgaattgaccaaccgaaacttgttggcaatgccggtaggacttaagcaaaaggataatgttgatgctgttgtaaagaagtttcttcctgcgaatttcactgtcattctatttcattatgatggaaacatggatcaatggtgggatctagagtggagctctaaagccatacacattgttgcacataaccaaacaaaatggtggttcgcgaaacgttttctccatcctgatattgtctccatttacgattatgtttttctttgggatgaagatcttggagtggagaatttcaaccctcaaaagtacctgaggatagttaaaacagcgggactggagatatctcaaccggccttgcacccaaactcaactgaagttcaccatagaattacagtccggtctagaacgaaaatatttcataggcgagtttacgatagtagaggcaatatgaagtgttcaaatgctagtgaagggcccccatgcacaggttttgttgaaggaatggctccagttttctcaagatctgcgtggttttgcacttggaatctaatacaaaatgatctggttcatggttggggaatggatatgaaacttggatactgtgctcagggtgaccgaagcaagaaagtaggcattgtcgacagtgaatatatcttccatcaaggcattcaaactctaggtggaagcggttatcccgataagaagaactcagctcgcagcggagtaaataggagacgcggttctgcgacttttgattcaagaacagagatacggagacaatcaacgtgggagctgcaagcttttaaagaacggtggaaccaagcggttgcagaagacaaatactgggtggagcggtcttcaccgagccggaaccgaataggcaataaccggagattaaaaagaagtagtatgattccaagtttattgcagaggaaagctgaagagactacaacataaacagatacagttttaatcagattaaatatagagaaatgtttttttggttggtctcattgttatatataagttaatagttaatcatttacctccc

SEQ ID NO: 43448 - protein, 425 aa, Arabidopsis thaliana
  peptide (1)..(425): Ceres Seq. ID no. 12336195
MEHGLPSIKSWKSLVKRRNNAQEGGKSSWKMKPVVVLMCTVLLIFWYKTTNIQYEQTEIEETDYPFEMAKESEPVSEKLKGLPFGIMQPRSDLELKPLWSSSSLRSKSGELTNRNLLAMPVGLKQKDNVDAVVKKFLPANFTVILFHYDGNMDQWWDLEWSSKAIHIVAHNQTKWWFAKRFLHPDIVSIYDYVFLWDEDLGVENFNPQKYLRIVKTAGLEISQPALHPNSTEVHHRITVRSRTKIFHRRVYDSRGNMKCSNASEGPPCTGFVEGMAPVFSRSAWFCTWNLIQNDLVHGWGMDMKLGYCAQGDRSKKVGIVDSEYIFHQGIQTLGGSGYPDKKNSARSGVNRRRGSATFDSRTEIRRQSTWELQAFKERWNQAVAEDKYWVERSSPSRNRIGNNRRLKRSSMIPSLLQRKAEETTT

SEQ ID NO: 43449 - protein, 395 aa, Arabidopsis thaliana
  peptide (1)..(395): Ceres Seq. ID no. 12336196
MKPVVVLMCTVLLIFWYKTTNIQYEQTEIEETDYPFEMAKESEPVSEKLKGLPFGIMQPRSDLELKPLWSSSSLRSKSGELTNRNLLAMPVGLKQKDNVDAVVKKFLPANFTVILFHYDGNMDQWWDLEWSSKAIHIVAHNQTKWWFAKRFLHPDIVSIYDYVFLWDEDLGVENFNPQKYLRIVKTAGLEISQPALHPNSTEVHHRITVRSRTKIFHRRVYDSRGNMKCSNASEGPPCTGFVEGMAPVFSRSAWFCTWNLIQNDLVHGWGMDMKLGYCAQGDRSKKVGIVDSEYIFHQGIQTLGGSGYPDKKNSARSGVNRRRGSATFDSRTEIRRQSTWELQAFKERWNQAVAEDKYWVERSSPSRNRIGNNRRLKRSSMIPSLLQRKAEETTT

SEQ ID NO: 43450 - protein, 388 aa, Arabidopsis thaliana
  peptide (1)..(388): Ceres Seq. ID no. 12336197
MCTVLLIFWYKTTNIQYEQTEIEETDYPFEMAKESEPVSEKLKGLPFGIMQPRSDLELKPLWSSSSLRSKSGELTNRNLLAMPVGLKQKDNVDAVVKKFLPANFTVILFHYDGNMDQWWDLEWSSKAIHIVAHNQTKWWFAKRFLHPDIVSIYDYVFLWDEDLGVENFNPQKYLRIVKTAGLEISQPALHPNSTEVHHRITVRSRTKIFHRRVYDSRGNMKCSNASEGPPCTGFVEGMAPVFSRSAWFCTWNLIQNDLVHGWGMDMKLGYCAQGDRSKKVGIVDSEYIFHQGIQTLGGSGYPDKKNSARSGVNRRRGSATFDSRTEIRRQSTWELQAFKERWNQAVAEDKYWVERSSPSRNRIGNNRRLKRSSMIPSLLQRKAEETTT

SEQ ID NO: 43451 - DNA, 1146 bp, Arabidopsis thaliana; identical to SEQ ID NO: 39458
  misc_feature (1)..(1146): Ceres Seq. ID no. 12489106
  misc_feature (1)..(1146): Ortholog of  Ceres SEQ ID NO 13599030 as cited in SEQ ID NO 0

SEQ ID NO: 43452 - protein, 336 aa, Arabidopsis thaliana; identical to SEQ ID NO: 39459
  peptide (1)..(336): Ceres Seq. ID no. 12489107

SEQ ID NO: 43453 - protein, 319 aa, Arabidopsis thaliana; identical to SEQ ID NO: 39460
  peptide (1)..(319): Ceres Seq. ID no. 12489108

SEQ ID NO: 43454 - DNA, 2148 bp, Arabidopsis thaliana
  misc_feature (1)..(2148): Ceres Seq. ID no. 12606243
  misc_feature (1)..(2148): Ortholog of  Ceres SEQ ID NO 14303351 as cited in SEQ ID NO 54864
  misc_feature (1)..(2148): Ortholog of  Ceres SEQ ID NO 13597260 as cited in SEQ ID NO 63885
agatcccaacggattcaaacagcaaatttgtgctttgctcttctctcttattataatatcctctcaaaaaccctctcctatatcctcctaaagccccccttccttgtttctctaccgcaacaaagaaaaaacaaaagtttgagaaaaatggtgtgttcgttgtgtaaccaatgattgggttttagcttactacttcgagagattataagaaagaaagagtgaagatacattatagaaagaagagaagcagaaaccaaaaaaagaaaccatgaagtctttttgtgataatgatgataataatcatagcaacacgactaatttgttagggttctcattgtcttcaaatatgatgaaaatgggaggtagaggaggtagagaagctatttactcatcttcaacttcttcagctgcaacttcttcttcttctgttccacctcaacttgttgttggtgacaacactagcaactttggtgtttgctatggatctaacccaaatggaggaatctattctcacatgtctgtgatgccactcagatctgatggttctctttgcttaatggaagctctcaacagatcttctcactcgaatcaccatcaagattcatctccaaaggtggaggatttctttgggacccatcacaacaacacaagtcacaaagaagccatggatcttagcttagatagtttattctacaacaccactcatgagcccaacacgactacaaactttcaagagttctttagcttccctcaaaccagaaaccatgaggaagaaactagaaattacgggaatgaccctagtttgacacatggagggtcttttaatgtaggggtatatggggaatttcaacagtcactgagcttatccatgagccctgggtcacaatctagctgcatcactggctctcaccaccaccaacaaaaccaaaaccaaaaccaccaaagccaaaaccaccagcagatctctgaagctcttgtggagacaagcgttgggtttgagacgacgacaatggcggctgcgaagaagaagaggggacaagaggatgttgtagttgttggtcagaaacagattgttcatagaaaatctatcgatacttttggacaacgaacttctcaataccgaggcgttacaagacatagatggactggtagatatgaagctcatctatgggacaatagtttcaagaaggaaggtcacagtagaaaaggaagacaagtttatctgggaggttatgatatggaggagaaagctgctcgagcatatgatcttgctgcactcaagtactggggtccctctactcacaccaatttctctgcggagaattatcagaaagagattgaagacatgaagaacatgactagacaagaatatgttgcacatttgagaaggaagagcagtggtttctctaggggtgcttccatctatagaggagtcacaagacatcaccagcatggaaggtggcaagcacggattggtagagtcgctggaaacaaagatctctaccttggaacttttggaacccaagaagaagctgcagaagcttacgatgtagcagcaattaagttccgtggcacaaatgctgtgactaactttgatatcacgaggtacgatgttgatcgtatcatgtctagtaacacactcttgtctggagagttagcgcgaaggaacaacaacagcattgtcgtcaggaatactgaagaccaaaccgctctaaatgctgttgtggaaggtggttccaacaaagaagtcagtactcccgagagactcttgagttttccggcgattttcgcgttgcctcaagttaatcaaaagatgttcggatcaaatatgggcggaaatatgagtccttggacatcaaaccctaatgctgagcttaagaccgtcgctcttactttgcctcagatgccggttttcgctgcttgggctgattcttgatcaacttcaatgactaactctggttttcttggtttagttgctaagtgttttggtttatctccggttttatccggtttgaactacaattcggtttagtttcgtcggtataaatagtatttgcttaggagcggtatatgtttcttttgagtagtattcatgtgaaacagaatgaatctctctataacatattattttaatgaatctcctttgct

SEQ ID NO: 43455 - protein, 555 aa, Arabidopsis thaliana
  peptide (1)..(555): Ceres Seq. ID no. 12606244
MKSFCDNDDNNHSNTTNLLGFSLSSNMMKMGGRGGREAIYSSSTSSAATSSSSVPPQLVVGDNTSNFGVCYGSNPNGGIYSHMSVMPLRSDGSLCLMEALNRSSHSNHHQDSSPKVEDFFGTHHNNTSHKEAMDLSLDSLFYNTTHEPNTTTNFQEFFSFPQTRNHEEETRNYGNDPSLTHGGSFNVGVYGEFQQSLSLSMSPGSQSSCITGSHHHQQNQNQNHQSQNHQQISEALVETSVGFETTTMAAAKKKRGQEDVVVVGQKQIVHRKSIDTFGQRTSQYRGVTRHRWTGRYEAHLWDNSFKKEGHSRKGRQVYLGGYDMEEKAARAYDLAALKYWGPSTHTNFSAENYQKEIEDMKNMTRQEYVAHLRRKSSGFSRGASIYRGVTRHHQHGRWQARIGRVAGNKDLYLGTFGTQEEAAEAYDVAAIKFRGTNAVTNFDITRYDVDRIMSSNTLLSGELARRNNNSIVVRNTEDQTALNAVVEGGSNKEVSTPERLLSFPAIFALPQVNQKMFGSNMGGNMSPWTSNPNAELKTVALTLPQMPVFAAWADS

SEQ ID NO: 43456 - protein, 529 aa, Arabidopsis thaliana
  peptide (1)..(529): Ceres Seq. ID no. 12606245
MMKMGGRGGREAIYSSSTSSAATSSSSVPPQLVVGDNTSNFGVCYGSNPNGGIYSHMSVMPLRSDGSLCLMEALNRSSHSNHHQDSSPKVEDFFGTHHNNTSHKEAMDLSLDSLFYNTTHEPNTTTNFQEFFSFPQTRNHEEETRNYGNDPSLTHGGSFNVGVYGEFQQSLSLSMSPGSQSSCITGSHHHQQNQNQNHQSQNHQQISEALVETSVGFETTTMAAAKKKRGQEDVVVVGQKQIVHRKSIDTFGQRTSQYRGVTRHRWTGRYEAHLWDNSFKKEGHSRKGRQVYLGGYDMEEKAARAYDLAALKYWGPSTHTNFSAENYQKEIEDMKNMTRQEYVAHLRRKSSGFSRGASIYRGVTRHHQHGRWQARIGRVAGNKDLYLGTFGTQEEAAEAYDVAAIKFRGTNAVTNFDITRYDVDRIMSSNTLLSGELARRNNNSIVVRNTEDQTALNAVVEGGSNKEVSTPERLLSFPAIFALPQVNQKMFGSNMGGNMSPWTSNPNAELKTVALTLPQMPVFAAWADS

SEQ ID NO: 43457 - protein, 528 aa, Arabidopsis thaliana
  peptide (1)..(528): Ceres Seq. ID no. 12606246
MKMGGRGGREAIYSSSTSSAATSSSSVPPQLVVGDNTSNFGVCYGSNPNGGIYSHMSVMPLRSDGSLCLMEALNRSSHSNHHQDSSPKVEDFFGTHHNNTSHKEAMDLSLDSLFYNTTHEPNTTTNFQEFFSFPQTRNHEEETRNYGNDPSLTHGGSFNVGVYGEFQQSLSLSMSPGSQSSCITGSHHHQQNQNQNHQSQNHQQISEALVETSVGFETTTMAAAKKKRGQEDVVVVGQKQIVHRKSIDTFGQRTSQYRGVTRHRWTGRYEAHLWDNSFKKEGHSRKGRQVYLGGYDMEEKAARAYDLAALKYWGPSTHTNFSAENYQKEIEDMKNMTRQEYVAHLRRKSSGFSRGASIYRGVTRHHQHGRWQARIGRVAGNKDLYLGTFGTQEEAAEAYDVAAIKFRGTNAVTNFDITRYDVDRIMSSNTLLSGELARRNNNSIVVRNTEDQTALNAVVEGGSNKEVSTPERLLSFPAIFALPQVNQKMFGSNMGGNMSPWTSNPNAELKTVALTLPQMPVFAAWADS

SEQ ID NO: 43458 - DNA, 1681 bp, Arabidopsis thaliana
  misc_feature (1)..(1681): Ceres Seq. ID no. 13647037
  misc_feature (1)..(1681): Ortholog of  Ceres SEQ ID NO 13594209 as cited in SEQ ID NO 59089
  misc_feature (1)..(1681): Ortholog of  Ceres SEQ ID NO 13502874 as cited in SEQ ID NO 66298
  misc_feature (1)..(1681): Ortholog of  Ceres SEQ ID NO 12614124 as cited in SEQ ID NO 68392
actcaaaagtagtaacaactaagaatggaagatatcatcatcggcgtggtggctctcgccgcggttctccttttcttcctctaccaaaaaccgaaaaccaaacggtacaagctacctccagggccatcaccacttccggtgatcggaaacctccttcagcttcagaagcttaacccacaacgcttcttcgctggatgggccaaaaaatacggtccaatcttgtcatacaggataggaagcagaacaatggtggtgatatcttcagctgagctagctaaagagcttctcaagacgcaagatgtcaactttgcggaccggcctccacatcgtggccatgagttcatatcctacggcaggcgtgacatggcattaaaccactacacaccgtattaccgagagataaggaagatggggatgaaccacttgttctcaccaacacgtgtggccacctttaagcatgtacgagaggaagaggctaggaggatgatggataagatcaacaaggccgcggataaatccgaagtagtcgatataagtgagcttatgttgaccttcacgaactcggttgtgtgtagacaagcgttcgggaagaagtacaatgaagatggagaagagatgaagaggttcatcaagattctttatgggactcaaagcgttttggggaagatctttttctctgattttttcccatattgtggctttcttgatgatttatcaggcctcacagcttatatgaaagagtgtttcgaaagacaagacacttatattcaagaggttgtcaatgagaccttgatcctaagagagtcaagcccgaaaccgagagcatgattgatctcttgatggggatctacaaagaacaacctttcgcttctgaatttactgtagataatgtcaaagccgtcatcttggatattgtagtggcgggaacagatactgcagctgcggcggttgtgtgggggatgacgtatctaatgaagtacccacaagtgttgaagaaagctcaagcagaagtgagagagtatatgaaagagaaaggttaacgttcgttactgaagacgatgtcaagaaccttccttacttcagagctttagttaaagaaaccctaaggatcgaaccagtgattcctctcctaatccctcgtgcttgcattcaagataccaagatcgccggttacgacatccccgcaggaacaacggtcaacgtcaacgcgtgggccgtgtcacgtgacgagaaagaatggggaccgaaccctgatgagttcaggcccgagaggtttcttgagaaggaagttgacttcaaaggcacggactacgagtttataccgttcgggtcaggccggagaatgtgcccgggaatgcgtcttggggccgcgatgcttgaggttccttatgcgaaccttctcctcagcttcaattttaaactccctaatgggatgaaaccagatgatatcaacatggatgtcatgactggtcttgctatgcacaagtcgcagcatctcaagcttgttccagagaaagtgaacaagtattagctaatatatatcaaataaatctaccttctctgattatatagtatatgttcctccaatgtattctgcttcaatgtttggtttctttcttaaatggcaatcgtctctctatctttctcttcacattttgatatgaaggaagcaaattcacat

SEQ ID NO: 43459 - protein, 267 aa, Arabidopsis thaliana
  peptide (1)..(267): Ceres Seq. ID no. 13647038
MEDIIIGVVALAAVLLFFLYQKPKTKRYKLPPGPSPLPVIGNLLQLQKLNPQRFFAGWAKKYGPILSYRIGSRTMVVISSAELAKELLKTQDVNFADRPPHRGHEFISYGRRDMALNHYTPYYREIRKMGMNHLFSPTRVATFKHVREEEARRMMDKINKAADKSEVVDISELMLTFTNSVVCRQAFGKKYNEDGEEMKRFIKILYGTQSVLGKIFFSDFFPYCGFLDDLSGLTAYMKECFERQDTYIQEVVNETLILRESSPKPRA

SEQ ID NO: 43460 - protein, 193 aa, Arabidopsis thaliana
  peptide (1)..(193): Ceres Seq. ID no. 13647039
MVVISSAELAKELLKTQDVNFADRPPHRGHEFISYGRRDMALNHYTPYYREIRKMGMNHLFSPTRVATFKHVREEEARRMMDKINKAADKSEVVDISELMLTFTNSVVCRQAFGKKYNEDGEEMKRFIKILYGTQSVLGKIFFSDFFPYCGFLDDLSGLTAYMKECFERQDTYIQEVVNETLILRESSPKPRA

SEQ ID NO: 43461 - protein, 154 aa, Arabidopsis thaliana
  peptide (1)..(154): Ceres Seq. ID no. 13647040
MALNHYTPYYREIRKMGMNHLFSPTRVATFKHVREEEARRMMDKINKAADKSEVVDISELMLTFTNSVVCRQAFGKKYNEDGEEMKRFIKILYGTQSVLGKIFFSDFFPYCGFLDDLSGLTAYMKECFERQDTYIQEVVNETLILRESSPKPRA

SEQ ID NO: 43462 - DNA, 1532 bp, Arabidopsis thaliana
  misc_feature (1)..(1532): Ceres Seq. ID no. 12395074
  misc_feature (1)..(1532): Ortholog of  Ceres SEQ ID NO 15172274 as cited in SEQ ID NO 59703
aaaaaattttacacttatgctcttcatatcacatacaacaaactcatatatataaaaactttaaccttcgtatagcaacgatctagtagaaagcttatactaaaactttctgattctcttaatatggcggaggagtttaaagctacggcatcgatttgtggtggcggaggtggcgcgtggtggaactcgccaaggagcgttatgtctccttcggatcatttcttgtcaccatgcttcggagcggctatcacttccaatgattttagctcgcaagagaatcatctcaaatctaggatgacttgtacggacaacaacaacatcgttttcgggcagcgagaggcggattctgacagtggaggaagtaccgtgacgatggactcgacgttgcagatgatgggtctagggttttcctcaaattgttcttcagattggaaccaaaccattttacaagaagacttaaactcaagcttcataaggagctcacaagatcaagatcatggccaaggattcttatccacaactacttcaccttatatacttaatccagcttgttcttcatctccatcaacttcttcgtcctcaagcttgatacgaaccttttacgatcccgaaccaagtccatacaactttgtctccaccacaagtggttcaatcaacgatcctcaactttcttgggctaataagacaaatcctcatcatcaagtagcttatggactaattaacagcttctctaacaacgcaaactctcgacccttttggaattcttcatcaaccactaacttaaacaacacgacgccgagcaattttgtaaccactccgcagataatatctactcgtttggaggacaaaaccaagaatctgaagacaagagctcagagtgagtctttgaagagagcaaaggataatgaatctgcggcgaagaaaccgagagtcaccacgccttcaccgttgccaactttcaaggtgagaaaagagaatctaagggaccagataacttcattacaacaactagtttcacctttcggaaagacagatactgcatctgttctccaagaagctatagagtacatcaagttccttcacgaccaagtcactgttctaagcactccatacatgaaacaaggtgcctcgaaccaacaacaacagcagatatctggtaaatcgaagagtcaagatgaaaatgagaatcacgaactaagaggacatggtctatgtctcgtcccaatatcaagcacgtttccggtggctaacgaaacaacagccgatttttggacaccaacgtttgggggcaacaatttcaggtgattaaagagagagggttgtggttgtcaagacggatgggaacatatgctaaattcagcttggagactctaaagcataacaataatttttaatgtattttcttcttctttcaatattttaaggggggtttattgctgaatttagcatatatgggttgtttttatgttgaataaccttttgttcctgtcattgttcttgaatatatatatatacatatttttgtcgttggt

SEQ ID NO: 43463 - protein, 393 aa, Arabidopsis thaliana
  peptide (1)..(393): Ceres Seq. ID no. 12395075
MAEEFKATASICGGGGGAWWNSPRSVMSPSDHFLSPCFGAAITSNDFSSQENHLKSRMTCTDNNNIVFGQREADSDSGGSTVTMDSTLQMMGLGFSSNCSSDWNQTILQEDLNSSFIRSSQDQDHGQGFLSTTTSPYILNPACSSSPSTSSSSSLIRTFYDPEPSPYNFVSTTSGSINDPQLSWANKTNPHHQVAYGLINSFSNNANSRPFWNSSSTTNLNNTTPSNFVTTPQIISTRLEDKTKNLKTRAQSESLKRAKDNESAAKKPRVTTPSPLPTFKVRKENLRDQITSLQQLVSPFGKTDTASVLQEAIEYIKFLHDQVTVLSTPYMKQGASNQQQQQISGKSKSQDENENHELRGHGLCLVPISSTFPVANETTADFWTPTFGGNNFR

SEQ ID NO: 43464 - protein, 367 aa, Arabidopsis thaliana
  peptide (1)..(367): Ceres Seq. ID no. 12395076
MSPSDHFLSPCFGAAITSNDFSSQENHLKSRMTCTDNNNIVFGQREADSDSGGSTVTMDSTLQMMGLGFSSNCSSDWNQTILQEDLNSSFIRSSQDQDHGQGFLSTTTSPYILNPACSSSPSTSSSSSLIRTFYDPEPSPYNFVSTTSGSINDPQLSWANKTNPHHQVAYGLINSFSNNANSRPFWNSSSTTNLNNTTPSNFVTTPQIISTRLEDKTKNLKTRAQSESLKRAKDNESAAKKPRVTTPSPLPTFKVRKENLRDQITSLQQLVSPFGKTDTASVLQEAIEYIKFLHDQVTVLSTPYMKQGASNQQQQQISGKSKSQDENENHELRGHGLCLVPISSTFPVANETTADFWTPTFGGNNFR

SEQ ID NO: 43465 - protein, 336 aa, Arabidopsis thaliana
  peptide (1)..(336): Ceres Seq. ID no. 12395077
MTCTDNNNIVFGQREADSDSGGSTVTMDSTLQMMGLGFSSNCSSDWNQTILQEDLNSSFIRSSQDQDHGQGFLSTTTSPYILNPACSSSPSTSSSSSLIRTFYDPEPSPYNFVSTTSGSINDPQLSWANKTNPHHQVAYGLINSFSNNANSRPFWNSSSTTNLNNTTPSNFVTTPQIISTRLEDKTKNLKTRAQSESLKRAKDNESAAKKPRVTTPSPLPTFKVRKENLRDQITSLQQLVSPFGKTDTASVLQEAIEYIKFLHDQVTVLSTPYMKQGASNQQQQQISGKSKSQDENENHELRGHGLCLVPISSTFPVANETTADFWTPTFGGNNFR

SEQ ID NO: 43466 - DNA, 1509 bp, Arabidopsis thaliana
  misc_feature (1)..(1509): Ceres Seq. ID no. 13646986
  misc_feature (1)..(1509): Ortholog of  Ceres SEQ ID NO 14311572 as cited in SEQ ID NO 51713
  misc_feature (1)..(1509): Ortholog of  Ceres SEQ ID NO 14308664 as cited in SEQ ID NO 55450
  misc_feature (1)..(1509): Ortholog of  Ceres SEQ ID NO 15226673 as cited in SEQ ID NO 66997
  misc_feature (1)..(1509): Ortholog of  Ceres SEQ ID NO 14302998 as cited in SEQ ID NO 67440
ttcctttctcttcctctctctctctcttcaccatgactgatccttattccaatttcttcacagactggttcaagtctaatccttttcaccattaccctaattcctccactaacccctctcctcatcctcttcctcctgttactcctccctcttccttcttcttcttccctcaatccggagacctccgccgtccaccgccgccaccaactcctcctccttctcctcctctccgagaagccctccctctcctcagcctcagccccgccaacaaacaacaagaccaccatcacaaccatgaccaccttattcaagaaccaccttcaacctccatggatgtcgactacgatcatcaccatcaagatgatcatcataacctcgatgacgatgaccatgacgtcaccgttgctcttcacataggccttccaagccctagtgctcaagagatggcctctttgctcatgatgtcttcttcttcctcttcctcgaggaccactcatcatcacgaggacatgaatcacaagaaagacctcgaccatgagtacagccacggagctgtcggaggaggagaagatgacgatgaagattcagtcggcggagacggcggctgtagaatcagcagactcaacaagggtcaatattggatccctacaccttctcagattctcattggccctactcagttctcatgtcctgtttgcttcaaaaccttcaacagatacaataacatgcagatgcatatgtggggacatggatcacaatacagaaaaggacctgaatctctaaggggaacacaaccaacaggaatgctaaggcttccgtgctattgctgcgccccaggctgtcgcaacaacattgaccatccaagggcaaagcctctcaaagacttcagaacccttcaaacacattacaagagaaaacatgggatcaaacctttcatgtgtaggaaatgtggaaaggctttcgcagtccgaggggactggagaacacatgagaagaattgtggcaaactttggtattgcatatgtggatctgatttcaagcacaagagatctctcaaagatcacatcaaggcttttgggaatggtcatggagcctacggaattgatgggtttgatgaagaagatgagcctgcctctgaggtagaacaattagacaatgatcatgagtcaatgcagtctaaatagcttatatatattactataagtactaagtaattcggtatatatattaattataagaaacctaaatctatggaccaagttttgatggaggtagggcttttcaaactaaaagctatatcatctaattgatcataggaaaaaaatgaatcaagagcacttggaaaattttaaattgtatctttagcttcctagttaaatttattgcaagacaatgtagcagtctaaccaatgaggttcccaacggtttatttctatttgtatattattttgtcattagcttcacctttcgttaattcgaaggacataacttataaatgtttaaattatg

SEQ ID NO: 43467 - protein, 393 aa, Arabidopsis thaliana
  peptide (1)..(393): Ceres Seq. ID no. 13646987
PFSSSLSLFTMTDPYSNFFTDWFKSNPFHHYPNSSTNPSPHPLPPVTPPSSFFFFPQSGDLRRPPPPPTPPPSPPLREALPLLSLSPANKQQDHHHNHDHLIQEPPSTSMDVDYDHHHQDDHHNLDDDDHDVTVALHIGLPSPSAQEMASLLMMSSSSSSSRTTHHHEDMNHKKDLDHEYSHGAVGGGEDDDEDSVGGDGGCRISRLNKGQYWIPTPSQILIGPTQFSCPVCFKTFNRYNNMQMHMWGHGSQYRKGPESLRGTQPTGMLRLPCYCCAPGCRNNIDHPRAKPLKDFRTLQTHYKRKHGIKPFMCRKCGKAFAVRGDWRTHEKNCGKLWYCICGSDFKHKRSLKDHIKAFGNGHGAYGIDGFDEEDEPASEVEQLDNDHESMQSK

SEQ ID NO: 43468 - protein, 383 aa, Arabidopsis thaliana
  peptide (1)..(383): Ceres Seq. ID no. 13646988
MTDPYSNFFTDWFKSNPFHHYPNSSTNPSPHPLPPVTPPSSFFFFPQSGDLRRPPPPPTPPPSPPLREALPLLSLSPANKQQDHHHNHDHLIQEPPSTSMDVDYDHHHQDDHHNLDDDDHDVTVALHIGLPSPSAQEMASLLMMSSSSSSSRTTHHHEDMNHKKDLDHEYSHGAVGGGEDDDEDSVGGDGGCRISRLNKGQYWIPTPSQILIGPTQFSCPVCFKTFNRYNNMQMHMWGHGSQYRKGPESLRGTQPTGMLRLPCYCCAPGCRNNIDHPRAKPLKDFRTLQTHYKRKHGIKPFMCRKCGKAFAVRGDWRTHEKNCGKLWYCICGSDFKHKRSLKDHIKAFGNGHGAYGIDGFDEEDEPASEVEQLDNDHESMQSK

SEQ ID NO: 43469 - protein, 284 aa, Arabidopsis thaliana
  peptide (1)..(284): Ceres Seq. ID no. 13646989
MDVDYDHHHQDDHHNLDDDDHDVTVALHIGLPSPSAQEMASLLMMSSSSSSSRTTHHHEDMNHKKDLDHEYSHGAVGGGEDDDEDSVGGDGGCRISRLNKGQYWIPTPSQILIGPTQFSCPVCFKTFNRYNNMQMHMWGHGSQYRKGPESLRGTQPTGMLRLPCYCCAPGCRNNIDHPRAKPLKDFRTLQTHYKRKHGIKPFMCRKCGKAFAVRGDWRTHEKNCGKLWYCICGSDFKHKRSLKDHIKAFGNGHGAYGIDGFDEEDEPASEVEQLDNDHESMQSK

SEQ ID NO: 43470 - DNA, 1403 bp, Arabidopsis thaliana
  misc_feature (1)..(1403): Ceres Seq. ID no. 13504828
  misc_feature (1)..(1403): Ortholog of  Ceres SEQ ID NO 14310823 as cited in SEQ ID NO 53842
  misc_feature (1)..(1403): Ortholog of  Ceres SEQ ID NO 13586843 as cited in SEQ ID NO 0
aaagaaacaaaacccatacaaaaaaagtcgaatccaaatctctctctccggcgatctcatccatggcggaaggcggcgaagattcccagcggttgaagaaaattgcggcggctgccttcgactacgaaaacgacgctcgatgggccgattactggtccaatatcctcatccctcctcacatggcttctcgtcccgaggtcgtcgaccatttcaagcgcaaattctaccaacgctacatcgatcctgatcttgttgtggagcctatgtcgacttcatcttcgtcttcacaatctgccaggccaactgctacatctgcatcttcaactgcatcttctaatgcaaatgaacaagttcgttcacggaactcaggatcggttcctcgaacctctgggccatctgctacgactggtgcaaccccaagttcaatgcgctgggatgagcagacgattcagttttcagtcaatgcttgggtttttgttatagctgtgctggcagtgctacctctaataccaaagaacctctcaaatagggcttatcgtctatctttcatgggaactgcatgctcatctctatattccttatactccttatacgggaggccaagggcatggaatatgcaagggctgcaagtttattttcaatcaattgtggcagcaaaggatttcatctacttcatctactgccttacattcgtcacttcacatctctgtctcaagtttgctttgattcccatcttgtgccgggcacttgaacaagtagccaagttcttgaggcgtaactttggtcggtccactatatacagaaagtacttggaagacccttgtgtgtgggtggagtcaaacactactaccctcaacatcttgtcatcgcaggctgagatagccattggcttccttctgattatctctctgctctcatggcaacgtaacattatacagacgttcatgtactggcagctattgaagctgatgtatcaagcaccggtaacagctggttaccaccagagcacgtggagcagaatagggaggacggtgactccgattatccaacgttacgctcctttcttgaatactccggtcagtgccgttcagagatggtggttcaggtgataaaaagaaacaaaatgcagaggtgacttttgaaacccttttgaaaaaccagaagattgattaaatagctttcaacaatccatgttaatttcatattcagcgtaaagtagattcttcttctcttttaacgttttcctttggctatcgctgaaataaaaatctcttattacttttggtttctagtttagttatatgtgactaattgcctttccagtttccaccttgccattttcattggtgagatacttcaaaagtttctaaaaaaataataataataatattttattatgattt

SEQ ID NO: 43471 - protein, 368 aa, Arabidopsis thaliana
  peptide (1)..(368): Ceres Seq. ID no. 13504829
RNKTHTKKVESKSLSPAISSMAEGGEDSQRLKKIAAAAFDYENDARWADYWSNILIPPHMASRPEVVDHFKRKFYQRYIDPDLVVEPMSTSSSSSQSARPTATSASSTASSNANEQVRSRNSGSVPRTSGPSATTGATPSSMRWDEQTIQFSVNAWVFVIAVLAVLPLIPKNLSNRAYRLSFMGTACSSLYSLYSLYGRPRAWNMQGLQVYFQSIVAAKDFIYFIYCLTFVTSHLCLKFALIPILCRALEQVAKFLRRNFGRSTIYRKYLEDPCVWVESNTTTLNILSSQAEIAIGFLLIISLLSWQRNIIQTFMYWQLLKLMYQAPVTAGYHQSTWSRIGRTVTPIIQRYAPFLNTPVSAVQRWWFR

SEQ ID NO: 43472 - protein, 348 aa, Arabidopsis thaliana
  peptide (1)..(348): Ceres Seq. ID no. 13504830
MAEGGEDSQRLKKIAAAAFDYENDARWADYWSNILIPPHMASRPEVVDHFKRKFYQRYIDPDLVVEPMSTSSSSSQSARPTATSASSTASSNANEQVRSRNSGSVPRTSGPSATTGATPSSMRWDEQTIQFSVNAWVFVIAVLAVLPLIPKNLSNRAYRLSFMGTACSSLYSLYSLYGRPRAWNMQGLQVYFQSIVAAKDFIYFIYCLTFVTSHLCLKFALIPILCRALEQVAKFLRRNFGRSTIYRKYLEDPCVWVESNTTTLNILSSQAEIAIGFLLIISLLSWQRNIIQTFMYWQLLKLMYQAPVTAGYHQSTWSRIGRTVTPIIQRYAPFLNTPVSAVQRWWFR

SEQ ID NO: 43473 - protein, 309 aa, Arabidopsis thaliana
  peptide (1)..(309): Ceres Seq. ID no. 13504831
MASRPEVVDHFKRKFYQRYIDPDLVVEPMSTSSSSSQSARPTATSASSTASSNANEQVRSRNSGSVPRTSGPSATTGATPSSMRWDEQTIQFSVNAWVFVIAVLAVLPLIPKNLSNRAYRLSFMGTACSSLYSLYSLYGRPRAWNMQGLQVYFQSIVAAKDFIYFIYCLTFVTSHLCLKFALIPILCRALEQVAKFLRRNFGRSTIYRKYLEDPCVWVESNTTTLNILSSQAEIAIGFLLIISLLSWQRNIIQTFMYWQLLKLMYQAPVTAGYHQSTWSRIGRTVTPIIQRYAPFLNTPVSAVQRWWFR

SEQ ID NO: 43474 - DNA, 1359 bp, Arabidopsis thaliana
  misc_feature (1)..(1359): Ceres Seq. ID no. 13500042
  misc_feature (1)..(1359): Ortholog of  Ceres SEQ ID NO 13596891 as cited in SEQ ID NO 62868
  misc_feature (1)..(1359): Ortholog of  Ceres SEQ ID NO 12617235 as cited in SEQ ID NO 63990
  misc_feature (1)..(1359): Ortholog of  Ceres SEQ ID NO 13655371 as cited in SEQ ID NO 68945
aaaaacgctcgaaagagtttaaaaattgtgaacatattgtgatgaatcatcatgagcagtgacttcatacttgatattacgagtgagaggccactataaaaagcaggcgcgtcctcgaagaagaagaagaagtaacaaattggtggaaatcagaagttgaatcggagaataacaacgatgacgacgaacaagcaggtcatattcaaagaccacgtgagtggtttccctaaggaatccgatttcaatttcaccaccaccaccgtcgaacttagggttccggaaggttctaaatcggttcttgtgaagaatctctacctgtcatgcgatccttatatgcggtctcgcatggggaaacctgatccctcctctgctcttgctcaagcttacgctcccggcaagccaatctatgggtatggagtgtctagagtgatagaatctgggcatccagattacaagaaaggtgatttactctggggaatagttggatgggaggagtatagtgttattacaccaatggctcacatgcatttcaagatccaacatacagatgttccattatcctactatactggacttctcggtatgcctggtatgactgcctatgctgggttttatgaagtttgttctccaaagaaaggagagacagtttatgtgtcagctgcatctggtgcggttggtcagcttgtgggacaatttgctaagatgatgggctgttatgttgttggaagcgctggaagtaaagaaaaggttgatctcctgaagaccaagtttgggtttgatgatgcatttaactacaaggaagaatctgaccttagtgctgccctcaaaaggtgttttcccaagggcatcgacatgtactttgagaacgtaggaggcaaaatgctagatgcagtgctcttaaacatgaacccacacgggcgtatcgctgtctgtggaatgatctcacagtacaatcttgaaaatcaagaaggtgtacacaacctatccaatatcatctacaaacgaatacgcattcaaggctttgtagtggctgatttctacgacaaatacccaaagttcttggagttggtgcttccgcgcattaaagaagggaagataacgtatgtggaagatgtagctgatgggctcgagaaagctcctgaagctcttgtggggcttttccatggtaagaacgttgggaaacaagttgttgttattgctcgtgagtgaagaatacttatttgggagtaatgtcttattgcgcgtgagtgaagaatacttatttgggagaaatgttatatttatccaacaagagttggtatgtctgttgaacccaaccgtgagtttttggtttatgaataatactagtaactataatat

SEQ ID NO: 43475 - protein, 343 aa, Arabidopsis thaliana
  peptide (1)..(343): Ceres Seq. ID no. 13500043
MTTNKQVIFKDHVSGFPKESDFNFTTTTVELRVPEGSKSVLVKNLYLSCDPYMRSRMGKPDPSSALAQAYAPGKPIYGYGVSRVIESGHPDYKKGDLLWGIVGWEEYSVITPMAHMHFKIQHTDVPLSYYTGLLGMPGMTAYAGFYEVCSPKKGETVYVSAASGAVGQLVGQFAKMMGCYVVGSAGSKEKVDLLKTKFGFDDAFNYKEESDLSAALKRCFPKGIDMYFENVGGKMLDAVLLNMNPHGRIAVCGMISQYNLENQEGVHNLSNIIYKRIRIQGFVVADFYDKYPKFLELVLPRIKEGKITYVEDVADGLEKAPEALVGLFHGKNVGKQVVVIARE

SEQ ID NO: 43476 - protein, 291 aa, Arabidopsis thaliana
  peptide (1)..(291): Ceres Seq. ID no. 13500044
MRSRMGKPDPSSALAQAYAPGKPIYGYGVSRVIESGHPDYKKGDLLWGIVGWEEYSVITPMAHMHFKIQHTDVPLSYYTGLLGMPGMTAYAGFYEVCSPKKGETVYVSAASGAVGQLVGQFAKMMGCYVVGSAGSKEKVDLLKTKFGFDDAFNYKEESDLSAALKRCFPKGIDMYFENVGGKMLDAVLLNMNPHGRIAVCGMISQYNLENQEGVHNLSNIIYKRIRIQGFVVADFYDKYPKFLELVLPRIKEGKITYVEDVADGLEKAPEALVGLFHGKNVGKQVVVIARE

SEQ ID NO: 43477 - protein, 287 aa, Arabidopsis thaliana
  peptide (1)..(287): Ceres Seq. ID no. 13500045
MGKPDPSSALAQAYAPGKPIYGYGVSRVIESGHPDYKKGDLLWGIVGWEEYSVITPMAHMHFKIQHTDVPLSYYTGLLGMPGMTAYAGFYEVCSPKKGETVYVSAASGAVGQLVGQFAKMMGCYVVGSAGSKEKVDLLKTKFGFDDAFNYKEESDLSAALKRCFPKGIDMYFENVGGKMLDAVLLNMNPHGRIAVCGMISQYNLENQEGVHNLSNIIYKRIRIQGFVVADFYDKYPKFLELVLPRIKEGKITYVEDVADGLEKAPEALVGLFHGKNVGKQVVVIARE

SEQ ID NO: 43478 - DNA, 1490 bp, Arabidopsis thaliana
  misc_feature (1)..(1490): Ceres Seq. ID no. 13489567
  misc_feature (1)..(1490): Ortholog of  Ceres SEQ ID NO 13654468 as cited in SEQ ID NO 68094
tccacgttctcagagttagttacacagctttcaacgatgaatcagctcgcgctttcaagatccggttacaccgccgccgtgaggtttctccctatgctttccgcagctgttccgaagatcttatcatctctcgccgccgcatccaccgtccgcaacttcagctctaccggaagtcctctcaccagctaccaaatcaataaaccttcgccgtcaaaatccttcacttccaggcttctccaccaatcctcctccgccggtactcctccgcaacaacttttcggcgcccgtagcttctcatctcccagcagtgatttcaacagctaccacattaatccgccgtctaactggggaatccgaatcgtgccggagaggaaagcttgtgtgattgagcggtttggtaaattccacacgactttgccggcggggattcacttccttgttccgtttgtggatcgtatcgcttatgttcattctctaaaggaagaagcgattcctattggtaatcagactgcgattacaaaggataacgttagcatccacatcgatggtgttctctacgttaagattgtggatcctaagttggcttcttatggcgttgagaatccgatctatgctgttatgcagttggctcagactacaatgcgtagtgagctcggtaaaattactcttgacaagacttttgaggaacgggacactctcaatgagaagattgtggaagccatcaatgttgctgcaaaagattggggtcttcagtgccttcgttatgagatcagggatatcatgcctcctaatggagtgagagttgctatggaaatgcaagctgaagctgaacgtaaaaagagagcccagattcttgagtctgaaggagaacgtcaagcccatatcaatagagctgatggtaagaaaagttctgtaatcttggaatcagaagctgcaatgatggaccaagtcaatcgtgcacaaggtgaggctgaagcaatattagctagagcacaagcaacagccaagggactggccatggtatctcaatccctcaaggaagctggtggagaggaggctgcgagtttgagagttgcggagcaatacattcaagcttttggcaaaattgctaaggagggtacaacaatgctgcttccgagtaatgtcgacaatcctgctagcatgatcgctcaagctttaggaatgtacaaagggttgtcaacaaaggtcccaacagtggtttcagggaaacttctggagtagaatcctctactaacgtggttgttgccaaacttgaatagaagctataatgtagctgaacctagggaacaactattcttttgatttgtccaggctttttagccattttcagtttgtttatttcttcatatgagaaacagttatcttaccatataaccattttgcaaactagaaaacagatctaatctcaaatttctgacagagtttttgcaccagatttggtcttctaagtgttggctcttgttatcttt

SEQ ID NO: 43479 - protein, 413 aa, Arabidopsis thaliana
  peptide (1)..(413): Ceres Seq. ID no. 13489568
STFSELVTQLSTMNQLALSRSGYTAAVRFLPMLSAAVPKILSSLAAASTVRNFSSTGSPLTSYQINKPSPSKSFTSRLLHQSSSAGTPPQQLFGARSFSSPSSDFNSYHINPPSNWGIRIVPERKACVIERFGKFHTTLPAGIHFLVPFVDRIAYVHSLKEEAIPIGNQTAITKDNVSIHIDGVLYVKIVDPKLASYGVENPIYAVMQLAQTTMRSELGKITLDKTFEERDTLNEKIVEAINVAAKDWGLQCLRYEIRDIMPPNGVRVAMEMQAEAERKKRAQILESEGERQAHINRADGKKSSVILESEAAMMDQVNRAQGEAEAILARAQATAKGLAMVSQSLKEAGGEEAASLRVAEQYIQAFGKIAKEGTTMLLPSNVDNPASMIAQALGMYKGLSTKVPTVVSGKLLE

SEQ ID NO: 43480 - protein, 401 aa, Arabidopsis thaliana
  peptide (1)..(401): Ceres Seq. ID no. 13489569
MNQLALSRSGYTAAVRFLPMLSAAVPKILSSLAAASTVRNFSSTGSPLTSYQINKPSPSKSFTSRLLHQSSSAGTPPQQLFGARSFSSPSSDFNSYHINPPSNWGIRIVPERKACVIERFGKFHTTLPAGIHFLVPFVDRIAYVHSLKEEAIPIGNQTAITKDNVSIHIDGVLYVKIVDPKLASYGVENPIYAVMQLAQTTMRSELGKITLDKTFEERDTLNEKIVEAINVAAKDWGLQCLRYEIRDIMPPNGVRVAMEMQAEAERKKRAQILESEGERQAHINRADGKKSSVILESEAAMMDQVNRAQGEAEAILARAQATAKGLAMVSQSLKEAGGEEAASLRVAEQYIQAFGKIAKEGTTMLLPSNVDNPASMIAQALGMYKGLSTKVPTVVSGKLLE

SEQ ID NO: 43481 - protein, 382 aa, Arabidopsis thaliana
  peptide (1)..(382): Ceres Seq. ID no. 13489570
MLSAAVPKILSSLAAASTVRNFSSTGSPLTSYQINKPSPSKSFTSRLLHQSSSAGTPPQQLFGARSFSSPSSDFNSYHINPPSNWGIRIVPERKACVIERFGKFHTTLPAGIHFLVPFVDRIAYVHSLKEEAIPIGNQTAITKDNVSIHIDGVLYVKIVDPKLASYGVENPIYAVMQLAQTTMRSELGKITLDKTFEERDTLNEKIVEAINVAAKDWGLQCLRYEIRDIMPPNGVRVAMEMQAEAERKKRAQILESEGERQAHINRADGKKSSVILESEAAMMDQVNRAQGEAEAILARAQATAKGLAMVSQSLKEAGGEEAASLRVAEQYIQAFGKIAKEGTTMLLPSNVDNPASMIAQALGMYKGLSTKVPTVVSGKLLE

SEQ ID NO: 43482 - DNA, 1353 bp, Arabidopsis thaliana
  misc_feature (1)..(1353): Ceres Seq. ID no. 12395048
  misc_feature (1)..(1353): Ortholog of  Ceres SEQ ID NO 13582619 as cited in SEQ ID NO 56520
  misc_feature (1)..(1353): Ortholog of  Ceres SEQ ID NO 13660872 as cited in SEQ ID NO 60830
  misc_feature (1)..(1353): Ortholog of  Ceres SEQ ID NO 12616221 as cited in SEQ ID NO 63291
caaatgatcccaataattattcttctctttatctctcttttcctcttaaccatccactaatcaaacactaaaacctagaaaaaaaaaggatcaaatcatggagacggaagaagagatgaaggaaagtagtataagcatggtggaggcaaagttgcctccgggattcagatttcacccgaaggacgatgagcttgtctgcgattacttgatgagacgatcgcttcacaataatcatcgaccacctcttgtcctgatccaagtcgatctcaacaagtgtgagccttgggacatcccaaaaatggcatgcgtgggagggaaggattggtatttctacagccaaagagaccgaaaatacgcgacggggctgagaactaaccgagcaacggccaccggatattggaaagccaccggcaaagacagaaccattctaagaaagggtaagctagttgggatgaggaagacattggttttctatcaaggtcgagctcctcgaggccgtaaaaccgattgggtcatgcacgaattccgtctccaaggatctcatcatcctcccaatcattctctgagctctccaaaggaagactgggtcttgtgtagggtattccataagaatacggaaggagttatatgtagagacaacatgggaagctgttttgatgagacagcctctgcatcgcttcctccactgatggatccttacatcaactttgaccaagaaccctcttcttatctcagtgatgatcatcactacatcatcaatgagcacgtaccctgcttctccaatttgtcacagaaccaaaccttaaactcgaacctaaccaactcagtctctgaactcaagattccatgcaagaaccctaaccccttgtttactggtggttcagcctcagccacgctcacaggcctcgactcattctgttcttcagatcagatggttctcagagctctactcagtcagctcactaagattgatggaagcctcgggcctaaagaatcacagagttatggagaaggtagctcggagagcctcctgaccgacatcggtattccaagcactgtttggaattgctgatgatcgagtgtaacgagagttactattgctatattcctatccatgattggaacaattcttcggggggaaataacgtgtgcttgtctgattgtacaaacatttcctcactcttgtacccacggtagattcatgtaaaataccacttatgacgctagacatacatatatttcatcgtagttccatttgtttcaaggtattaaggacctctagaacaattgatcaaaaagataatatgaaacatcactacctgtgtacatgatgggataggtgattgaatagcc

SEQ ID NO: 43483 - protein, 324 aa, Arabidopsis thaliana
  peptide (1)..(324): Ceres Seq. ID no. 12395049
METEEEMKESSISMVEAKLPPGFRFHPKDDELVCDYLMRRSLHNNHRPPLVLIQVDLNKCEPWDIPKMACVGGKDWYFYSQRDRKYATGLRTNRATATGYWKATGKDRTILRKGKLVGMRKTLVFYQGRAPRGRKTDWVMHEFRLQGSHHPPNHSLSSPKEDWVLCRVFHKNTEGVICRDNMGSCFDETASASLPPLMDPYINFDQEPSSYLSDDHHYIINEHVPCFSNLSQNQTLNSNLTNSVSELKIPCKNPNPLFTGGSASATLTGLDSFCSSDQMVLRALLSQLTKIDGSLGPKESQSYGEGSSESLLTDIGIPSTVWNC

SEQ ID NO: 43484 - protein, 318 aa, Arabidopsis thaliana
  peptide (1)..(318): Ceres Seq. ID no. 12395050
MKESSISMVEAKLPPGFRFHPKDDELVCDYLMRRSLHNNHRPPLVLIQVDLNKCEPWDIPKMACVGGKDWYFYSQRDRKYATGLRTNRATATGYWKATGKDRTILRKGKLVGMRKTLVFYQGRAPRGRKTDWVMHEFRLQGSHHPPNHSLSSPKEDWVLCRVFHKNTEGVICRDNMGSCFDETASASLPPLMDPYINFDQEPSSYLSDDHHYIINEHVPCFSNLSQNQTLNSNLTNSVSELKIPCKNPNPLFTGGSASATLTGLDSFCSSDQMVLRALLSQLTKIDGSLGPKESQSYGEGSSESLLTDIGIPSTVWNC

SEQ ID NO: 43485 - protein, 311 aa, Arabidopsis thaliana
  peptide (1)..(311): Ceres Seq. ID no. 12395051
MVEAKLPPGFRFHPKDDELVCDYLMRRSLHNNHRPPLVLIQVDLNKCEPWDIPKMACVGGKDWYFYSQRDRKYATGLRTNRATATGYWKATGKDRTILRKGKLVGMRKTLVFYQGRAPRGRKTDWVMHEFRLQGSHHPPNHSLSSPKEDWVLCRVFHKNTEGVICRDNMGSCFDETASASLPPLMDPYINFDQEPSSYLSDDHHYIINEHVPCFSNLSQNQTLNSNLTNSVSELKIPCKNPNPLFTGGSASATLTGLDSFCSSDQMVLRALLSQLTKIDGSLGPKESQSYGEGSSESLLTDIGIPSTVWNC

SEQ ID NO: 43486 - DNA, 1191 bp, Arabidopsis thaliana
  misc_feature (1)..(1191): Ceres Seq. ID no. 12331021
  misc_feature (1)..(1191): Ortholog of  Ceres SEQ ID NO 13597757 as cited in SEQ ID NO 65472
gcacagccaaaccccccccaattttggcctctcgatttagttttttgaaaccctaagctcgatttcgatcctccggcatactcggtttcgccgccgaatctctgcttgtagcgagtgttactattcaatcggcgagaatgtcgatgtcgaagagttcaaaaatgcttcagttcatcaactacaggatgcgagtgacgatccaagacggaagacagctcgttgggaagttcatggcgtttgaccgtcacatgaacctcgttctcggcgattgcgaggagtttcgtaagcttccaccagctaaagggaagaagatcaacgaagagcgtgaagatcgccgtacgctaggtttagtgttgcttagaggtgaagaagttatctcaatgactgtcgaaggaccacctcctcctgaagaatctcgtgctaaagctggctcagcagctgctgttgctggtccaggaattggccgtgccgctgggcgtggagttcctactggtccgttagttcaagctcagcctggtttatctggtcctgttcgtggtgttggtggacctgctccgggaatgatgcagcctcagatctctcgtccaccacagctttcagctcctccgattattcgacctccgggacagatgttgccaccgcctccttttggtggtcaaggtcctcctatgggaagaggtcctccaccgccttatggtatgaggccaccgccacagcagttttctggaccaccaccgcctcagtatgggcaaaggccaatgattcctcctcctggtggtatgatgagaggacctcctcctccacttcatggaatgcaaggacctcctccgcctcgccctggaatgcctcctgctcctggtggttttgctccaccgcgtcctggcatgccaccacataatcagcagcagtgattaggttagcagtgaatgaacaggactcttgtctcggctttttactgtttttgtcgctgttttcttgagattatgaaggctttaagatgtttgattgaacttcctcaggtttacggtatcgtgctatcatgttgcctttcattgactttagccgcaatttctcatctatcttagctttcaaagtttgtagatttgttgacgagtgagttgtctttgccttatcttcttgtgttttcttttaagaacgaatccattaaactttgttatgacttcttaaggc

SEQ ID NO: 43487 - protein, 257 aa, Arabidopsis thaliana
  peptide (1)..(257): Ceres Seq. ID no. 12331022
MSMSKSSKMLQFINYRMRVTIQDGRQLVGKFMAFDRHMNLVLGDCEEFRKLPPAKGKKINEEREDRRTLGLVLLRGEEVISMTVEGPPPPEESRAKAGSAAAVAGPGIGRAAGRGVPTGPLVQAQPGLSGPVRGVGGPAPGMMQPQISRPPQLSAPPIIRPPGQMLPPPPFGGQGPPMGRGPPPPYGMRPPPQQFSGPPPPQYGQRPMIPPPGGMMRGPPPPLHGMQGPPPPRPGMPPAPGGFAPPRPGMPPHNQQQ

SEQ ID NO: 43488 - protein, 255 aa, Arabidopsis thaliana
  peptide (1)..(255): Ceres Seq. ID no. 12331023
MSKSSKMLQFINYRMRVTIQDGRQLVGKFMAFDRHMNLVLGDCEEFRKLPPAKGKKINEEREDRRTLGLVLLRGEEVISMTVEGPPPPEESRAKAGSAAAVAGPGIGRAAGRGVPTGPLVQAQPGLSGPVRGVGGPAPGMMQPQISRPPQLSAPPIIRPPGQMLPPPPFGGQGPPMGRGPPPPYGMRPPPQQFSGPPPPQYGQRPMIPPPGGMMRGPPPPLHGMQGPPPPRPGMPPAPGGFAPPRPGMPPHNQQQ

SEQ ID NO: 43489 - protein, 249 aa, Arabidopsis thaliana
  peptide (1)..(249): Ceres Seq. ID no. 12331024
MLQFINYRMRVTIQDGRQLVGKFMAFDRHMNLVLGDCEEFRKLPPAKGKKINEEREDRRTLGLVLLRGEEVISMTVEGPPPPEESRAKAGSAAAVAGPGIGRAAGRGVPTGPLVQAQPGLSGPVRGVGGPAPGMMQPQISRPPQLSAPPIIRPPGQMLPPPPFGGQGPPMGRGPPPPYGMRPPPQQFSGPPPPQYGQRPMIPPPGGMMRGPPPPLHGMQGPPPPRPGMPPAPGGFAPPRPGMPPHNQQQ

SEQ ID NO: 43490 - DNA, 1827 bp, Arabidopsis thaliana
  misc_feature (1)..(1827): Ceres Seq. ID no. 12331099
  misc_feature (1)..(1827): Ortholog of  Ceres SEQ ID NO 13594494 as cited in SEQ ID NO 51293
  misc_feature (1)..(1827): Ortholog of  Ceres SEQ ID NO 12598249 as cited in SEQ ID NO 61073
  misc_feature (1)..(1827): Ortholog of  Ceres SEQ ID NO 13582815 as cited in SEQ ID NO 68106
aaatttcgtttcgacatatttcgcgattcgtctaaggtaaaaaaaaactctcatctttttttcttttagatcgttaatttttgatcagcgattcgaaattctgatctgtgttctttgagcttgtcttatctcttgattcgatctgctgaaaacctagaaattttttattcttttgtttgagtatgagtatatttacgattttaacaaaaaaatatatatatgaattgaggttttttatttagcgaattgggttttaattgttcacattcgtttggctctctcgaggtgagtgataaagtatagaactttcttatgcttaggatcttaaatttgagttctttgattaaccctgtcatgtgttattaattgatctcatttatattggtttatgaaatttgattgggtttaatgaacattgatctgtgacctaatcgatgattgataacattgctggttcatctgatttctcatctggtgtgtctgctcgatcctctgaagaaagtttgaaactcaggcttggtttgtgcagattgattgatttatctcattacttgactatggtgtgcttgattctttgatgaaagcttgaagttaatgtttggtttgtgcaatatgattgggattaactgcatttgatatctgaccaaaatcaatgataaattacattgcttggttatcttattacttaagtttggtgttcctgcatgatcccctgagcttgaagttcatgcttggtttgtccaattgtgacctaaattgatgttttcttgtggtatcttttcgtaggttttgttactgattgagaaaacatgggaggtgacaatgataatgacaaagacaaagggtttcatgggtatcctcccgctggatacccaccccctggggcttatccacccgctggatacccacaacaaggttaccctccaccacccggtgcttacccgcctgcaggttatcctccgggtgcctacccacctgcacctggtggttatcctccagcccctggttatggtggttatcctccagctcctggttatggaggttatcctcctgcacctggtcatggtggttaccctcctgctggctatcctgctcatcactcaggtactgtgtttcttttgctaatggtttttttctcccatgtagtttgccagttaagtgttgtaatggtcactgtacaaacaagttaaaataggagaagttgtttatatgttgttttgtgattgtctgtatgttcattgctaaaatctgagatttagtatcatatttggtgttaaatgtcactttggtttctttattcatgctgttatttatacttgtttcaggacacgcaggaggaattgggggtatgattgcaggtgctgcagctgcctatggagctcaccacgtagctcatagctctcacggtccttacggacatgctgcatatggtcacggttttggccatggtcatggctatggctatggtcatggtcatggtaagttcaagcatgggaagcacgggaagttcaagcatgggaagcatggaatgtttggaggaggcaagttcaagaagtggaagtgatctagttaataccttttgtgaatctgtctggactgaccaatgtttcaaataagccctaaacattatataagttgactttcgtcggttagattgctggttcgagttggaataattgaaacttaattagtatcaaatcttattgtgtactttaaagctatcgttggctttataatgatagattctggtttcggtgtgttgttttaagatttttgtataaactgatttttacattgcttaagcttatagaagtcatgattatgatc

SEQ ID NO: 43491 - protein, 126 aa, Arabidopsis thaliana
  peptide (1)..(126): Ceres Seq. ID no. 12331100
MGGDNDNDKDKGFHGYPPAGYPPPGAYPPAGYPQQGYPPPPGAYPPAGYPPGAYPPAPGGYPPAPGYGGYPPAPGYGGYPPAPGHGGYPPAGYPAHHSGTVFLLLMVFFSHVVCQLSVVMVTVQTS

SEQ ID NO: 43492 - protein, 100 aa, Arabidopsis thaliana
  peptide (1)..(100): Ceres Seq. ID no. 12331101
MIMTKTKGFMGILPLDTHPLGLIHPLDTHNKVTLHHPVLTRLQVILRVPTHLHLVVILQPLVMVVILQLLVMEVILLHLVMVVTLLLAILLITQVLCFFC

SEQ ID NO: 43493 - protein, 98 aa, Arabidopsis thaliana
  peptide (1)..(98): Ceres Seq. ID no. 12331102
MTKTKGFMGILPLDTHPLGLIHPLDTHNKVTLHHPVLTRLQVILRVPTHLHLVVILQPLVMVVILQLLVMEVILLHLVMVVTLLLAILLITQVLCFFC

SEQ ID NO: 43494 - DNA, 511 bp, Arabidopsis thaliana
  misc_feature (1)..(511): Ceres Seq. ID no. 12579960
  misc_feature (1)..(511): Ortholog of  Ceres SEQ ID NO 12476115 as cited in SEQ ID NO 107
catcctaatcgaaaaacagtctgcacacttatcacttctttcgaaatctctctctatccctctcaaaaatgaagctctctgtgcgttttatctccgctgctcttctcttgttcatggtattcattgccacagggatgggtccagtcaccgtggaggcacgcacgtgtgagtcaaaaagccataggttcaagggtccatgtgtgagcacacacaactgtgcaaacgtgtgccacaacgaaggcttcggcggaggtaaatgccgtggattccgtcgtcgttgctactgcacaagacactgctgatccatccattctcatgactcaaatcttcgatccatcgtcagtgtgttacttctttcttatctaaatcttccgtacggtaccatgtcgtaccgtacatgagtgttttctcgaataagtcattggtttgtgtgtttccggttttaatgtaatgttaaatcaattaatggcttttaatatattgtattatggatctcaatctaaaagttttt

SEQ ID NO: 43495 - protein, 77 aa, Arabidopsis thaliana; identical to SEQ ID NO: 25733
  peptide (1)..(77): Ceres Seq. ID no. 12579961

SEQ ID NO: 43496 - protein, 62 aa, Arabidopsis thaliana; identical to SEQ ID NO: 25734
  peptide (1)..(62): Ceres Seq. ID no. 12579962

SEQ ID NO: 43497 - protein, 55 aa, Arabidopsis thaliana
  peptide (1)..(55): Ceres Seq. ID no. 12579963
MGPVTVEARTCESKSHRFKGPCVSTHNCANVCHNEGFGGGKCRGFRRRCYCTRHC

SEQ ID NO: 43498 - protein, 55 aa, Arabidopsis thaliana
  peptide (1)..(55): Ceres Seq. ID no. 12579964
ILIEKQSAHLSLLSKSLSIPLKNEALCAFYLRCSSLVHGIHCHRDGSSHRGGTHV

SEQ ID NO: 43499 - DNA, 1887 bp, Arabidopsis thaliana
  misc_feature (1)..(1887): Ceres Seq. ID no. 12370796
  misc_feature (1)..(1887): Ortholog of  Ceres SEQ ID NO 14311191 as cited in SEQ ID NO 52591
gaatttgtgtgttccgaccgaaaaatcaggaagaagaagaagaagattgacaaacaaaaaggattcacctttagtgactgagtgagagaaagagattgaaggaaaaaaaaaaaaaagggtgaagctttggagagaggataaccacgtagaggattctaatccgtggttgcaaacgaaggacccagaatttctggaatctcttgcttcgatcgaatcactctcatgtctaacgaagactctcttccgcctttcactttgtttggtttggatgatgtcgaaaattacggtctggtcactgaagcagacaattcgttacctttagatatacacaatcaggtttttcaacttgtggagaagggaaaccaatcattcaaagagtctcgctttgaagaggctattagcagttattcaaaggccaattctattaaacctcttgaccctattgttcttggcaatagaagtgctgcttatataagatttggccaatatctgaagcagagatctgcatcaatttctgaatataaacctctgaatggttttgatatgtcgatgcttggtgaacttgctcttaaggatgctgataagctaatgagtcttcagagcagtttagtgaagtcatatattacaaaggcttgtgccctcatgttgctagaaagatatgaggtagcccgtgacactatcctctcaggtctacagattgatccctttagcggtcctctacgatccaatcttcaggaattggagaaagtgatgcctaattcgatgcgtaaaacccatggaatggctgagcggtctgatgattttgattgcactgtttgcctgaaattgctgtacgaacctgctacaactccatgtgggcatacattctgccgatcatgcctctttcagtcaatggatcgcggcaacaaatgtccactatgtcgaactgtcatttttatgactccaagaacatgcgctgtcaatgtgacactgaataacatcatagagaaaaactttccagaggagtatgctgaaaggaaatcagagcaagacactctggtccacctaggcaatgaaagtatgccccttttcgtcatggatgtgataatcccctgtcagaagttgtctcttcatatatttgaaccacgatatcgactaatggtgagaagaataatggaaggaaatcatcggatgggaatggtagctcttgattcggcgacaggttctccagtggatgttgcttgcgaagttgaaatcacagagtgtgatccactcccggatggacgttttgtcctggagctggaaagccatagaaggtgccgcattgtaaaagcttgggatcaagatggatatcgtgttgcagaggttgaatgggtgaaagatataccaccacaaagcgagcaagggaaagcagatctgcgggaactgacgaccagcgcagcatcatttgctcggtcatggctagatagagcaaaggaagcagctagacaaggagacagaagaagacttgaaatacttctaaatgttgaatctatgataccaacgcctcaagatcccgagcgcttcagtttctggcttgctacactgacagataggagaccttcagaaagattggaactacttcggcttcaggatactggagagagaataaagcgcgggttgatatatctccgatcagtagaaagaggatgcagaatgcaatgaactggcagcatgatggcattgtattgccggttaaactacagagataaacttgggacctgttcataagaaggttgacaaaacatttattcatgattaaaggaatacataagatagagatccttgtaggatcgctgtcatcctttgtcggatccattgttgtagattttgtttgcgactgtattttatttaattaccatattcttc

SEQ ID NO: 43500 - protein, 486 aa, Arabidopsis thaliana
  peptide (1)..(486): Ceres Seq. ID no. 12370797
MSNEDSLPPFTLFGLDDVENYGLVTEADNSLPLDIHNQVFQLVEKGNQSFKESRFEEAISSYSKANSIKPLDPIVLGNRSAAYIRFGQYLKQRSASISEYKPLNGFDMSMLGELALKDADKLMSLQSSLVKSYITKACALMLLERYEVARDTILSGLQIDPFSGPLRSNLQELEKVMPNSMRKTHGMAERSDDFDCTVCLKLLYEPATTPCGHTFCRSCLFQSMDRGNKCPLCRTVIFMTPRTCAVNVTLNNIIEKNFPEEYAERKSEQDTLVHLGNESMPLFVMDVIIPCQKLSLHIFEPRYRLMVRRIMEGNHRMGMVALDSATGSPVDVACEVEITECDPLPDGRFVLELESHRRCRIVKAWDQDGYRVAEVEWVKDIPPQSEQGKADLRELTTSAASFARSWLDRAKEAARQGDRRRLEILLNVESMIPTPQDPERFSFWLATLTDRRPSERLELLRLQDTGERIKRGLIYLRSVERGCRMQ

SEQ ID NO: 43501 - protein, 379 aa, Arabidopsis thaliana
  peptide (1)..(379): Ceres Seq. ID no. 12370798
MSMLGELALKDADKLMSLQSSLVKSYITKACALMLLERYEVARDTILSGLQIDPFSGPLRSNLQELEKVMPNSMRKTHGMAERSDDFDCTVCLKLLYEPATTPCGHTFCRSCLFQSMDRGNKCPLCRTVIFMTPRTCAVNVTLNNIIEKNFPEEYAERKSEQDTLVHLGNESMPLFVMDVIIPCQKLSLHIFEPRYRLMVRRIMEGNHRMGMVALDSATGSPVDVACEVEITECDPLPDGRFVLELESHRRCRIVKAWDQDGYRVAEVEWVKDIPPQSEQGKADLRELTTSAASFARSWLDRAKEAARQGDRRRLEILLNVESMIPTPQDPERFSFWLATLTDRRPSERLELLRLQDTGERIKRGLIYLRSVERGCRMQ

SEQ ID NO: 43502 - protein, 377 aa, Arabidopsis thaliana
  peptide (1)..(377): Ceres Seq. ID no. 12370799
MLGELALKDADKLMSLQSSLVKSYITKACALMLLERYEVARDTILSGLQIDPFSGPLRSNLQELEKVMPNSMRKTHGMAERSDDFDCTVCLKLLYEPATTPCGHTFCRSCLFQSMDRGNKCPLCRTVIFMTPRTCAVNVTLNNIIEKNFPEEYAERKSEQDTLVHLGNESMPLFVMDVIIPCQKLSLHIFEPRYRLMVRRIMEGNHRMGMVALDSATGSPVDVACEVEITECDPLPDGRFVLELESHRRCRIVKAWDQDGYRVAEVEWVKDIPPQSEQGKADLRELTTSAASFARSWLDRAKEAARQGDRRRLEILLNVESMIPTPQDPERFSFWLATLTDRRPSERLELLRLQDTGERIKRGLIYLRSVERGCRMQ

SEQ ID NO: 43503 - DNA, 779 bp, Arabidopsis thaliana
  misc_feature (1)..(779): Ceres Seq. ID no. 12394520
  misc_feature (1)..(779): Ortholog of  Ceres SEQ ID NO 15175178 as cited in SEQ ID NO 0
atttctgttcatttcacctttactaaaaagagaactcacatcaaagaaacagtccatcattcacatgatctagatgagcatcattactaattatcttgtaacgaatgatcactaatgtttttgactattctatgcagctctagtggcactcctaccacaggaacaccaactagtgggacaccaaccagtgggaccccgactaccggaactccgaccaccggaacccccaccactggaactccaaccagtgggactccaactagtggcttcccaaataccgggactccgaacacagggactaacactgggatgccaaattccaacgggatgccaacttcatcgtcatcttcggtgttcccggggactactcttggaccgactggtagcgggggactaggcgatccaaatgctggagagaagctgtctgttcgaactaacacattggtcttcttattaaccggtgtagcagcaatgcttgtcatatgagggcttagatgtcacacgcggttatggttgtaattgggtttgctgagagatcagatcttgcctacggctcatggttgatagagccatctttttttcactcgtctttctaggatttggacttaggttggccgagagacataatgctggtagtagctagtattttgggttatgtacaactttaactaagagctttacttttgtaaatccggaggatgagatgctcttttgtttcttatattctttttaatccttttactttgatctttcatcttttaatacgtaccatcattgtc

SEQ ID NO: 43504 - protein, 123 aa, Arabidopsis thaliana
  peptide (1)..(123): Ceres Seq. ID no. 12394521
MFLTILCSSSGTPTTGTPTSGTPTSGTPTTGTPTTGTPTTGTPTSGTPTSGFPNTGTPNTGTNTGMPNSNGMPTSSSSSVFPGTTLGPTGSGGLGDPNAGEKLSVRTNTLVFLLTGVAAMLVI

SEQ ID NO: 43505 - DNA, 1777 bp, Arabidopsis thaliana; identical to SEQ ID NO: 24265
  misc_feature (1)..(1777): Ceres Seq. ID no. 13610497
  misc_feature (1)..(1777): Ortholog of  Ceres SEQ ID NO 13638331 as cited in SEQ ID NO 58047
  misc_feature (1)..(1777): Ortholog of  Ceres SEQ ID NO 15170135 as cited in SEQ ID NO 67647

SEQ ID NO: 43506 - protein, 538 aa, Arabidopsis thaliana; identical to SEQ ID NO: 24266
  peptide (1)..(538): Ceres Seq. ID no. 13610498

SEQ ID NO: 43507 - protein, 508 aa, Arabidopsis thaliana; identical to SEQ ID NO: 24267
  peptide (1)..(508): Ceres Seq. ID no. 13610499

SEQ ID NO: 43508 - protein, 436 aa, Arabidopsis thaliana; identical to SEQ ID NO: 24268
  peptide (1)..(436): Ceres Seq. ID no. 13610500

SEQ ID NO: 43509 - DNA, 1928 bp, Arabidopsis thaliana
  misc_feature (1)..(1928): Ceres Seq. ID no. 12377270
  misc_feature (1)..(1928): Ortholog of  Ceres SEQ ID NO 14306957 as cited in SEQ ID NO 54111
  misc_feature (1)..(1928): Ortholog of  Ceres SEQ ID NO 14314088 as cited in SEQ ID NO 62652
actctcggcaaaaaaaaagttcctcagaagcaaacaaatcttcaattgttaaaccctaaacctacaaaagtcttgactttgtttgttgctcatcttcgttcttctctctcgattaaattcgttccgagaaagttaggtcccgtttctaaacaatgataactgcagtgtcatggataccaaaagggaatctaaaagctgttcctgatgttgctgagcctccgtcaaaggaagaacttaaagagctcattgagagtggtgcttttgcaagaaacgtggaaggtagtaacgaggatgaagaagaagagattgaagaagatggagaagagataagtgaagttgatcatgccaaggctgtagctgaagctttgggtaaatcttctaaaagcaaggctgtttcttcttcaatggaggttgatgaggtttctcaaggattgaaagaacttgacatggataattatgatgaagaggatgatgaaattgaacttttcagttctggaatgggggatctttattatccaagtaatgagatggatccatatctgaaagatgttgatgatgaagatgatgaagaggatattgatgacacgacagtcaagccgaccgattcggtgattatttgtgctaggaatgaagatgatgttagccatctagaggtttatttatacgaggaatcgtctggctctccaaacatgtatgttcatcatcacataattataccagaattcccattgtgtactgcatggcttgattgtcctcttaaaggaggggaaaaagggaattttgtagctattggttcaaaggatacaccgacaatcgagatatgggatcttgacgttagggacgaggtgctaccttgtatacaactaggaggaatagaggagatgatagtgagtaagaaaaagaagagcaagaaacagaaaccgaaattcaaagaaggtagccatactgagtcagtacttggtcttgcttggaacaaggagtttcggaacatacttgctagtgctagtgccgacaaaaaagttaaggtctgggatgtggctactgggacgtgtaagattactatggagcatcacacaaaggaggttcaagcggttgcttggaaccattatgctccagaagtgcttctcagtgggtcgtttgatcaaactgttgtcatgaaagacggaagacaaccttcacactcgggtttcaaatggtctgtcatgtctgatgtcgaaagcttagcctgggatcctcattgcgaacactcctttgtggtaagtcttgaagatggaaccgtgaagggttttgatatacgtgctgcacagtcaggttcagattctgatttaaacccaacttacactatccaagcacatgcccaagacagaggagtctcctccatctcatacaacatttctacacccaatcttttggctacggggtctatggataaatcggtaaagctttgggatctttcaaacaatgaaccttcatgcattgctacacaccaaccaaatgctggagctgtgttttccatttcctttgcggtggacaaccctttcttgcttgctattggtggctcaaagggagagctacatgtttgggatacactgttggatgctaatgtcgctcgcaaatatgggagcaatagatcttgaaaagacccgcaaggataacttgtctctttgaagctgtgatggttgttagattcgatcacactcatgccaaattttgcgctttcttttcttctttttctttaggcttgttttatctctcatatgattatggttatatcgtgtaagggtgtgtgagcttatatgttgaaatcctaaaactactgggagagcctttttcaacttatcatgaatctatagctgttgtgctttaaataaacatttatcaaattgtattcatcttttaactccgcaaagtgatataaaattcttctt

SEQ ID NO: 43510 - protein, 494 aa, Arabidopsis thaliana
  peptide (1)..(494): Ceres Seq. ID no. 12377271
MITAVSWIPKGNLKAVPDVAEPPSKEELKELIESGAFARNVEGSNEDEEEEIEEDGEEISEVDHAKAVAEALGKSSKSKAVSSSMEVDEVSQGLKELDMDNYDEEDDEIELFSSGMGDLYYPSNEMDPYLKDVDDEDDEEDIDDTTVKPTDSVIICARNEDDVSHLEVYLYEESSGSPNMYVHHHIIIPEFPLCTAWLDCPLKGGEKGNFVAIGSKDTPTIEIWDLDVRDEVLPCIQLGGIEEMIVSKKKKSKKQKPKFKEGSHTESVLGLAWNKEFRNILASASADKKVKVWDVATGTCKITMEHHTKEVQAVAWNHYAPEVLLSGSFDQTVVMKDGRQPSHSGFKWSVMSDVESLAWDPHCEHSFVVSLEDGTVKGFDIRAAQSGSDSDLNPTYTIQAHAQDRGVSSISYNISTPNLLATGSMDKSVKLWDLSNNEPSCIATHQPNAGAVFSISFAVDNPFLLAIGGSKGELHVWDTLLDANVARKYGSNRS

SEQ ID NO: 43511 - protein, 410 aa, Arabidopsis thaliana
  peptide (1)..(410): Ceres Seq. ID no. 12377272
MEVDEVSQGLKELDMDNYDEEDDEIELFSSGMGDLYYPSNEMDPYLKDVDDEDDEEDIDDTTVKPTDSVIICARNEDDVSHLEVYLYEESSGSPNMYVHHHIIIPEFPLCTAWLDCPLKGGEKGNFVAIGSKDTPTIEIWDLDVRDEVLPCIQLGGIEEMIVSKKKKSKKQKPKFKEGSHTESVLGLAWNKEFRNILASASADKKVKVWDVATGTCKITMEHHTKEVQAVAWNHYAPEVLLSGSFDQTVVMKDGRQPSHSGFKWSVMSDVESLAWDPHCEHSFVVSLEDGTVKGFDIRAAQSGSDSDLNPTYTIQAHAQDRGVSSISYNISTPNLLATGSMDKSVKLWDLSNNEPSCIATHQPNAGAVFSISFAVDNPFLLAIGGSKGELHVWDTLLDANVARKYGSNRS

SEQ ID NO: 43512 - protein, 396 aa, Arabidopsis thaliana
  peptide (1)..(396): Ceres Seq. ID no. 12377273
MDNYDEEDDEIELFSSGMGDLYYPSNEMDPYLKDVDDEDDEEDIDDTTVKPTDSVIICARNEDDVSHLEVYLYEESSGSPNMYVHHHIIIPEFPLCTAWLDCPLKGGEKGNFVAIGSKDTPTIEIWDLDVRDEVLPCIQLGGIEEMIVSKKKKSKKQKPKFKEGSHTESVLGLAWNKEFRNILASASADKKVKVWDVATGTCKITMEHHTKEVQAVAWNHYAPEVLLSGSFDQTVVMKDGRQPSHSGFKWSVMSDVESLAWDPHCEHSFVVSLEDGTVKGFDIRAAQSGSDSDLNPTYTIQAHAQDRGVSSISYNISTPNLLATGSMDKSVKLWDLSNNEPSCIATHQPNAGAVFSISFAVDNPFLLAIGGSKGELHVWDTLLDANVARKYGSNRS

SEQ ID NO: 43513 - DNA, 809 bp, Arabidopsis thaliana
  misc_feature (1)..(809): Ceres Seq. ID no. 12602864
  misc_feature (1)..(809): Ortholog of  Ceres SEQ ID NO 13639656 as cited in SEQ ID NO 57949
  misc_feature (1)..(809): Ortholog of  Ceres SEQ ID NO 14302764 as cited in SEQ ID NO 67753
  misc_feature (1)..(809): Ortholog of  Ceres SEQ ID NO 14302291 as cited in SEQ ID NO 68180
aataaacgaatttttttattaacgttcttcttttttgaagaatcatataatcatccaacaaagaaaaatcaaaattataaaaccaataaacagtcgccacgtgccacttcaacaacctcgcacttcaccgagagctggggagatttgccgttgaaagaaaacgattctgaggatatgttagtttacggtatcctcaacgacgcctttcacggcggttgggagccgtcttcttcgtcttccgacgaagatcgtagctctttcccgagtgttaagatcgagactccggagagtttcgcggcggtggattctgttccggtcaagaaggagaagacgagtcctgtttcggcggcggtgacggcggcgaagggaaagcattatagaggagtgagacaaaggccgtgggggaaatttgcggcggagattagagacccggcgaagaacggagctagggtttggttagggacgtttgagacggcggaggacgcggcgttggcttacgacagagctgctttcaggatgcgtggttcccgcgctttgttgaattttccgttgagagttaattcaggagaacccgacccggttcggattaagtccaagagatcttcttttccttcttctaacgagaacggagctccgaagaagaggagaacggtggccgccggtggtggaatggataaggggttgacggtgaagtgcgaggttgttgaagtggcacgtggcgatcatttattggttttataattttgatttttctttgttggattatatgattcttcaaaaaagaagaacgttaataaaaaaattcgttt

SEQ ID NO: 43514 - protein, 246 aa, Arabidopsis thaliana
  peptide (1)..(246): Ceres Seq. ID no. 12602865
NKRIFLLTFFFFEESYNHPTKKNQNYKTNKQSPRATSTTSHFTESWGDLPLKENDSEDMLVYGILNDAFHGGWEPSSSSSDEDRSSFPSVKIETPESFAAVDSVPVKKEKTSPVSAAVTAAKGKHYRGVRQRPWGKFAAEIRDPAKNGARVWLGTFETAEDAALAYDRAAFRMRGSRALLNFPLRVNSGEPDPVRIKSKRSSFPSSNENGAPKKRRTVAAGGGMDKGLTVKCEVVEVARGDHLLVL

SEQ ID NO: 43515 - protein, 188 aa, Arabidopsis thaliana
  peptide (1)..(188): Ceres Seq. ID no. 12602866
MLVYGILNDAFHGGWEPSSSSSDEDRSSFPSVKIETPESFAAVDSVPVKKEKTSPVSAAVTAAKGKHYRGVRQRPWGKFAAEIRDPAKNGARVWLGTFETAEDAALAYDRAAFRMRGSRALLNFPLRVNSGEPDPVRIKSKRSSFPSSNENGAPKKRRTVAAGGGMDKGLTVKCEVVEVARGDHLLVL

SEQ ID NO: 43516 - DNA, 1051 bp, Arabidopsis thaliana
  misc_feature (1)..(1051): Ceres Seq. ID no. 12602869
  misc_feature (1)..(1051): Ortholog of  Ceres SEQ ID NO 14313014 as cited in SEQ ID NO 54841
  misc_feature (1)..(1051): Ortholog of  Ceres SEQ ID NO 14316091 as cited in SEQ ID NO 57622
  misc_feature (1)..(1051): Ortholog of  Ceres SEQ ID NO 13639317 as cited in SEQ ID NO 59781
  misc_feature (1)..(1051): Ortholog of  Ceres SEQ ID NO 13654578 as cited in SEQ ID NO 68583
aaaaaaaaccaaagttcaacacaatccatcacatccatttcaatagaagacgaagaacgtttcagaatcatcaaccaaattcagaaaatttcagccatgacaggatcacaagaagaccaacctaagatcatcattgatcaagagcaacccaaaactctagaaacagagcaccaaccagaaccttcttcatcgtctccggatcagaagaaatggggtactcacgtgatgggagctccggcagctccagttgctcatcccgataaccaacaggcggcggcgtgggtcgctggagataaccagcagacgcagtaccaaccgtacgtcatctactctcctgtcgaacatccaacaactaacaaccctctcgagccagtcatcggaatgttccatacctggagtcgcaaggcagaaaccgtcgcacgtaacctctggcacaatctgaagacaggaccgtctatgtcggaaacggcgtgggggaaggttaatttgacggccaaagcgataacaaaaggaggattcgagtcgcttttcagacagattttcggaacagagccaaacgagacgctgaagaaaactttcgcttgttatctctcgacgacgacaggtcctgttgctggaactgtctatctttcgaatgctcgtgtcgctttttgtagcgatcgtcctctgtacttcacagcaccttctggtcaagaatcttggagctactacagggtggttgtacctttggcgaatgtagcgacggtgaatccggtggtggtgaaagagactccacctgagaagtatattcagttgacgacggtggatggtcatgacttctggttcatgggttttgtgaattatgagaaggctacgcatcatctgctgaccagtgtctccgattttcaaaccgcacacggctctgtgtctggttaaaacatactattcctctaatgtttttctttagttgtgtggttggtttctgctgcttctcatgtttctatatgtttatgtaaattatataccagagctggacttttgtgtgttgattcagagttggtttcacttattc

SEQ ID NO: 43517 - protein, 304 aa, Arabidopsis thaliana
  peptide (1)..(304): Ceres Seq. ID no. 12602870
KKNQSSTQSITSISIEDEERFRIINQIQKISAMTGSQEDQPKIIIDQEQPKTLETEHQPEPSSSSPDQKKWGTHVMGAPAAPVAHPDNQQAAAWVAGDNQQTQYQPYVIYSPVEHPTTNNPLEPVIGMFHTWSRKAETVARNLWHNLKTGPSMSETAWGKVNLTAKAITKGGFESLFRQIFGTEPNETLKKTFACYLSTTTGPVAGTVYLSNARVAFCSDRPLYFTAPSGQESWSYYRVVVPLANVATVNPVVVKETPPEKYIQLTTVDGHDFWFMGFVNYEKATHHLLTSVSDFQTAHGSVSG

SEQ ID NO: 43518 - protein, 272 aa, Arabidopsis thaliana
  peptide (1)..(272): Ceres Seq. ID no. 12602871
MTGSQEDQPKIIIDQEQPKTLETEHQPEPSSSSPDQKKWGTHVMGAPAAPVAHPDNQQAAAWVAGDNQQTQYQPYVIYSPVEHPTTNNPLEPVIGMFHTWSRKAETVARNLWHNLKTGPSMSETAWGKVNLTAKAITKGGFESLFRQIFGTEPNETLKKTFACYLSTTTGPVAGTVYLSNARVAFCSDRPLYFTAPSGQESWSYYRVVVPLANVATVNPVVVKETPPEKYIQLTTVDGHDFWFMGFVNYEKATHHLLTSVSDFQTAHGSVSG

SEQ ID NO: 43519 - protein, 229 aa, Arabidopsis thaliana
  peptide (1)..(229): Ceres Seq. ID no. 12602872
MGAPAAPVAHPDNQQAAAWVAGDNQQTQYQPYVIYSPVEHPTTNNPLEPVIGMFHTWSRKAETVARNLWHNLKTGPSMSETAWGKVNLTAKAITKGGFESLFRQIFGTEPNETLKKTFACYLSTTTGPVAGTVYLSNARVAFCSDRPLYFTAPSGQESWSYYRVVVPLANVATVNPVVVKETPPEKYIQLTTVDGHDFWFMGFVNYEKATHHLLTSVSDFQTAHGSVSG

SEQ ID NO: 43520 - DNA, 871 bp, Arabidopsis thaliana
  misc_feature (1)..(871): Ceres Seq. ID no. 13592792
  misc_feature (1)..(871): Ortholog of  Ceres SEQ ID NO 13594189 as cited in SEQ ID NO 58890
atcgcatttcagttgttcaacttcttcgtcgtcgtcttcttcctttgctccgtcgtcgagatctcgtcgatcctcaaatctcaaatctcctgtaaccagatcgtctaattatccgatctgcgtttcgaatctcagatcgaagatgccggtggctgcttccgccatctattttctgaatctccgtggcgatgtactcataaatcgcacctaccgagatgacgtcgggggaaacatggtggatgcatttcgtacgcatataatgcagacgaaagagttagggaattgtcctgtgcgtcagattggtggctgctcctttgtttatatgcgaatcagcaatgtctacattgtcattgttgtcagtagcaatgctaacgttgcttgtggattcaaattcgttgttgaggctgttgctttgttcaaatcatactttggtggagcttttgatgaagacgctattagaaataactttgttctgatttatgaattgttggacgagattatggactttggctatccacaaaatctctcccctgaaattttgaaactttatatcactcaggaaggtgtacggtcaccattttcatcgaagccaaaggacaagcctgttccaaatgcaacattacaagttacgggtgctgttggttggagaagagagggccttgcttataaaaagaatgaggtgtttctggatattgtggaaagtgtaaaccttctgatgtcctctaaaggcaacgttcttcggtgtgatgtgaccgggaaagttttaatgaaatgtttcctttcgggaatgcctgatttgaagttggggttgaatgataaaattggtcttgagaaggaatcagaaatgaaatctcgcccagctaagagtggt

SEQ ID NO: 43521 - protein, 290 aa, Arabidopsis thaliana
  peptide (1)..(290): Ceres Seq. ID no. 13592793
SHFSCSTSSSSSSSFAPSSRSRRSSNLKSPVTRSSNYPICVSNLRSKMPVAASAIYFLNLRGDVLINRTYRDDVGGNMVDAFRTHIMQTKELGNCPVRQIGGCSFVYMRISNVYIVIVVSSNANVACGFKFVVEAVALFKSYFGGAFDEDAIRNNFVLIYELLDEIMDFGYPQNLSPEILKLYITQEGVRSPFSSKPKDKPVPNATLQVTGAVGWRREGLAYKKNEVFLDIVESVNLLMSSKGNVLRCDVTGKVLMKCFLSGMPDLKLGLNDKIGLEKESEMKSRPAKSG

SEQ ID NO: 43522 - protein, 243 aa, Arabidopsis thaliana
  peptide (1)..(243): Ceres Seq. ID no. 13592794
MPVAASAIYFLNLRGDVLINRTYRDDVGGNMVDAFRTHIMQTKELGNCPVRQIGGCSFVYMRISNVYIVIVVSSNANVACGFKFVVEAVALFKSYFGGAFDEDAIRNNFVLIYELLDEIMDFGYPQNLSPEILKLYITQEGVRSPFSSKPKDKPVPNATLQVTGAVGWRREGLAYKKNEVFLDIVESVNLLMSSKGNVLRCDVTGKVLMKCFLSGMPDLKLGLNDKIGLEKESEMKSRPAKSG

SEQ ID NO: 43523 - protein, 213 aa, Arabidopsis thaliana
  peptide (1)..(213): Ceres Seq. ID no. 13592795
MVDAFRTHIMQTKELGNCPVRQIGGCSFVYMRISNVYIVIVVSSNANVACGFKFVVEAVALFKSYFGGAFDEDAIRNNFVLIYELLDEIMDFGYPQNLSPEILKLYITQEGVRSPFSSKPKDKPVPNATLQVTGAVGWRREGLAYKKNEVFLDIVESVNLLMSSKGNVLRCDVTGKVLMKCFLSGMPDLKLGLNDKIGLEKESEMKSRPAKSG

SEQ ID NO: 43524 - DNA, 2004 bp, Arabidopsis thaliana
  misc_feature (1)..(2004): Ceres Seq. ID no. 12482910
  misc_feature (1)..(2004): Ortholog of  Ceres SEQ ID NO 14301920 as cited in SEQ ID NO 69277
atttttcttcattactcttctttttattttccggagatttttctctttgcctttgttatttgctgcttttgctgcttttgctgcagctacagtagaatcttgtgtttttgtggtggggaggtgagatttcttatgacggggaagcgatcaaagactaattgcagatctgcttctcacaagctcttcaaggataaggctaagaaccgtgttgatgatttgcaaggcatgcttttggatcttcagtttgcgaggaaagagagtaggcctactgatgttactcttcttgaggagcaagtgaatcagatgcttcgtgagtggaaatctgagctcaatgagccttctccagcttcatccttgcaacaaggtggtactctggggtctttctcatcagacatttgtcggctgctgcagctctgtgatgaggaagatgatgctaccagcaaattagctgcccccaagcccgagcctgctgatcagaatctcgaagctggcaaagctgctgtcttccaaaggggatacaatttggttcaggggaagtcagaacatggattaccattggttgataattgcaaagatttgtccttagcagctggtaacaatttcgatggaacggctcctttggagtatcatcagcagtatgatctgcaacaagagtttgaaccaaacttcaatggtggtttcaacaattgtcccagttatggtgtagtagagggtcctatacatatctctaattttatcccgactatttgtcctccaccctctgcattcttgggtccaaaatgtgctctttgggattgccctaggccagctcagggatttgattggttccaggattactgcagcagcttccacgctgcactggctttcaatgaagggccaccaggtatgaatccggtggtgcgtcctggaggtatcggcctaaaagacggtctgctttttgctgctcttagtgcaaaggctggagggaaagatgttggtattcccgaatgtgaaggagctgcaactgctaaatctccatggaatgctccagagctctttgatctcacggttctggagagtgagacactaagggagtggctattctttgacaagccaaggagggcctttgagagcgggaacagaaagcaaagatctttaccagactacaatggtcgtggttggcacgagtcacgtaaacagatcatggtcgagtttggagggctgaagagatcttactacatggatccacagcctctgcaccatttcgaatggcatctttacgaatatgagatcaacaagtgtgatgcttgtgccttgtacaggctcgagctcaagcttgttgacgggaagaagacttcaaaaggcaaagtctcaaacgactcagtggctgatctgcagaagcagatgggaagactcacagctgagttccctccagaaaacaataccactaacaccaccaacaacaacaaacgctgcatcaaaggaagaccaaaagtgagcacaaaagtcgccaccgggaatgttcagaacacagtagagcaggcaaatgactatggagtaggtgaagagtttaactatctggtcggaaatctaagcgactattatatcccctgagacgaatgtggaaaaactcaggtttgaaaagctgtttgcttaccatttaattaggcagcagcagaagaagcttctacatatcgtagggcaaagtaatggattttcatgactcgtatcttttttttctcttatataatagttctctgtctatctatggagattatgtatatataacaagaagtggatgctgaagactgtcctggagttaggaatagtaaatgtgacgaaggagactgctttttaagattcagtctatggaggtgaagacatatttactgacattccggtttatatattttgatgcattttcgactctcttctgcgatataatgcagatgacaaattatgtaaccgatggggaaatacggttttgagtatcagtgttgttcttatagaatcaggaccttgttc

SEQ ID NO: 43525 - protein, 530 aa, Arabidopsis thaliana
  peptide (1)..(530): Ceres Seq. ID no. 12482911
IFLHYSSFYFPEIFLFAFVICCFCCFCCSYSRILCFCGGEVRFLMTGKRSKTNCRSASHKLFKDKAKNRVDDLQGMLLDLQFARKESRPTDVTLLEEQVNQMLREWKSELNEPSPASSLQQGGTLGSFSSDICRLLQLCDEEDDATSKLAAPKPEPADQNLEAGKAAVFQRGYNLVQGKSEHGLPLVDNCKDLSLAAGNNFDGTAPLEYHQQYDLQQEFEPNFNGGFNNCPSYGVVEGPIHISNFIPTICPPPSAFLGPKCALWDCPRPAQGFDWFQDYCSSFHAALAFNEGPPGMNPVVRPGGIGLKDGLLFAALSAKAGGKDVGIPECEGAATAKSPWNAPELFDLTVLESETLREWLFFDKPRRAFESGNRKQRSLPDYNGRGWHESRKQIMVEFGGLKRSYYMDPQPLHHFEWHLYEYEINKCDACALYRLELKLVDGKKTSKGKVSNDSVADLQKQMGRLTAEFPPENNTTNTTNNNKRCIKGRPKVSTKVATGNVQNTVEQANDYGVGEEFNYLVGNLSDYYIP

SEQ ID NO: 43526 - protein, 486 aa, Arabidopsis thaliana; identical to SEQ ID NO: 22584
  peptide (1)..(486): Ceres Seq. ID no. 12482912

SEQ ID NO: 43527 - protein, 455 aa, Arabidopsis thaliana; identical to SEQ ID NO: 22585
  peptide (1)..(455): Ceres Seq. ID no. 12482913

SEQ ID NO: 43528 - DNA, 1112 bp, Arabidopsis thaliana; identical to SEQ ID NO: 24790
  misc_feature (1)..(1112): Ceres Seq. ID no. 12329914
  misc_feature (1)..(1112): Ortholog of  Ceres SEQ ID NO 13639514 as cited in SEQ ID NO 55736
  misc_feature (1)..(1112): Ortholog of  Ceres SEQ ID NO 13595560 as cited in SEQ ID NO 56738
  misc_feature (1)..(1112): Ortholog of  Ceres SEQ ID NO 14312254 as cited in SEQ ID NO 59148
  misc_feature (1)..(1112): Ortholog of  Ceres SEQ ID NO 13662804 as cited in SEQ ID NO 65394
  misc_feature (1)..(1112): Ortholog of  Ceres SEQ ID NO 13656519 as cited in SEQ ID NO 69226

SEQ ID NO: 43529 - protein, 213 aa, Arabidopsis thaliana; identical to SEQ ID NO: 24791
  peptide (1)..(213): Ceres Seq. ID no. 12329915

SEQ ID NO: 43530 - protein, 174 aa, Arabidopsis thaliana; identical to SEQ ID NO: 24792
  peptide (1)..(174): Ceres Seq. ID no. 12329916

SEQ ID NO: 43531 - DNA, 1412 bp, Arabidopsis thaliana
  misc_feature (1)..(1412): Ceres Seq. ID no. 12394654
  misc_feature (1)..(1412): Ortholog of  Ceres SEQ ID NO 15171501 as cited in SEQ ID NO 58322
actccgagcgtttcctttctcacaagccaatggcgcaatttactaattccatcaattatctcttttctgtttctctcttattatttgtatcgttccactgcttatgttttcgtttttcattggttgcagcttgttcaaactccaccgacgaccaacagattcaacaccatcaccaccggaaatgggttggtccctcaggccacaaagtcatcaccgttctcacttaacggccacgctcagtttcgctccgtccaagacgctgtggattccataccaaagaacaataacaagagcatcacaatcaagattgctcccggattttacagagagaaagtggtggttccagctacaaaaccgtacataacgttcaaaggagctggtagggatgtgaccgctatagagtggcacgaccgtgcgtccgaccttggcgctaacggtcaacagttacgtacctatcaaaccgcttccgtcaccgtctacgctaattatttcaccgctagaaacattagcttcacggtactctattcaattctaacgcaattatatatatagggaaactttcacaaaaatgcgagtctttctttattttattttaaattgtgaagaatactgcgccggctccattgccggggatgcaagggtggcaagcggtggcgtttaggatctccggcgacaaagctttcttttccggctgcgggttttacggtgcacaagacactttatgcgacgatgctggccgtcattacttcaaggagtgttacattgaaggctctatcgactttatctttggtaatggccgctccatgtataaagattgtgagttgcattcgatagcgtcaagattcgggtcgatagcggcgcatggtaggacatgcccggaagagaaaacgggtttcgcgttcgtgggttgtcgggtaacaggtacgggtccattgtacgtgggccgggccatgggaccaatactcacgtatcgtttacgcctacacttactttgatgctctcgtcgctcacggtggttgggacgattgggaccacaaatccaacaaaagcaagacggcatttttcggagtgtacaattgctatgggccaggagcagcagcgacgagaggcgtgtcttgggctagagctttggactatgaatcggcccatccatttatcgctaagagcttcgttaatgggagacattggatcgctcctcgagatgcttaaccaacttcaaaccttggcggggtttcttttcctaattcctcggttcctcccagtcccaagtcctaaaagcttactatatttttatcattcgtttatttcttttattgtttattttttccaatttatttatacattgtgtgatagtacaacaaagtattgcttcttcttcatctgtatccatttcagttaaatgttttgagctt

SEQ ID NO: 43532 - protein, 183 aa, Arabidopsis thaliana
  peptide (1)..(183): Ceres Seq. ID no. 12394655
TPSVSFLTSQWRNLLIPSIISFLFLSYYLYRSTAYVFVFHWLQLVQTPPTTNRFNTITTGNGLVPQATKSSPFSLNGHAQFRSVQDAVDSIPKNNNKSITIKIAPGFYREKVVVPATKPYITFKGAGRDVTAIEWHDRASDLGANGQQLRTYQTASVTVYANYFTARNISFTVLYSILTQLYI

SEQ ID NO: 43533 - protein, 175 aa, Arabidopsis thaliana
  peptide (1)..(175): Ceres Seq. ID no. 12394656
MPGRENGFRVRGLSGNRYGSIVRGPGHGTNTHVSFTPTLTLMLSSLTVVGTIGTTNPTKARRHFSECTIAMGQEQQRREACLGLELWTMNRPIHLSLRASLMGDIGSLLEMLNQLQTLAGFLFLIPRFLPVPSPKSLLYFYHSFISFIVYFFQFIYTLCDSTTKYCFFFICIHFS

SEQ ID NO: 43534 - protein, 134 aa, Arabidopsis thaliana
  peptide (1)..(134): Ceres Seq. ID no. 12394657
MLSSLTVVGTIGTTNPTKARRHFSECTIAMGQEQQRREACLGLELWTMNRPIHLSLRASLMGDIGSLLEMLNQLQTLAGFLFLIPRFLPVPSPKSLLYFYHSFISFIVYFFQFIYTLCDSTTKYCFFFICIHFS

SEQ ID NO: 43535 - DNA, 1505 bp, Arabidopsis thaliana
  misc_feature (1)..(1505): Ceres Seq. ID no. 15179699
  misc_feature (1)..(1505): Ortholog of  Ceres SEQ ID NO 15176057 as cited in SEQ ID NO 56363
  misc_feature (1)..(1505): Ortholog of  Ceres SEQ ID NO 14316269 as cited in SEQ ID NO 60082
atctctgaatcactcataaaccctttcttcttccttgttcaaatccactcactcttggagagagacgactcaaacgcatagtctctcctctgtatttactcgttatcgtcactgtgagagagagagagagagagagcgcgcgcattcccccaattaaagcctctctgctccaaaccgtgatatactctttacgtactttgtttttgcctttatccttccctagttgtgtataattttgttcttttcttatggagatggatctcagcaaggttactcttgacattttcacaaagcttgaacagaaatggctctctcactgcgactcctcccggaagactcgtatccttagcatcgacggtggcggtaccactggcattgtcgccgctgcttctattctccacctcgagcaccagatccgccttcaaaccggcgaccctcacgctcacatctctgatttcttcgacattgtcgccggaactggcatcggaggcattctcgccgccctccttgtcgccgacgacggctccggcaggccgatgttcactgccagagacgcggttaagtttgtcgcggagaagaactcggagctcttcgagatcaggtacaccggagttttcaggaggaacaagagatactcggggaagagcatggagagggttttggagacggcgtttaggagagaggacggtaaggtgttgacgatgaaggacacgtgtaagcctctccttgttccttgctacgacctcaaaacctctgctcctttcgttttctcacgcgccggcgcgtctgagtctccgagcttcgacttcgagctgtggaaagtctgccgtgccacgtcagcaacaccaagcctcttcaagccgttcagtgtagtgtcggtggacgggaaaacctcatgctcagccgtagacggcggtttggtgatgaacaatccaacagcagctgccgtcacgcacgtgctacacaacaaacgagatttcccgtcagtaaacggcgtagatgacttgcttgtactgtcgttgggaaacggtccgtcgaccatgtcatcatcaccagggaggaaactccgtcgtaacggagactgttcgacgtcaagtgtggtggacatagtggttgacggcgtttccgataccgtcgatcagatgctggggaacgctttctgctggaaccgtactgattacgttagaatccaggcgaacggtttgacgagcggcggagcggaggagttgctgaaagagagaggtgtggaaacggcgccgtttggggtaaaacggatactaacggagagtaacggagaaagaatagagggtttcgtgcaacgtcttgttgcgtcaggaaagtcaagtctacctccaagtccttgcaaggaatctgccgttaaccctctcgctgacggccgttaagtttcctttattattataaccctccccgtccgtgatgtaagaagtttgtaaccaaacccctgggttaattttttaaccccagccagcatcttcgagttaatt

SEQ ID NO: 43536 - protein, 384 aa, Arabidopsis thaliana
  peptide (1)..(384): Ceres Seq. ID no. 15179700
MEMDLSKVTLDIFTKLEQKWLSHCDSSRKTRILSIDGGGTTGIVAAASILHLEHQIRLQTGDPHAHISDFFDIVAGTGIGGILAALLVADDGSGRPMFTARDAVKFVAEKNSELFEIRYTGVFRRNKRYSGKSMERVLETAFRREDGKVLTMKDTCKPLLVPCYDLKTSAPFVFSRAGASESPSFDFELWKVCRATSATPSLFKPFSVVSVDGKTSCSAVDGGLVMNNPTAAAVTHVLHNKRDFPSVNGVDDLLVLSLGNGPSTMSSSPGRKLRRNGDCSTSSVVDIVVDGVSDTVDQMLGNAFCWNRTDYVRIQANGLTSGGAEELLKERGVETAPFGVKRILTESNGERIEGFVQRLVASGKSSLPPSPCKESAVNPLADGR

SEQ ID NO: 43537 - protein, 382 aa, Arabidopsis thaliana
  peptide (1)..(382): Ceres Seq. ID no. 15179701
MDLSKVTLDIFTKLEQKWLSHCDSSRKTRILSIDGGGTTGIVAAASILHLEHQIRLQTGDPHAHISDFFDIVAGTGIGGILAALLVADDGSGRPMFTARDAVKFVAEKNSELFEIRYTGVFRRNKRYSGKSMERVLETAFRREDGKVLTMKDTCKPLLVPCYDLKTSAPFVFSRAGASESPSFDFELWKVCRATSATPSLFKPFSVVSVDGKTSCSAVDGGLVMNNPTAAAVTHVLHNKRDFPSVNGVDDLLVLSLGNGPSTMSSSPGRKLRRNGDCSTSSVVDIVVDGVSDTVDQMLGNAFCWNRTDYVRIQANGLTSGGAEELLKERGVETAPFGVKRILTESNGERIEGFVQRLVASGKSSLPPSPCKESAVNPLADGR

SEQ ID NO: 43538 - protein, 288 aa, Arabidopsis thaliana
  peptide (1)..(288): Ceres Seq. ID no. 15179702
MFTARDAVKFVAEKNSELFEIRYTGVFRRNKRYSGKSMERVLETAFRREDGKVLTMKDTCKPLLVPCYDLKTSAPFVFSRAGASESPSFDFELWKVCRATSATPSLFKPFSVVSVDGKTSCSAVDGGLVMNNPTAAAVTHVLHNKRDFPSVNGVDDLLVLSLGNGPSTMSSSPGRKLRRNGDCSTSSVVDIVVDGVSDTVDQMLGNAFCWNRTDYVRIQANGLTSGGAEELLKERGVETAPFGVKRILTESNGERIEGFVQRLVASGKSSLPPSPCKESAVNPLADGR

SEQ ID NO: 43539 - DNA, 1136 bp, Arabidopsis thaliana
  misc_feature (1)..(1136): Ceres Seq. ID no. 12330277
  misc_feature (1)..(1136): Ortholog of  Ceres SEQ ID NO 13595423 as cited in SEQ ID NO 56775
atgtcctcttcgctccattgctcggaatcacagaaaaaggtgagattaaggaggagcgaaacatgacgaatccacttaattccaccgccgctaatcgctctaaccagccgtcttctgatggaatcagcgacggtcaaatcaccaatgaggaagctgaatcactaattaacaagaagaactgttcagggcacaagctaaaagaagtaactgatagtgacacattctctgacaatggtaaagatgattcagataccaagaaaagattccattaccatcaggatcagcggaggatgagtttgacatcgattgtggcggtggagtctccttcatcgagcaacgctccctctagaaaaaccattgatcttggccatggaagcgacctcatttacattcagaggtttcttccatttcaacaatcttggactttcttcgattatctcgacaagcatattccttggaccaggcctactattcgcgtctggtcgatcttgcctccagccgagagatacttgttatgttgcaagtagcggattgactgcgttggtgtacagtggatatcgacctacctcctattcgtgggatgatttcccacctctcaaggagattctggatgctatttacaaggcgcttcctggaagcagattcaacagcttgctcttaaatagatacaaaggtgccagtgattatgtggcttggcatgcagatgatgaaaagatttatggtccaactccagaaattgcttcagtctcgtttggatgtgaacgtgattttgtgttgaagaaaaagaaagatgaagaatcttcccaagggaaaacaggagacagtggaccagctaagaagaggttaaagagaagcagcagagaggatcaacaaagtttgacattgaaacatggatcgttgctggtgatgagaggatacactcaaagagactggattcattctgtgccaaagcgtgcaaaggcagagggcactcgtatcaacctcacattcaggcttgttttgtaaattgagcatcatatgcaagaaggtgggcttgatcttggtctccattgacatattctaagcttctcatcttaattctctataaacatcaattggtgtagacatttcaagaagcaaattggacgggaagattg

SEQ ID NO: 43540 - protein, 211 aa, Arabidopsis thaliana
  peptide (1)..(211): Ceres Seq. ID no. 12330278
MEATSFTFRGFFHFNNLGLSSIISTSIFLGPGLLFASGRSCLQPRDTCYVASSGLTALVYSGYRPTSYSWDDFPPLKEILDAIYKALPGSRFNSLLLNRYKGASDYVAWHADDEKIYGPTPEIASVSFGCERDFVLKKKKDEESSQGKTGDSGPAKKRLKRSSREDQQSLTLKHGSLLVMRGYTQRDWIHSVPKRAKAEGTRINLTFRLVL

SEQ ID NO: 43541 - protein, 174 aa, Arabidopsis thaliana
  peptide (1)..(174): Ceres Seq. ID no. 12330279
VLFAPLLGITEKGEIKEERNMTNPLNSTAANRSNQPSSDGISDGQITNEEAESLINKKNCSGHKLKEVTDSDTFSDNGKDDSDTKKRFHYHQDQRRMSLTSIVAVESPSSSNAPSRKTIDLGHGSDLIYIQRFLPFQQSWTFFDYLDKHIPWTRPTIRVWSILPPAERYLLCCK

SEQ ID NO: 43542 - protein, 154 aa, Arabidopsis thaliana
  peptide (1)..(154): Ceres Seq. ID no. 12330280
MTNPLNSTAANRSNQPSSDGISDGQITNEEAESLINKKNCSGHKLKEVTDSDTFSDNGKDDSDTKKRFHYHQDQRRMSLTSIVAVESPSSSNAPSRKTIDLGHGSDLIYIQRFLPFQQSWTFFDYLDKHIPWTRPTIRVWSILPPAERYLLCCK

SEQ ID NO: 43543 - DNA, 1669 bp, Arabidopsis thaliana
  misc_feature (1)..(1669): Ceres Seq. ID no. 13592797
  misc_feature (1)..(1669): Ortholog of  Ceres SEQ ID NO 13504015 as cited in SEQ ID NO 51020
  misc_feature (1)..(1669): Ortholog of  Ceres SEQ ID NO 13597643 as cited in SEQ ID NO 65208
actagtttcctttccttagtaaaaccctacatttctccgcccgcctttgatttctccccggccgttcccgccgccggtctccgatttaaccagggttgagtctaattccttctttttgtgctcattgctgtcggattctctaccggcgttacatcgaccagccagactcttccccatttgactgctttagtgattcaatcgctcttttagattctggaagttgtgactcagtatctccccttcaacgaattagcatcctgcgcaagaatgtctattgcatcatcacttacttcagccacactttgcggcgcctcagtttttcctaaagcattagcctgcagctctgagttccctatcaatcttcccagcccttttgaaagttcaaagatttgtttgacttcgtttcctgcctctagggatctcaagaaaaatgctactttgaatctgactcgaaatgttggtccagtcaggtgtcatgctatgcaagctgggacgagggagttgaagaaatttgaacttagtgatgtgattgaagggaaacagtttgatagagagatgctaagcgctatattcgatgttgcacgcgaaatggaaaagatagaaaagagctcttcacaaagcgaaatcctcaagggttatttaaaggctaccctcttttatgagccttctacccgtaccaggctttcatttgaatctgctatgaaacgccttggaggtgaagtcttaactactgagaacgctagagagttttcgtctgccgcgaaaggggaaacacttgaagacacaataagaacagtggagggttattcagatataattgtgatgcgacattttgaaagcggtgctgcaagaaaagctgcagctactgccaatatacctgtcattaatgcaggtgatggtcctggagagcatcctactcaggctctattggacgtctataccatccaaagtgaaattggaaaattagatggcatcagtgtagccttagttggagaccttgccaacggaaggactgtgcggtctcttgcatacttgcttgccaagttcaaagacgtgaagatctactttgtttcccctgaaattgtgaaaatgaaggatgatataaaagactatttgacatcaagcggggttgaatgggaagaaagttcagatttaatggaagtagcatccaagtgtgatgtagtttatcaaacacgaatccaaagagagaggtttggagaaaggctggacctttacgaagcagctcgtgggaagtatatcgtagacaaggatctgttaggagtgatgcagaaaaaagctattatcatgcatcctttaccgagattggatgaaatcaccgcagatgttgatgctgatccaagagctgcctacttcagacaagcaaagaacggtttgttcattagaatggctcttctaaagctactgcttgtcggttggtgattggatagttcatggtcgttaagttaaatcctttaatggactgattctcaagcctaccatgagctcaaggaatctgcaataataaaatccgaagctttagtgatttttgagtgttaagcacaaaagctgtgatcttgatgttaattaaaagaaggatctgttggtttgttggttaaaagactgatatgaggaagagttgttgaacttaatgaataaattgatttgagct

SEQ ID NO: 43544 - protein, 390 aa, Arabidopsis thaliana
  peptide (1)..(390): Ceres Seq. ID no. 13592798
MSIASSLTSATLCGASVFPKALACSSEFPINLPSPFESSKICLTSFPASRDLKKNATLNLTRNVGPVRCHAMQAGTRELKKFELSDVIEGKQFDREMLSAIFDVAREMEKIEKSSSQSEILKGYLKATLFYEPSTRTRLSFESAMKRLGGEVLTTENAREFSSAAKGETLEDTIRTVEGYSDIIVMRHFESGAARKAAATANIPVINAGDGPGEHPTQALLDVYTIQSEIGKLDGISVALVGDLANGRTVRSLAYLLAKFKDVKIYFVSPEIVKMKDDIKDYLTSSGVEWEESSDLMEVASKCDVVYQTRIQRERFGERLDLYEAARGKYIVDKDLLGVMQKKAIIMHPLPRLDEITADVDADPRAAYFRQAKNGLFIRMALLKLLLVGW

SEQ ID NO: 43545 - protein, 319 aa, Arabidopsis thaliana
  peptide (1)..(319): Ceres Seq. ID no. 13592799
MQAGTRELKKFELSDVIEGKQFDREMLSAIFDVAREMEKIEKSSSQSEILKGYLKATLFYEPSTRTRLSFESAMKRLGGEVLTTENAREFSSAAKGETLEDTIRTVEGYSDIIVMRHFESGAARKAAATANIPVINAGDGPGEHPTQALLDVYTIQSEIGKLDGISVALVGDLANGRTVRSLAYLLAKFKDVKIYFVSPEIVKMKDDIKDYLTSSGVEWEESSDLMEVASKCDVVYQTRIQRERFGERLDLYEAARGKYIVDKDLLGVMQKKAIIMHPLPRLDEITADVDADPRAAYFRQAKNGLFIRMALLKLLLVGW

SEQ ID NO: 43546 - protein, 294 aa, Arabidopsis thaliana
  peptide (1)..(294): Ceres Seq. ID no. 13592800
MLSAIFDVAREMEKIEKSSSQSEILKGYLKATLFYEPSTRTRLSFESAMKRLGGEVLTTENAREFSSAAKGETLEDTIRTVEGYSDIIVMRHFESGAARKAAATANIPVINAGDGPGEHPTQALLDVYTIQSEIGKLDGISVALVGDLANGRTVRSLAYLLAKFKDVKIYFVSPEIVKMKDDIKDYLTSSGVEWEESSDLMEVASKCDVVYQTRIQRERFGERLDLYEAARGKYIVDKDLLGVMQKKAIIMHPLPRLDEITADVDADPRAAYFRQAKNGLFIRMALLKLLLVGW

SEQ ID NO: 43547 - DNA, 1488 bp, Arabidopsis thaliana
  misc_feature (1)..(1488): Ceres Seq. ID no. 12602889
  misc_feature (1)..(1488): Ortholog of  Ceres SEQ ID NO 13662164 as cited in SEQ ID NO 67158
gcgatccaaaccttcaaacacatctccggtagatatgaaaatccactcttgcctctccgccattcttctgttcctcttcttctctgcttcttccgctaaacaaaatgttcggacagagcgaatttcaggaagtgctggtgatgttttggaggatgatccagtgggaaagcttaaggtttatgtatatgagcttccaagcaagtacaacaagaaattactgcaaaaggatcctcgatgtcttacacacatgtttgctgctgagatttttatgcacaggttccttttatctagtcctgttcgaacgcgtaatcctgatgaagctgattggttttacacgccaatttatcctacttgcgacctcactcctaccggcttgccattaccgtttaaatcgccgcgtatgatgagaagttcgatacaactaatctcatcaaattggccttattggaatcggactgaaggagctgatcacttctttgttgtgccccatgactttggagcttgcttccattatcaggaggaaaaagccattgaaagagggatacttccactactccagcgtgccactttggttcagacatttggtcaaaggaaccatgtctgtttggacgaaggctcgatcactattcctccttttgcacctccacagaagatgcaggcccattttattcctccagatattccacgctctatctttgtctacttccgcggtttattttatgatgttaacaacgaccccgaaggtggatattatgcaagaggtgcaagagcagcggtgtgggagaacttcaagaacaaccctttgtttgacatctcaacagatcacccgacaacatactacgaagacatgcagagagccatcttctgtctatgtcctctaggatgggctccatggagccctaggttagttgaagcagttgtgtttgggtgcattccagttatcatagcagacgacatagtactgcctttcgcagacgccatcccctgggaagaaataggagtctttgttgcggaaaaagacgtccctgaactagacacgatcctaacctcaataccaacagaagtgatcctcagaaaacagagactcctcgcaaatccttcgatgaaacgagccatgcttttccctcaacctgcacaaccaggggatgcattccatcagatacttaacgggctagctcggaagttaccccacgacaaaagcatatacttgaagacaggtgagaaggcactgaactggactgctggtccggttgctgacctgaaaccttggtaaagtcagaaagagaggaatctttttgtatatcttgggtttcacctagagcatacgttgttgcctttctatagcacttcaaaaacattagaagtccaagtcctccgagtggattttttttgtagataacattagtacatttactcgaggtacatgtaccaagtttgttgtacattttctcttcgattgatcatataatactgtacactccttttgtc

SEQ ID NO: 43548 - protein, 423 aa, Arabidopsis thaliana
  peptide (1)..(423): Ceres Seq. ID no. 12602890
RSKPSNTSPVDMKIHSCLSAILLFLFFSASSAKQNVRTERISGSAGDVLEDDPVGKLKVYVYELPSKYNKKLLQKDPRCLTHMFAAEIFMHRFLLSSPVRTRNPDEADWFYTPIYPTCDLTPTGLPLPFKSPRMMRSSIQLISSNWPYWNRTEGADHFFVVPHDFGACFHYQEEKAIERGILPLLQRATLVQTFGQRNHVCLDEGSITIPPFAPPQKMQAHFIPPDIPRSIFVYFRGLFYDVNNDPEGGYYARGARAAVWENFKNNPLFDISTDHPTTYYEDMQRAIFCLCPLGWAPWSPRLVEAVVFGCIPVIIADDIVLPFADAIPWEEIGVFVAEKDVPELDTILTSIPTEVILRKQRLLANPSMKRAMLFPQPAQPGDAFHQILNGLARKLPHDKSIYLKTGEKALNWTAGPVADLKPW

SEQ ID NO: 43549 - protein, 412 aa, Arabidopsis thaliana
  peptide (1)..(412): Ceres Seq. ID no. 12602891
MKIHSCLSAILLFLFFSASSAKQNVRTERISGSAGDVLEDDPVGKLKVYVYELPSKYNKKLLQKDPRCLTHMFAAEIFMHRFLLSSPVRTRNPDEADWFYTPIYPTCDLTPTGLPLPFKSPRMMRSSIQLISSNWPYWNRTEGADHFFVVPHDFGACFHYQEEKAIERGILPLLQRATLVQTFGQRNHVCLDEGSITIPPFAPPQKMQAHFIPPDIPRSIFVYFRGLFYDVNNDPEGGYYARGARAAVWENFKNNPLFDISTDHPTTYYEDMQRAIFCLCPLGWAPWSPRLVEAVVFGCIPVIIADDIVLPFADAIPWEEIGVFVAEKDVPELDTILTSIPTEVILRKQRLLANPSMKRAMLFPQPAQPGDAFHQILNGLARKLPHDKSIYLKTGEKALNWTAGPVADLKPW

SEQ ID NO: 43550 - protein, 341 aa, Arabidopsis thaliana
  peptide (1)..(341): Ceres Seq. ID no. 12602892
MFAAEIFMHRFLLSSPVRTRNPDEADWFYTPIYPTCDLTPTGLPLPFKSPRMMRSSIQLISSNWPYWNRTEGADHFFVVPHDFGACFHYQEEKAIERGILPLLQRATLVQTFGQRNHVCLDEGSITIPPFAPPQKMQAHFIPPDIPRSIFVYFRGLFYDVNNDPEGGYYARGARAAVWENFKNNPLFDISTDHPTTYYEDMQRAIFCLCPLGWAPWSPRLVEAVVFGCIPVIIADDIVLPFADAIPWEEIGVFVAEKDVPELDTILTSIPTEVILRKQRLLANPSMKRAMLFPQPAQPGDAFHQILNGLARKLPHDKSIYLKTGEKALNWTAGPVADLKPW

SEQ ID NO: 43551 - DNA, 1936 bp, Arabidopsis thaliana
  misc_feature (1)..(1936): Ceres Seq. ID no. 13592801
  misc_feature (1)..(1936): Ortholog of  Ceres SEQ ID NO 14301475 as cited in SEQ ID NO 62936
  misc_feature (1)..(1936): Ortholog of  Ceres SEQ ID NO 13596935 as cited in SEQ ID NO 63031
  misc_feature (1)..(1936): Ortholog of  Ceres SEQ ID NO 15179123 as cited in SEQ ID NO 0
attcaatacacataatttacttctttctttataactaccatattctcaatcacaacactcgccactgtttcgaatagatggcttctatttcaaccccttttccgatttctctccacccaaaaaccgtacgatcaaagccgttgaaattccgagttttgacccgtccgatcaaagcttccgggtcagaaactcctgatctaaccgtagcgacacgaaccggatccaaagatctcccgatccgaaacataccgggaaactacggtttaccaatcgtaggaccaatcaaagaccgttgggattacttttacgaccaaggagctgaagagttcttcaaatcacgaatccgtaaatacaactccacggtgtacagagtcaacatgccaccgggagcttttatcgccgagaatccacaagtcgtggctttactcgacggtaaaagcttcccggttttattcgatgtcgataaagtcgaaaagaaagatctcttcaccggtacttacatgccgtcaacggaactcaccggaggctaccgtatcctctcgtacctcgatccatcggagccgaaacacgaaaagctcaaaaatctccttttcttcctcctcaagtcatctcgaaaccggatcttccctgagtttcaagctacttactccgagcttttcgattctttggagaaagagctttcccttaaagggaaagcggatttcggcggttccagcgacggaaccgcctttaatttcttggctcgagctttctacgggacgaatcccgcagatacaaagctcaaagccgacgcaccgggtttgatcactaaatgggttttattcaatctccatccattactctctattggtttaccgagagttatagaagaacctctcatccatacatttagtctaccaccggcgttagtcaaatctgattaccagagactctacgagtttttcttagaatccgccggtgatattctcgttgaagccgataaattgkktawacwcamkaaagttggaackggaggggaagctactcacaatcttctcttcgccacgtgcttcaacacgtggggtgggatgaagattttgtttccgaatatggttaaacggatcgggcgggcgggtcatcaagttcataacagattagcggaggagattagatctgtgattaaatccaacggtggagaactcacgatgggagcgattgagaaaatggagttaaccaaatcagtggtttacgaatgtctccggtttgaaccaccggttacggctcaatacggtagagcgaagaaggatttggttatcgaaagccacgacgcggcgtttaaagtcaaagccggtgaaatgctttacggttatcaaccgttggcgacgagagatccgaagatttttgatcgggcggatgagtttgtgccggagagattcgtcggagaagaaggagagaagcttttgaggcatgtgttgtggtcgaatggaccggagacggagactccgacggtggggaataaacaatgcgccggtaaggattttgttgttttggtggcgaggttgtttgtgattgagattttccggcgatatgattcgtttgatattgaggttggtacgtcgccgttaggaagctccgttaatttctcgtcgttaaggaaagctagcttttaggagccaagggtaaaatttgtaattgtttatgttcgcacgtgtgtagtccatctgttttcttgttccagtttcgtgaattttgagaaaatgttgtataatctgttgctgctctacatgttcgttttttttgtcataatattaaagttcaagctggtaataagtatttacaaatctgtgagataatttcaaatacacaagagcatattctttataaaaaaagcacgagttttttacactcaaattttttttgagcctgtgaataataggttttttttaaaaaaaaaccc

SEQ ID NO: 43552 - protein, 523 aa, Arabidopsis thaliana
  peptide (1)..(523): Ceres Seq. ID no. 15221157
  misc_feature (304)..(304): Xaa is any aa, unknown or other
  misc_feature (305)..(305): Xaa is any aa, unknown or other
  misc_feature (306)..(306): Xaa is any aa, unknown or other
  misc_feature (307)..(307): Xaa is any aa, unknown or other
  misc_feature (311)..(311): Xaa is any aa, unknown or other
MASISTPFPISLHPKTVRSKPLKFRVLTRPIKASGSETPDLTVATRTGSKDLPIRNIPGNYGLPIVGPIKDRWDYFYDQGAEEFFKSRIRKYNSTVYRVNMPPGAFIAENPQVVALLDGKSFPVLFDVDKVEKKDLFTGTYMPSTELTGGYRILSYLDPSEPKHEKLKNLLFFLLKSSRNRIFPEFQATYSELFDSLEKELSLKGKADFGGSSDGTAFNFLARAFYGTNPADTKLKADAPGLITKWVLFNLHPLLSIGLPRVIEEPLIHTFSLPPALVKSDYQRLYEFFLESAGDILVEADKLXXXXKVGXGGEATHNLLFATCFNTWGGMKILFPNMVKRIGRAGHQVHNRLAEEIRSVIKSNGGELTMGAIEKMELTKSVVYECLRFEPPVTAQYGRAKKDLVIESHDAAFKVKAGEMLYGYQPLATRDPKIFDRADEFVPERFVGEEGEKLLRHVLWSNGPETETPTVGNKQCAGKDFVVLVARLFVIEIFRRYDSFDIEVGTSPLGSSVNFSSLRKASF

SEQ ID NO: 43553 - protein, 423 aa, Arabidopsis thaliana
  peptide (1)..(423): Ceres Seq. ID no. 15221158
  misc_feature (204)..(204): Xaa is any aa, unknown or other
  misc_feature (205)..(205): Xaa is any aa, unknown or other
  misc_feature (206)..(206): Xaa is any aa, unknown or other
  misc_feature (207)..(207): Xaa is any aa, unknown or other
  misc_feature (211)..(211): Xaa is any aa, unknown or other
MPPGAFIAENPQVVALLDGKSFPVLFDVDKVEKKDLFTGTYMPSTELTGGYRILSYLDPSEPKHEKLKNLLFFLLKSSRNRIFPEFQATYSELFDSLEKELSLKGKADFGGSSDGTAFNFLARAFYGTNPADTKLKADAPGLITKWVLFNLHPLLSIGLPRVIEEPLIHTFSLPPALVKSDYQRLYEFFLESAGDILVEADKLXXXXKVGXGGEATHNLLFATCFNTWGGMKILFPNMVKRIGRAGHQVHNRLAEEIRSVIKSNGGELTMGAIEKMELTKSVVYECLRFEPPVTAQYGRAKKDLVIESHDAAFKVKAGEMLYGYQPLATRDPKIFDRADEFVPERFVGEEGEKLLRHVLWSNGPETETPTVGNKQCAGKDFVVLVARLFVIEIFRRYDSFDIEVGTSPLGSSVNFSSLRKASF

SEQ ID NO: 43554 - protein, 382 aa, Arabidopsis thaliana
  peptide (1)..(382): Ceres Seq. ID no. 15221159
  misc_feature (163)..(163): Xaa is any aa, unknown or other
  misc_feature (164)..(164): Xaa is any aa, unknown or other
  misc_feature (165)..(165): Xaa is any aa, unknown or other
  misc_feature (166)..(166): Xaa is any aa, unknown or other
  misc_feature (170)..(170): Xaa is any aa, unknown or other
MPSTELTGGYRILSYLDPSEPKHEKLKNLLFFLLKSSRNRIFPEFQATYSELFDSLEKELSLKGKADFGGSSDGTAFNFLARAFYGTNPADTKLKADAPGLITKWVLFNLHPLLSIGLPRVIEEPLIHTFSLPPALVKSDYQRLYEFFLESAGDILVEADKLXXXXKVGXGGEATHNLLFATCFNTWGGMKILFPNMVKRIGRAGHQVHNRLAEEIRSVIKSNGGELTMGAIEKMELTKSVVYECLRFEPPVTAQYGRAKKDLVIESHDAAFKVKAGEMLYGYQPLATRDPKIFDRADEFVPERFVGEEGEKLLRHVLWSNGPETETPTVGNKQCAGKDFVVLVARLFVIEIFRRYDSFDIEVGTSPLGSSVNFSSLRKASF

SEQ ID NO: 43555 - DNA, 1894 bp, Arabidopsis thaliana
  misc_feature (1)..(1894): Ceres Seq. ID no. 12338500
  misc_feature (1)..(1894): Ortholog of  Ceres SEQ ID NO 14304811 as cited in SEQ ID NO 53097
aacaccgtgacagctccttagatctctcctcggttacttcctttttaatttccatggctctctaaaaatctctctctctttctctctctcttacttgtattgttacgatctctgcttgaagattatggacggcgccgatggaaccgttcgcgtcaagcctggtcgcggattcgaaacggagacggatgttgcggtttcgtcgccagtgacacgtcagaaagctgctgcagctaagcaattcatcgagaatcattataagaattacttgcaaggcttgcacgaacgaatggagagacgcagggagtttcagaggaaagtgcaagaagctcagttacctgttgaggaacaagacgagatgatgaggaatctggctcgtcgtgaaactgagtatatgagacttcagagacgtaaaattgggattgatgattttgagcttttgaccgttattggcaaaggtgcctttggtgaggttagattatgtcgtttgagatctacatctgaagtttatgccatgaagaaattgaaaaaaactgagatgcttagccgtggacaggtagagcatgtcaggtccgagaggaacttacttgcagaagttgacagccgttacattgtaaagcttttttactcttttcaagattctgaatgtttgtatcttatcatggagtatttacctgggggtgacatcatgacactactcatgagagaagacattctttctgaagatgttgcccgtttttatattgctgagagcattcttgccatccattcaattcatcaacacaactatgttcacagggacatcaaacctgataatttgatactagacaaaagtgggcatttgaagctttcagattttggtttatgtaagccacttgatgacaagtattcttcattgctattagaagacgatgaaatgttgtctcaggattcagagaaccagtcaggaaaatcagacgctgacaaagcaccctggcaaatgcctaaagagcagttactgcagtggaaacgcaatcgccgtgcattggcttattcaaccgttggaactcttgattacatggctccagaagtactcctaaagaaaggatatggaatggaatgtgattggtggtctctcggcgcaattttgtatgagatgttagttgggtatcccccattctgttctgatgacccccgtataacatgccgcaagataattaattggagggtatgcttgaagttccctgaacaaccaaaaatatcagatgaagccagagacttgatttgtcggttgctttgtgatgttgattcaaggttgggaaccagaggtgttgaggagataaagtcgcatccatggttcaaaggcaccccatgggacaaactgtatgacatggaggcagcttatagacccattgtcgatggagaactagacacacaaaattttgagaagtttcctgaagttgaaggatcaccatccgaagcaccacaagttggtccttggagaaagatgttgacgtccaaggacaccaacttcataggatttacatttaagaagtcagacatcacaagatcaatggaaagttcaggtgcagacatgaaatcaaatggatcaggggaagccccgtcgttgatatcattgttaggtcggatcaatatggaagaaggtgaaggtggtgagttaaaccacaagacatagggaaaatacaaatattattgattttttatccgcttgcagttgttttgatcatttggcagaggcaatggagaggcgatggtagttttttaaccacatcacttatgatggggttcataaaaacttctatttcctttttttttcttgtaacatatttgtttttttttcaatctaaaaaagaaactgtaaagcatggaagaataatttctggaacattttaccccc

SEQ ID NO: 43556 - protein, 515 aa, Arabidopsis thaliana
  peptide (1)..(515): Ceres Seq. ID no. 12338501
MDGADGTVRVKPGRGFETETDVAVSSPVTRQKAAAAKQFIENHYKNYLQGLHERMERRREFQRKVQEAQLPVEEQDEMMRNLARRETEYMRLQRRKIGIDDFELLTVIGKGAFGEVRLCRLRSTSEVYAMKKLKKTEMLSRGQVEHVRSERNLLAEVDSRYIVKLFYSFQDSECLYLIMEYLPGGDIMTLLMREDILSEDVARFYIAESILAIHSIHQHNYVHRDIKPDNLILDKSGHLKLSDFGLCKPLDDKYSSLLLEDDEMLSQDSENQSGKSDADKAPWQMPKEQLLQWKRNRRALAYSTVGTLDYMAPEVLLKKGYGMECDWWSLGAILYEMLVGYPPFCSDDPRITCRKIINWRVCLKFPEQPKISDEARDLICRLLCDVDSRLGTRGVEEIKSHPWFKGTPWDKLYDMEAAYRPIVDGELDTQNFEKFPEVEGSPSEAPQVGPWRKMLTSKDTNFIGFTFKKSDITRSMESSGADMKSNGSGEAPSLISLLGRINMEEGEGGELNHKT

SEQ ID NO: 43557 - protein, 461 aa, Arabidopsis thaliana
  peptide (1)..(461): Ceres Seq. ID no. 12338502
MERRREFQRKVQEAQLPVEEQDEMMRNLARRETEYMRLQRRKIGIDDFELLTVIGKGAFGEVRLCRLRSTSEVYAMKKLKKTEMLSRGQVEHVRSERNLLAEVDSRYIVKLFYSFQDSECLYLIMEYLPGGDIMTLLMREDILSEDVARFYIAESILAIHSIHQHNYVHRDIKPDNLILDKSGHLKLSDFGLCKPLDDKYSSLLLEDDEMLSQDSENQSGKSDADKAPWQMPKEQLLQWKRNRRALAYSTVGTLDYMAPEVLLKKGYGMECDWWSLGAILYEMLVGYPPFCSDDPRITCRKIINWRVCLKFPEQPKISDEARDLICRLLCDVDSRLGTRGVEEIKSHPWFKGTPWDKLYDMEAAYRPIVDGELDTQNFEKFPEVEGSPSEAPQVGPWRKMLTSKDTNFIGFTFKKSDITRSMESSGADMKSNGSGEAPSLISLLGRINMEEGEGGELNHKT

SEQ ID NO: 43558 - protein, 438 aa, Arabidopsis thaliana
  peptide (1)..(438): Ceres Seq. ID no. 12338503
MMRNLARRETEYMRLQRRKIGIDDFELLTVIGKGAFGEVRLCRLRSTSEVYAMKKLKKTEMLSRGQVEHVRSERNLLAEVDSRYIVKLFYSFQDSECLYLIMEYLPGGDIMTLLMREDILSEDVARFYIAESILAIHSIHQHNYVHRDIKPDNLILDKSGHLKLSDFGLCKPLDDKYSSLLLEDDEMLSQDSENQSGKSDADKAPWQMPKEQLLQWKRNRRALAYSTVGTLDYMAPEVLLKKGYGMECDWWSLGAILYEMLVGYPPFCSDDPRITCRKIINWRVCLKFPEQPKISDEARDLICRLLCDVDSRLGTRGVEEIKSHPWFKGTPWDKLYDMEAAYRPIVDGELDTQNFEKFPEVEGSPSEAPQVGPWRKMLTSKDTNFIGFTFKKSDITRSMESSGADMKSNGSGEAPSLISLLGRINMEEGEGGELNHKT

SEQ ID NO: 43559 - DNA, 1338 bp, Arabidopsis thaliana
  misc_feature (1)..(1338): Ceres Seq. ID no. 12389117
  misc_feature (1)..(1338): Ortholog of  Ceres SEQ ID NO 15170986 as cited in SEQ ID NO 55328
aaaaacattattcccctctgtggtctctctctcacgagcatcgtttcttcatcgatctcatagttaccggcgttgttttgaggccactaccgtcgtctctctccgtaatcgtctccaacatcatcatcttctcaatttcgaagcattttattctctaatagtgctctctctatatctgggttcgtgttcgtctggaagagacctggaaaaacaattcaggaagacgattagttgtgttcgtgttcgtccctaatccctaaaggactcaggaatgaatctttctccgttcaagagagatatcgatgagctgatagacgagtttgtggaggatgatttgacaacctttgctgatatgaagagtgtctggctatctagaaagttttctcatatatatgaagctagtcctaacagcaacctagcctttttcatgcagtcactatatgttcataccattggtcacatggttagtattgattctttttcacggagacttggaggtctttactgtctctattgccttcatgagatccaaccctttaaacccaagttcagaatctatatctcacttcaagagcttgggaaatttagggatcttgtagttgaggcaaaagataaaggtgtagagatagctgctgctgtggcaaaaaaaatgcttgatgagaacatgttaatatttggagctgtggatgagacatctgcaaccaagacaattcatcaattaaccgagctacagaacgcacgtgtgcggtttgcctatgagaagttaatctgtgacactagtattaaccaatttattcatttggatatgggtaaggaagttgatctgaattccctagataaaatgtctatagaatatgcagaggccaagaagcgtgcagtcgaaggtgcaggagaaataatggagattgatgacataaagcatatatcagaagagaaagagttgatgggagagagaatggagaaattgaaagaggaatgggattcacaaagactttacttttatgaacaaaccaagcttgatggttttactacgacaccaaaacagttgacaaatgtggaacatgatgaagatgatgggtttgatgagcttgatcgcttactttctcaaagctagtgttgccattgcaatcactgatcgatatcagagtcaggtttgtaggagagagctacacacacactctcacaaaatcaagagagcatgtttgattaggagaatatattggttagtaaattctgtatctaacaaggagattaagaaaattttaattacggtttttcttacgattggaaattatgtagtttgtcatattctcagagtatatgtgatttgataatctt

SEQ ID NO: 43560 - protein, 280 aa, Arabidopsis thaliana
  peptide (1)..(280): Ceres Seq. ID no. 12389118
MNLSPFKRDIDELIDEFVEDDLTTFADMKSVWLSRKFSHIYEASPNSNLAFFMQSLYVHTIGHMVSIDSFSRRLGGLYCLYCLHEIQPFKPKFRIYISLQELGKFRDLVVEAKDKGVEIAAAVAKKMLDENMLIFGAVDETSATKTIHQLTELQNARVRFAYEKLICDTSINQFIHLDMGKEVDLNSLDKMSIEYAEAKKRAVEGAGEIMEIDDIKHISEEKELMGERMEKLKEEWDSQRLYFYEQTKLDGFTTTPKQLTNVEHDEDDGFDELDRLLSQS

SEQ ID NO: 43561 - protein, 253 aa, Arabidopsis thaliana
  peptide (1)..(253): Ceres Seq. ID no. 12389119
MKSVWLSRKFSHIYEASPNSNLAFFMQSLYVHTIGHMVSIDSFSRRLGGLYCLYCLHEIQPFKPKFRIYISLQELGKFRDLVVEAKDKGVEIAAAVAKKMLDENMLIFGAVDETSATKTIHQLTELQNARVRFAYEKLICDTSINQFIHLDMGKEVDLNSLDKMSIEYAEAKKRAVEGAGEIMEIDDIKHISEEKELMGERMEKLKEEWDSQRLYFYEQTKLDGFTTTPKQLTNVEHDEDDGFDELDRLLSQS

SEQ ID NO: 43562 - protein, 228 aa, Arabidopsis thaliana
  peptide (1)..(228): Ceres Seq. ID no. 12389120
MQSLYVHTIGHMVSIDSFSRRLGGLYCLYCLHEIQPFKPKFRIYISLQELGKFRDLVVEAKDKGVEIAAAVAKKMLDENMLIFGAVDETSATKTIHQLTELQNARVRFAYEKLICDTSINQFIHLDMGKEVDLNSLDKMSIEYAEAKKRAVEGAGEIMEIDDIKHISEEKELMGERMEKLKEEWDSQRLYFYEQTKLDGFTTTPKQLTNVEHDEDDGFDELDRLLSQS

SEQ ID NO: 43563 - DNA, 529 bp, Arabidopsis thaliana
  misc_feature (1)..(529): Ceres Seq. ID no. 13500001
  misc_feature (1)..(529): Ortholog of  Ceres SEQ ID NO 12556794 as cited in SEQ ID NO 23
  misc_feature (1)..(529): Ortholog of  Ceres SEQ ID NO 13595787 as cited in SEQ ID NO 59785
gtaacacaaatacaccaaaaaaaaaaaaacagaaagtaacatgagatctctcttattagccgtgtgcctggttcttgctttacactgcggtgaagcagccgtgtcttgcaacacggtgattgcggatctttacccttgcttatcctacgtgactcagggcggaccggtcccaaccctctgctgcaacggtctcacaacactcaagagtcaggctcaaacttctgtggaccgtcagggggtctgtcgttgcatcaaatctgctattggaggactcactctctctcctagaaccatccaaaatgctttggaattgccttctaaatgtggtgtcgatctcccttacaagttcagcccttccactgactgcgacagtatccagtgagacaagcagaaaatcttaaaggaagctactacaagaactataataacctaataattaataaatgagggcattggtttgctagttgctaattgatcagtgatgtattgtcattttgaatgttctaatatcagcaggcacttatctctg

SEQ ID NO: 43564 - protein, 113 aa, Arabidopsis thaliana; identical to SEQ ID NO: 36177
  peptide (1)..(113): Ceres Seq. ID no. 13500002

SEQ ID NO: 43565 - DNA, 1251 bp, Arabidopsis thaliana
  misc_feature (1)..(1251): Ceres Seq. ID no. 13593313
  misc_feature (1)..(1251): Ortholog of  Ceres SEQ ID NO 14313666 as cited in SEQ ID NO 54618
  misc_feature (1)..(1251): Ortholog of  Ceres SEQ ID NO 13639645 as cited in SEQ ID NO 57488
ataatgaattaaagaatcacatttcatacaacctttctatcattttccaataatggcccggacagtaagtctctggcggagagaggccgtgttcttgacggccatgctggcgacagaaaccggcgtagtcggaataagtactttgtttaaagtagcaacttcaaagggactcaatctttacgctttcctcggctattcttatcttcttgcttctctccttcttcttccttctctgttcttcaccgacaggtcaagatcacttcctccactaagtttgtcaatactttctaaaataggacttcttggattgctaggatcaatgtatgtgatcacaggatacataggcatcgaatacagcagcccaaccttagcctctgccattagcaatatcactcctgctcttaccttcatcctcgccattatcttcagaatggaaaaagtatctttcaaagaaaggagcagtgtagccaaagtgatggggacgatattgtcgttaataggcgcacttgttgtggttctctaccatggtccacgtgtctttgttgcatcttctccgccgtatataaacttccgtcagctttctccgccgttatcatcttcaaattcagattggctcatcggcggagctcttcttaccataagagacatctttgtttctgtttctttcattctccaggcaaaaataatgagtacatatccagcagcattcacagtctccttcctctacattgtatcggtttcaatcgtgacttcaatgattggactagtagtggaaaagaacaatccaagcgtttggatcattcgatttgatattactttgataacaattgtaactatggcaataattacttcagtatactatgtgatccattcatggacagtacgtcacaaaggacctctatacttagcgatatttaagcctttgtcgattttaatagcggtggttatgagcgcagtttttctcaacgattctctctatctcggatgtttgataggaggactattgataacgttggggttttacgctgtgatgtggggtaaagcaaacgaagagaaagatcaattgttgttagtttcaggaaaagagagaacccctcttctattgaacggctaanntggccaaattagaattaaaaataaattagaactaatttacatattcttagccacacttttgggtaatgtgtacatgtatattactactctatttcatgttgcgctttgtttataacttgaataattgttttaacc

SEQ ID NO: 43566 - protein, 353 aa, Arabidopsis thaliana
  peptide (1)..(353): Ceres Seq. ID no. 15221208
MARTVSLWRREAVFLTAMLATETGVVGISTLFKVATSKGLNLYAFLGYSYLLASLLLLPSLFFTDRSRSLPPLSLSILSKIGLLGLLGSMYVITGYIGIEYSSPTLASAISNITPALTFILAIIFRMEKVSFKERSSVAKVMGTILSLIGALVVVLYHGPRVFVASSPPYINFRQLSPPLSSSNSDWLIGGALLTIRDIFVSVSFILQAKIMSTYPAAFTVSFLYIVSVSIVTSMIGLVVEKNNPSVWIIRFDITLITIVTMAIITSVYYVIHSWTVRHKGPLYLAIFKPLSILIAVVMSAVFLNDSLYLGCLIGGLLITLGFYAVMWGKANEEKDQLLLVSGKERTPLLLNG

SEQ ID NO: 43567 - protein, 336 aa, Arabidopsis thaliana
  peptide (1)..(336): Ceres Seq. ID no. 15221209
MLATETGVVGISTLFKVATSKGLNLYAFLGYSYLLASLLLLPSLFFTDRSRSLPPLSLSILSKIGLLGLLGSMYVITGYIGIEYSSPTLASAISNITPALTFILAIIFRMEKVSFKERSSVAKVMGTILSLIGALVVVLYHGPRVFVASSPPYINFRQLSPPLSSSNSDWLIGGALLTIRDIFVSVSFILQAKIMSTYPAAFTVSFLYIVSVSIVTSMIGLVVEKNNPSVWIIRFDITLITIVTMAIITSVYYVIHSWTVRHKGPLYLAIFKPLSILIAVVMSAVFLNDSLYLGCLIGGLLITLGFYAVMWGKANEEKDQLLLVSGKERTPLLLNG

SEQ ID NO: 43568 - protein, 264 aa, Arabidopsis thaliana
  peptide (1)..(264): Ceres Seq. ID no. 15221210
MYVITGYIGIEYSSPTLASAISNITPALTFILAIIFRMEKVSFKERSSVAKVMGTILSLIGALVVVLYHGPRVFVASSPPYINFRQLSPPLSSSNSDWLIGGALLTIRDIFVSVSFILQAKIMSTYPAAFTVSFLYIVSVSIVTSMIGLVVEKNNPSVWIIRFDITLITIVTMAIITSVYYVIHSWTVRHKGPLYLAIFKPLSILIAVVMSAVFLNDSLYLGCLIGGLLITLGFYAVMWGKANEEKDQLLLVSGKERTPLLLNG

SEQ ID NO: 43569 - DNA, 1577 bp, Arabidopsis thaliana
  misc_feature (1)..(1577): Ceres Seq. ID no. 12331009
  misc_feature (1)..(1577): Ortholog of  Ceres SEQ ID NO 14307296 as cited in SEQ ID NO 53966
  misc_feature (1)..(1577): Ortholog of  Ceres SEQ ID NO 15175368 as cited in SEQ ID NO 60071
  misc_feature (1)..(1577): Ortholog of  Ceres SEQ ID NO 13528157 as cited in SEQ ID NO 60102
  misc_feature (1)..(1577): Ortholog of  Ceres SEQ ID NO 15225423 as cited in SEQ ID NO 64689
atttttgtcactgggagggaagggagagagtgaaaaattgaaaatatctagtttttttttctctctcttgcttttaggctttaggctttcactactaatactctcttagtttaagacattgccttcacatccaaacacaaatgcaaatctttgtctcctctcttccttcaaagtctttcattacaaaaccctaatatctctaatcttctctctgtctctcttaagggcaatatcttcaatagagttctgaactttggaagcatattaagatatcaaagtaattttctacttttagttgtgaagctagtctctcctctgtccccaaaccaagaaacaatttgcaaagagaaagcaaaaggtttttgaagaagacccaattaaaaaagatggaaattgcaagtcaagaagatcatgatatgcccatcccattaaacactacatttggtggtggtggtagtcatggtcacatgatccatcatcatgatcatcatgctgctaattctgctcctccaactcacaacaacaacaatactactcaaccacctccaatgccgttacatggtaatggtcatggcaacaattatgatcatcatcatcatcaagatcctcatcatgttggttacaacgctatcatcaagaagcctatgataaagtacaaggagtgtctcaagaaccatgcagcagctatgggaggcaatgctactgatgggtgtggagagtttatgccaagtggtgaagatggctccattgaggctctcacttgctcagcttgcaattgccacaggaacttccatagaaaagaagtggaaggcgaactcgcagccaccgccatgtccccttaccaccaacaccctccacaccgaaaactcatgctcaaccaccaaaagatcagatcagctatgccacaccaaatgatcatgcccattggagtctctaactaccggtacatgcataacaactccgagtccgaggactttatggaggaagatggcgtaaccaccgcatctagatcgctaccaaacctgccatacaaccagaagaagaggttcaggacaaagttcacgccggaacagaaggagaagatgcttagttttgctgagaaagttgggtggaaaatacaaaggcaagaagattgtgttgttcaaaggttttgtgaagagattggagtgaagagaagagtgcttaaggtttggatgcacaacaacaagatccatttctccaagaagaacaacattaacctcgaagacaacgacaacgaaaagatcaacaatctcaacaatgttgatctgtccggtaataacgacatgactaagatcgtcccatgatataattaataacgttatttttatatgatctttgataattatttagttatctttatgttagctactagggttttaattttatcttctagctggtttggttttattttatatatataagctcatttcgctatctctcgttaaacccatggattttatataattttctgctctttgttgtgttttatttatttggaagttatatatattaatcttgttgtaataaatgtatgaccagccgtatttttcttcttc

SEQ ID NO: 43570 - protein, 312 aa, Arabidopsis thaliana
  peptide (1)..(312): Ceres Seq. ID no. 12331010
MEIASQEDHDMPIPLNTTFGGGGSHGHMIHHHDHHAANSAPPTHNNNNTTQPPPMPLHGNGHGNNYDHHHHQDPHHVGYNAIIKKPMIKYKECLKNHAAAMGGNATDGCGEFMPSGEDGSIEALTCSACNCHRNFHRKEVEGELAATAMSPYHQHPPHRKLMLNHQKIRSAMPHQMIMPIGVSNYRYMHNNSESEDFMEEDGVTTASRSLPNLPYNQKKRFRTKFTPEQKEKMLSFAEKVGWKIQRQEDCVVQRFCEEIGVKRRVLKVWMHNNKIHFSKKNNINLEDNDNEKINNLNNVDLSGNNDMTKIVP

SEQ ID NO: 43571 - protein, 302 aa, Arabidopsis thaliana
  peptide (1)..(302): Ceres Seq. ID no. 12331011
MPIPLNTTFGGGGSHGHMIHHHDHHAANSAPPTHNNNNTTQPPPMPLHGNGHGNNYDHHHHQDPHHVGYNAIIKKPMIKYKECLKNHAAAMGGNATDGCGEFMPSGEDGSIEALTCSACNCHRNFHRKEVEGELAATAMSPYHQHPPHRKLMLNHQKIRSAMPHQMIMPIGVSNYRYMHNNSESEDFMEEDGVTTASRSLPNLPYNQKKRFRTKFTPEQKEKMLSFAEKVGWKIQRQEDCVVQRFCEEIGVKRRVLKVWMHNNKIHFSKKNNINLEDNDNEKINNLNNVDLSGNNDMTKIVP

SEQ ID NO: 43572 - protein, 285 aa, Arabidopsis thaliana
  peptide (1)..(285): Ceres Seq. ID no. 12331012
MIHHHDHHAANSAPPTHNNNNTTQPPPMPLHGNGHGNNYDHHHHQDPHHVGYNAIIKKPMIKYKECLKNHAAAMGGNATDGCGEFMPSGEDGSIEALTCSACNCHRNFHRKEVEGELAATAMSPYHQHPPHRKLMLNHQKIRSAMPHQMIMPIGVSNYRYMHNNSESEDFMEEDGVTTASRSLPNLPYNQKKRFRTKFTPEQKEKMLSFAEKVGWKIQRQEDCVVQRFCEEIGVKRRVLKVWMHNNKIHFSKKNNINLEDNDNEKINNLNNVDLSGNNDMTKIVP

SEQ ID NO: 43573 - DNA, 617 bp, Arabidopsis thaliana
  misc_feature (1)..(617): Ceres Seq. ID no. 13576587
  misc_feature (1)..(617): Ortholog of  Ceres SEQ ID NO 14307484 as cited in SEQ ID NO 59427
acataccacaaacacatcacacttatagcaaaaataattaatctctctcccatatcacaaaggagaaaaacaatatgacaacatatggcaccaatcagaagtcgtctaacgacttagcccccaagctggagtacatcacccgtggcatcaaccaacacaaaagatccggcctcgccacgcgccgcccttggaagcaaatgctagacctcggttccttcaacttcccccgcaaactagccaccgtgatcactagaatcagagccaacacggtctatttccagaccaattacaccattgtcgtcctcttctccgtatttctcagcctgatttggaatcccttctccctcttagttctactcgccctactcggtgcatggctcttcctctacttcctccgtgatgaaccgctcactgtttttgaccgcgagattgaccaccgtatcgtacttataatcatgtctgttatcactctttccatcctttttttaactgatgcgaagctcaatatcgcggtggccatcgtggcaggtgccttggctgtgttgtctcatgcagctgttaggaaaactgaagatcttttccaaaccgacgaagaaaccagtcttttaaatccgtaa

SEQ ID NO: 43574 - protein, 180 aa, Arabidopsis thaliana
  peptide (1)..(180): Ceres Seq. ID no. 13576588
MTTYGTNQKSSNDLAPKLEYITRGINQHKRSGLATRRPWKQMLDLGSFNFPRKLATVITRIRANTVYFQTNYTIVVLFSVFLSLIWNPFSLLVLLALLGAWLFLYFLRDEPLTVFDREIDHRIVLIIMSVITLSILFLTDAKLNIAVAIVAGALAVLSHAAVRKTEDLFQTDEETSLLNP

SEQ ID NO: 43575 - protein, 139 aa, Arabidopsis thaliana
  peptide (1)..(139): Ceres Seq. ID no. 13576589
MLDLGSFNFPRKLATVITRIRANTVYFQTNYTIVVLFSVFLSLIWNPFSLLVLLALLGAWLFLYFLRDEPLTVFDREIDHRIVLIIMSVITLSILFLTDAKLNIAVAIVAGALAVLSHAAVRKTEDLFQTDEETSLLNP

SEQ ID NO: 43576 - DNA, 1763 bp, Arabidopsis thaliana
  misc_feature (1)..(1763): Ceres Seq. ID no. 13491005
  misc_feature (1)..(1763): Ortholog of  Ceres SEQ ID NO 13598368 as cited in SEQ ID NO 62140
atcaagcttttgaagcttctcaacaatggcggctattccttcccacaacaaccttcttaccatcaaccacaaaaactccataaccggttcttcttccctaaataccaatttctcagaaatcaattttcccgccaaattccgagtagctacgagagctttgtccagaaccgacgagtcgtctttatccgccgtgatttctcgcctcgagcgagaaaggcgggaaagacaaggtttattaatcgaggaagcggaaggagctggagaactatggatgacggcggaagatattcgccggcgagataaaaaaaccgaagaagaaagaagactaagagacacgtggcgtaagatccaaggagaagacgattgggccgggttaatggatccaatggatccaattcttagatcggagctaatccgttacggcgaaatggctcaagcttgttacgacgctttcgatttcgatcccgcttccaaatactgcggcacctccaggttcacgcgactcgagttcttcgattctctcggaatgatcgattccggttacgaggtggcgcgttacctctacgcgacgtcgaacatcaatctcccgaacttcttctcgaaatcgcggtggtctaaagtctggagcaaaaacgctaattggatgggatacgtcgccgtttcagacgacgaaacgtctcgtaaccgactcggccgccgtgatatcgcgattgcgtggagaggaaccgttacgaaacttgaatggatcgcggatctaaaggattatttaaaaccggtaaccgaaaacaagatccgatgccccgacccggccgttaaagtcgaatccggattcttagatctctacactgacaaagacacaacctgcaaattcgcgagattctcagcgcgtgaacagattttaacggaggtgaaacggttagtggaagaacacggcgacgacgatgattccgatttaagcatcaccgtgacgggacacagtctcggcggcgcgttagcgatattaagcgcgtacgatatagcggagatgagattgaatcggagtaagaaagggaaagtgattccggtgacggtgttgacatacggaggaccgagagttgggaacgttaggtttagggagaggatggaggaattgggagtgaaagtgatgagagtagtgaatgttcacgacgtggttcccaagtcgccgggattgtttttgaacgagagtagacctcacgcgctgatgaagatagcggaggggttgccgtggtgttatagccacgtgggggaggagctggcgttggatcatcagaactcgccgtttcttaaaccttccgttgatgtttctactgctcataatcttgaagctatgcttcatttacttgacgggtatcatggaaaaggagagagatttgtgctgtcgagtgggagagaccatgcgctagtgaacaaagcgtcggactttttgaaagagcatttacaaattccaccgttttggcgtcaagacgcgaataaaggaatggttcggaacagtgaaggtcgttggattcaagccgagcgtctccgttttgaggatcatcattctcctgatatccaccaccatctctctcagctccgtcttgatcatccttgttaatcacacgcacatatatataatatacacattttccctaatttgtaaatgacgcatccatcttttgaaaataaaatgtcacaatcatctcacttgcatgctttggtcaacgtacgttccctattaataaaacttattacgtttacgaggc

SEQ ID NO: 43577 - protein, 529 aa, Arabidopsis thaliana
  peptide (1)..(529): Ceres Seq. ID no. 13491006
MAAIPSHNNLLTINHKNSITGSSSLNTNFSEINFPAKFRVATRALSRTDESSLSAVISRLERERRERQGLLIEEAEGAGELWMTAEDIRRRDKKTEEERRLRDTWRKIQGEDDWAGLMDPMDPILRSELIRYGEMAQACYDAFDFDPASKYCGTSRFTRLEFFDSLGMIDSGYEVARYLYATSNINLPNFFSKSRWSKVWSKNANWMGYVAVSDDETSRNRLGRRDIAIAWRGTVTKLEWIADLKDYLKPVTENKIRCPDPAVKVESGFLDLYTDKDTTCKFARFSAREQILTEVKRLVEEHGDDDDSDLSITVTGHSLGGALAILSAYDIAEMRLNRSKKGKVIPVTVLTYGGPRVGNVRFRERMEELGVKVMRVVNVHDVVPKSPGLFLNESRPHALMKIAEGLPWCYSHVGEELALDHQNSPFLKPSVDVSTAHNLEAMLHLLDGYHGKGERFVLSSGRDHALVNKASDFLKEHLQIPPFWRQDANKGMVRNSEGRWIQAERLRFEDHHSPDIHHHLSQLRLDHPC

SEQ ID NO: 43578 - protein, 447 aa, Arabidopsis thaliana
  peptide (1)..(447): Ceres Seq. ID no. 13491007
MTAEDIRRRDKKTEEERRLRDTWRKIQGEDDWAGLMDPMDPILRSELIRYGEMAQACYDAFDFDPASKYCGTSRFTRLEFFDSLGMIDSGYEVARYLYATSNINLPNFFSKSRWSKVWSKNANWMGYVAVSDDETSRNRLGRRDIAIAWRGTVTKLEWIADLKDYLKPVTENKIRCPDPAVKVESGFLDLYTDKDTTCKFARFSAREQILTEVKRLVEEHGDDDDSDLSITVTGHSLGGALAILSAYDIAEMRLNRSKKGKVIPVTVLTYGGPRVGNVRFRERMEELGVKVMRVVNVHDVVPKSPGLFLNESRPHALMKIAEGLPWCYSHVGEELALDHQNSPFLKPSVDVSTAHNLEAMLHLLDGYHGKGERFVLSSGRDHALVNKASDFLKEHLQIPPFWRQDANKGMVRNSEGRWIQAERLRFEDHHSPDIHHHLSQLRLDHPC

SEQ ID NO: 43579 - protein, 412 aa, Arabidopsis thaliana
  peptide (1)..(412): Ceres Seq. ID no. 13491008
MDPMDPILRSELIRYGEMAQACYDAFDFDPASKYCGTSRFTRLEFFDSLGMIDSGYEVARYLYATSNINLPNFFSKSRWSKVWSKNANWMGYVAVSDDETSRNRLGRRDIAIAWRGTVTKLEWIADLKDYLKPVTENKIRCPDPAVKVESGFLDLYTDKDTTCKFARFSAREQILTEVKRLVEEHGDDDDSDLSITVTGHSLGGALAILSAYDIAEMRLNRSKKGKVIPVTVLTYGGPRVGNVRFRERMEELGVKVMRVVNVHDVVPKSPGLFLNESRPHALMKIAEGLPWCYSHVGEELALDHQNSPFLKPSVDVSTAHNLEAMLHLLDGYHGKGERFVLSSGRDHALVNKASDFLKEHLQIPPFWRQDANKGMVRNSEGRWIQAERLRFEDHHSPDIHHHLSQLRLDHPC

SEQ ID NO: 43580 - DNA, 1254 bp, Arabidopsis thaliana
  misc_feature (1)..(1254): Ceres Seq. ID no. 13492155
  misc_feature (1)..(1254): Ortholog of  Ceres SEQ ID NO 12635789 as cited in SEQ ID NO 0
agagtattttctagggtttcgttttttttaaagatttagagagaaaagtgagttattaagagattccaatcaaaatgagcgagaccgtcccaggtttggtgaccgtgatgggtaccgtgcaggtcctcgagctggtggtgagtttggaggtgaaaagggtggagctcctgcagattaccagccatctttccaaggaagtgggcgtggttttggccgtggtgctggtggctacagcgcagctgcaccatctggttcaggtttgccttgaaaaagaaatgtctttaggtgacagtaagaccatggaggagttttcagctttaaattttgcttttgtaattcagattccggaatccttcataatctctatctgagtttagttttgttgttgaatcaaacatccgatttaaagttatgttcattccatcttctctccaaaaaaaaaaaaaaaaaaaaaaaaaaagaaaaccctagttttttgctctctcgaagttccgtgcgactctctgctcgagcaagatctcctaccgatacaatgattatctcagaggctaaccgcaaagaaatctgcaagtacctcttcaaagaaggagtttgctttgcgaagaaggatttcaatcttgctaagcatccgttgatcgatgtccccaacctacaagtgattaagcttatgcagagtttcaaatccaaggagtatgttagggagacatttgcctggatgcattactattggtttttgaccaatgaagggatcgagttcttgagaacttatcttaatcttccatctgatgttgttcctgctactttgaagaagtcagctaagcctggtggtcgtccatttggtggcccacctggtgatcgctcaagaggacctcgccatgaaggaggagaccgtcccaggtttggtgaccgtgatgggtaccgtgcaggtcctcgagctggtggtgagtttggaggtgaaaagggtggagctcccgcagattaccagccatctttccaaggaagtggccgtggttttggccgtggtgctggtggctacagcgcagctgcaccatctggttcaggtttgccttgaaaaagaaatgtctttaggtgacagtaagaccatggaggagttttcagctttaaattttgcttttgtaattcagattccggaatccttcataatctctatctgagtttagttttgttgttgaatcaaacatccgatttaaagttatgttcattccatcttctcttcaaaaaaaaaaaaaaaaa

SEQ ID NO: 43581 - protein, 179 aa, Arabidopsis thaliana; identical to SEQ ID NO: 37920
  peptide (1)..(179): Ceres Seq. ID no. 13492156

SEQ ID NO: 43582 - protein, 134 aa, Arabidopsis thaliana; identical to SEQ ID NO: 37921
  peptide (1)..(134): Ceres Seq. ID no. 13492157

SEQ ID NO: 43583 - protein, 118 aa, Arabidopsis thaliana; identical to SEQ ID NO: 27479
  peptide (1)..(118): Ceres Seq. ID no. 13492158

SEQ ID NO: 43584 - DNA, 1284 bp, Arabidopsis thaliana
  misc_feature (1)..(1284): Ceres Seq. ID no. 12421800
  misc_feature (1)..(1284): Ortholog of  Ceres SEQ ID NO 15171634 as cited in SEQ ID NO 57593
  misc_feature (1)..(1284): Ortholog of  Ceres SEQ ID NO 14301936 as cited in SEQ ID NO 67361
acaccaagcataaaaaaaagttgcgacgttctcattctttctcgaatcgtaccacagagagagagagagaacaaaaagaagcaatcgtcgaaagtcatgttcgctacaaaaacagttctctttatcgccgtcgtgtcacttctcggaacgttttcatccgccgctgtcgatacttttatctacggtggttgctcacaagaaaagtactttccgggatcgccttacgagtcaaacgttaactctctactcacctcgttcgttagctcagcttctctctacacatacaacaacttcaccaccaacggaatctccggcgacagttcctccgtctacggtttgtaccagtgtcgcggtgatctctcctccggctcgggagattgtgcaagatgcgtcgcgcgagcagtaagccgtctagggagtctctgcgccatggcaagcggtggcgcgttgcagctcgaaggctgtttcgttaaatacgacaacacgacgttcctcggtgttgaggataagacggtggtggttcgacgttgtggaccaccggttggttataactcggacgagatgactcgtagagactcggtggtgggttctttagcggcgagtagcggtggttcatacagagtaggagtgtcgggggaactgcaaggtgtggcgcagtgcaccggagatcttagtgcgactgagtgtcaagactgtttgatggaagcgatcggacggctgagaacggattgcggaggagctgcttggggtgacgtgtacttagcaaagtgctacgcgcgttactctgcgcgtggaggtcactctagagccaacggctatggtgggaatcgtaataacaatgatgacgatgagatagagaaaacacttgcaatcatagttggcttaattgctggagttacgttactcgtcgtatttctctcttttatggcaaaatcgtgcgagagaggtaaaggtgggaagtaaataacgttatgggacttttgacttgtatcatcaatttatggttttaaaaaagaatcaaatgcgtaaaggagaaagaaaagcgaagagattcttcatattctccactaaaatcctaaaggatgtttcttttttgacccactttaattgaagttttactatttttcaaatgtatagaaaactcacgccgtttagatttgtgatcgtatctttacgtaagaacatttaaaagtggcgcatatgcaatttatctttgatatatatttctaattatcataatcacttaacgttgtagtttaaaggaattattgttgattttgtgtt

SEQ ID NO: 43585 - protein, 320 aa, Arabidopsis thaliana
  peptide (1)..(320): Ceres Seq. ID no. 12421801
TPSIKKSCDVLILSRIVPQRERENKKKQSSKVMFATKTVLFIAVVSLLGTFSSAAVDTFIYGGCSQEKYFPGSPYESNVNSLLTSFVSSASLYTYNNFTTNGISGDSSSVYGLYQCRGDLSSGSGDCARCVARAVSRLGSLCAMASGGALQLEGCFVKYDNTTFLGVEDKTVVVRRCGPPVGYNSDEMTRRDSVVGSLAASSGGSYRVGVSGELQGVAQCTGDLSATECQDCLMEAIGRLRTDCGGAAWGDVYLAKCYARYSARGGHSRANGYGGNRNNNDDDEIEKTLAIIVGLIAGVTLLVVFLSFMAKSCERGKGGK

SEQ ID NO: 43586 - protein, 288 aa, Arabidopsis thaliana
  peptide (1)..(288): Ceres Seq. ID no. 12421802
MFATKTVLFIAVVSLLGTFSSAAVDTFIYGGCSQEKYFPGSPYESNVNSLLTSFVSSASLYTYNNFTTNGISGDSSSVYGLYQCRGDLSSGSGDCARCVARAVSRLGSLCAMASGGALQLEGCFVKYDNTTFLGVEDKTVVVRRCGPPVGYNSDEMTRRDSVVGSLAASSGGSYRVGVSGELQGVAQCTGDLSATECQDCLMEAIGRLRTDCGGAAWGDVYLAKCYARYSARGGHSRANGYGGNRNNNDDDEIEKTLAIIVGLIAGVTLLVVFLSFMAKSCERGKGGK

SEQ ID NO: 43587 - protein, 177 aa, Arabidopsis thaliana
  peptide (1)..(177): Ceres Seq. ID no. 12421803
MASGGALQLEGCFVKYDNTTFLGVEDKTVVVRRCGPPVGYNSDEMTRRDSVVGSLAASSGGSYRVGVSGELQGVAQCTGDLSATECQDCLMEAIGRLRTDCGGAAWGDVYLAKCYARYSARGGHSRANGYGGNRNNNDDDEIEKTLAIIVGLIAGVTLLVVFLSFMAKSCERGKGGK

SEQ ID NO: 43588 - DNA, 988 bp, Arabidopsis thaliana
  misc_feature (1)..(988): Ceres Seq. ID no. 13492488
  misc_feature (1)..(988): Ortholog of  Ceres SEQ ID NO 13661565 as cited in SEQ ID NO 60551
  misc_feature (1)..(988): Ortholog of  Ceres SEQ ID NO 12615329 as cited in SEQ ID NO 62561
gaattctcgaacacgaaaaatattcacagatattttcgatcttaaccgagaaaaaggaagaaatggctggaccatcgacaacttcaaacgcaccaaagcagaggaagagagtcgaagccgagactagcagcaacacttctactaccttacgtcgcgctaaagacggaagcgctttcgctctctgtgaaggatgtaacaagagtgtagctgtagcgcttataagcatgcacaattgcagtctcgatgctaagatcagagtgaatctcgaagcacaagttgtggagacacaagcagaggctaagaagaagcctgcagagaagaagaagacaacatctgatggacctaagccaaagagacttaagaaaaccaatgatgagaagaagagctcgtctacttcaaacaagcccaagcgacctcttaccgctttctttatcttcatgagtgacttccgtaaaacgtttaagtcagagcataatggttcgttagctaaggatgctgcaaagatcggtggtgagaagtggaagtctttgactgaggaagagaagaaagtttatctggataaagctgctgaacttaaggcagagtataacaagtcactggaaagtaatgatgctgatgaggaagaggaagatgaggagaagcaatctgatgatgttgatgatgctgaggagaaacaagttgacgatgatgatgaagttgaggagaaagaagttgagaacacagatgatgacaagaaagaagctgagggtaaagaagaggaggaagaagagattttggatgactactagaaatgatatgctcgtttttgtggttctagtcttactgaaatcggtttatctctaatcgttgcgatgcattgtaaatgaagcctttattagtgaaagtagtttatttgaagttaagttgtgagcaagtggtttttttgtagttcactgaaatggtaatgccttttgtttaaacaagtaatgaagcttatgtttttcgtttt

SEQ ID NO: 43589 - protein, 261 aa, Arabidopsis thaliana
  peptide (1)..(261): Ceres Seq. ID no. 13492489
ILEHEKYSQIFSILTEKKEEMAGPSTTSNAPKQRKRVEAETSSNTSTTLRRAKDGSAFALCEGCNKSVAVALISMHNCSLDAKIRVNLEAQVVETQAEAKKKPAEKKKTTSDGPKPKRLKKTNDEKKSSSTSNKPKRPLTAFFIFMSDFRKTFKSEHNGSLAKDAAKIGGEKWKSLTEEEKKVYLDKAAELKAEYNKSLESNDADEEEEDEEKQSDDVDDAEEKQVDDDDEVEEKEVENTDDDKKEAEGKEEEEEEILDDY

SEQ ID NO: 43590 - protein, 241 aa, Arabidopsis thaliana
  peptide (1)..(241): Ceres Seq. ID no. 13492490
MAGPSTTSNAPKQRKRVEAETSSNTSTTLRRAKDGSAFALCEGCNKSVAVALISMHNCSLDAKIRVNLEAQVVETQAEAKKKPAEKKKTTSDGPKPKRLKKTNDEKKSSSTSNKPKRPLTAFFIFMSDFRKTFKSEHNGSLAKDAAKIGGEKWKSLTEEEKKVYLDKAAELKAEYNKSLESNDADEEEEDEEKQSDDVDDAEEKQVDDDDEVEEKEVENTDDDKKEAEGKEEEEEEILDDY

SEQ ID NO: 43591 - protein, 187 aa, Arabidopsis thaliana
  peptide (1)..(187): Ceres Seq. ID no. 13492491
MHNCSLDAKIRVNLEAQVVETQAEAKKKPAEKKKTTSDGPKPKRLKKTNDEKKSSSTSNKPKRPLTAFFIFMSDFRKTFKSEHNGSLAKDAAKIGGEKWKSLTEEEKKVYLDKAAELKAEYNKSLESNDADEEEEDEEKQSDDVDDAEEKQVDDDDEVEEKEVENTDDDKKEAEGKEEEEEEILDDY

SEQ ID NO: 43592 - DNA, 1610 bp, Arabidopsis thaliana; identical to SEQ ID NO: 39634
  misc_feature (1)..(1610): Ceres Seq. ID no. 13580607
  misc_feature (1)..(1610): Ortholog of  Ceres SEQ ID NO 13594345 as cited in SEQ ID NO 58043
  misc_feature (1)..(1610): Ortholog of  Ceres SEQ ID NO 14302832 as cited in SEQ ID NO 64926
  misc_feature (1)..(1610): Ortholog of  Ceres SEQ ID NO 13662880 as cited in SEQ ID NO 65422
  misc_feature (1)..(1610): Ortholog of  Ceres SEQ ID NO 12779098 as cited in SEQ ID NO 67698
  misc_feature (1)..(1610): Ortholog of  Ceres SEQ ID NO 13591190 as cited in SEQ ID NO 68044
  misc_feature (1)..(1610): Ortholog of  Ceres SEQ ID NO 13596089 as cited in SEQ ID NO 68373

SEQ ID NO: 43593 - protein, 287 aa, Arabidopsis thaliana; identical to SEQ ID NO: 39635
  peptide (1)..(287): Ceres Seq. ID no. 13580608

SEQ ID NO: 43594 - protein, 282 aa, Arabidopsis thaliana; identical to SEQ ID NO: 39636
  peptide (1)..(282): Ceres Seq. ID no. 13580609

SEQ ID NO: 43595 - protein, 281 aa, Arabidopsis thaliana; identical to SEQ ID NO: 39637
  peptide (1)..(281): Ceres Seq. ID no. 13580610

SEQ ID NO: 43596 - DNA, 915 bp, Arabidopsis thaliana
  misc_feature (1)..(915): Ceres Seq. ID no. 12325404
  misc_feature (1)..(915): Ortholog of  Ceres SEQ ID NO 13594296 as cited in SEQ ID NO 57764
atcttcttcttctctgtttctctaagaagatagaacaatcccaagaatctcctcttatttgatcaaccatgtcgaatgtcttgctacgtatttgcatcgcctaaacctcttggcagattcatcaattcaaagtccggcggacggaaacttttcttctccgtcgttagagcttcttccgatgatgctgattgtaatgccgaagaatgtgctcccgagaaggaggtaggaacagtgagtatggaatggttagctggagagaagaccaaagtggtgggaacatttcctcctcggaagccgcgtggttggactggctatgtagagaaagatactgctggtcagactaatgtttactccattgagcctgcagtatatgttgcagagagcgcgattagctcaggtactgcaggatcatcggctgatggggctgagaacacagcagcaatcgtagcaggcattgctcttatcgcagtcgctgcagcttcctctatactcctccaagtcgggaaagatgccccaactcgacccaaagcagtggattacagtggacccgtctcttagctactacatcaacaagttcaagccttctgaaattgttcaaccttctaccccctccgtcacagaagccccaccggtggccgagctagaaacttcactgccagaaactccaccggtggctcagcaagaaacctcactgccggaaactatggctagtgaggctcagccagaggcgtcttttgttccaacaacaagtagtacctcttaggggcttagcctaggattatatctttgtgtaaaaatgagatgaagcatataccaagattatgcattctgttaatattcggatatacctatatgtatgtatacactctgtcactcttctctttgagtgaatgattatatcaaatctcaaatccc

SEQ ID NO: 43597 - protein, 160 aa, Arabidopsis thaliana
  peptide (1)..(160): Ceres Seq. ID no. 12325405
MSCYVFASPKPLGRFINSKSGGRKLFFSVVRASSDDADCNAEECAPEKEVGTVSMEWLAGEKTKVVGTFPPRKPRGWTGYVEKDTAGQTNVYSIEPAVYVAESAISSGTAGSSADGAENTAAIVAGIALIAVAAASSILLQVGKDAPTRPKAVDYSGPVS

SEQ ID NO: 43598 - protein, 106 aa, Arabidopsis thaliana
  peptide (1)..(106): Ceres Seq. ID no. 12325406
MEWLAGEKTKVVGTFPPRKPRGWTGYVEKDTAGQTNVYSIEPAVYVAESAISSGTAGSSADGAENTAAIVAGIALIAVAAASSILLQVGKDAPTRPKAVDYSGPVS

SEQ ID NO: 43599 - protein, 84 aa, Arabidopsis thaliana
  peptide (1)..(84): Ceres Seq. ID no. 12325407
MPQLDPKQWITVDPSLSYYINKFKPSEIVQPSTPSVTEAPPVAELETSLPETPPVAQQETSLPETMASEAQPEASFVPTTSSTS

SEQ ID NO: 43600 - DNA, 1361 bp, Arabidopsis thaliana
  misc_feature (1)..(1361): Ceres Seq. ID no. 12738971
  misc_feature (1)..(1361): Ortholog of  Ceres SEQ ID NO 15176835 as cited in SEQ ID NO 1046
  misc_feature (1)..(1361): Ortholog of  Ceres SEQ ID NO 14315403 as cited in SEQ ID NO 59259
ggattagggagactcgcactcttcttcttcttctttgtacccagaaagaaagtgagctccaacaatggctgcttgcgctactcactcctctctcatgctagcatacgccgccgcatccactcgttcccaggaccttacccctactccatctcttttctcttttgccagctccagacccaaccacttgagcgtcccgcttcttctccttgggggttccagggaccggagatgtgctgctattgacagagcttccaaccacaagtttattgtctccgccgtggccgctgaggctgacctcgacacggaggaggacctggagcagaccgccaccgccgtccttgatccgcccaagcctaagaaaggaaaagccgctttggttctcaagagagatagaacaaggtctaagaggtttttggaaatccaaaagctaagggaaaccaaaaaggagtatgatgtcaacactgctatctctttgcttaaacaaactgccaacacaaggtttgttgagtctgttgaagcccatttccgtctcaacatcgatcctaagtacaatgaccagcagctgcgtgcaacggtgagcctgcctaagggaactggccagactgttatagtcgctgttcttgcacaaggtgagaaggttgatgaagccaaaagtgcaggggcagatattgtgggcagtgatgatttaatcgaacagattaaaggaggcttcatggagtttgacaagctgattgcatccccggatatgatggtcaaggttgctggcctgggaaagattcttggaccacgggggctcatgccaaatcccaaggctggtacagtcacagcgaacattccccaggctattgaagagttcaagaaggggaaagttgaattcagagcagacaaaactgggattgttcacattccatttgggaaagttaattttacagaggaagaccttctcataaacttccttgcagcagtgaaatcggtggagacaaacaagccaaagggagctaaaggagtgtactggaaaagcgctcacatatgctcgtcaatggggccttccatcaagttgaacataagagagatgatagacttcaagcctcccactgcgaactaatcgacaacgccatttgtaaatggggtccttttgggagacgggcaatgccagtgtagacagagaagagaaacaccaagtctagtctgttagtaatcttttcacgcctcactgctttgtatcactttgatggccatttacttcttgtcgttatttatttactattgcctattaaaatttggcaaggggctgtacatgtcaggacgcagaactctttagtactctctaaaagaaaagaccttacattgatctttaggct

SEQ ID NO: 43601 - protein, 346 aa, Arabidopsis thaliana
  peptide (1)..(346): Ceres Seq. ID no. 12738972
MAACATHSSLMLAYAAASTRSQDLTPTPSLFSFASSRPNHLSVPLLLLGGSRDRRCAAIDRASNHKFIVSAVAAEADLDTEEDLEQTATAVLDPPKPKKGKAALVLKRDRTRSKRFLEIQKLRETKKEYDVNTAISLLKQTANTRFVESVEAHFRLNIDPKYNDQQLRATVSLPKGTGQTVIVAVLAQGEKVDEAKSAGADIVGSDDLIEQIKGGFMEFDKLIASPDMMVKVAGLGKILGPRGLMPNPKAGTVTANIPQAIEEFKKGKVEFRADKTGIVHIPFGKVNFTEEDLLINFLAAVKSVETNKPKGAKGVYWKSAHICSSMGPSIKLNIREMIDFKPPTAN

SEQ ID NO: 43602 - protein, 336 aa, Arabidopsis thaliana
  peptide (1)..(336): Ceres Seq. ID no. 12738973
MLAYAAASTRSQDLTPTPSLFSFASSRPNHLSVPLLLLGGSRDRRCAAIDRASNHKFIVSAVAAEADLDTEEDLEQTATAVLDPPKPKKGKAALVLKRDRTRSKRFLEIQKLRETKKEYDVNTAISLLKQTANTRFVESVEAHFRLNIDPKYNDQQLRATVSLPKGTGQTVIVAVLAQGEKVDEAKSAGADIVGSDDLIEQIKGGFMEFDKLIASPDMMVKVAGLGKILGPRGLMPNPKAGTVTANIPQAIEEFKKGKVEFRADKTGIVHIPFGKVNFTEEDLLINFLAAVKSVETNKPKGAKGVYWKSAHICSSMGPSIKLNIREMIDFKPPTAN

SEQ ID NO: 43603 - DNA, 799 bp, Arabidopsis thaliana
  misc_feature (1)..(799): Ceres Seq. ID no. 13499998
  misc_feature (1)..(799): Ortholog of  Ceres SEQ ID NO 13595158 as cited in SEQ ID NO 51008
  misc_feature (1)..(799): Ortholog of  Ceres SEQ ID NO 14304144 as cited in SEQ ID NO 59152
  misc_feature (1)..(799): Ortholog of  Ceres SEQ ID NO 13662050 as cited in SEQ ID NO 61580
  misc_feature (1)..(799): Ortholog of  Ceres SEQ ID NO 14309388 as cited in SEQ ID NO 0
tttcccaactccttacgcgctctctctctatctctttagctttctctttctagcggcgaagccatgggttatccggtggggtacactgagctcctcctcccaagaatcttccttcacttactctctctcttaggcttaatacgaacactcatagacacgggttttcggatattgggtctacccgactttctcgaatccgacccggtttcatcgtcatcgtcatggctggaaccaccgtatatgtccacggcggcgcatcatcaccaagaaagctcatttttcttcccagtggcggcgaggctagctggagaaatcttgcccgtcatcagattctcggagctaactcgacccggattcggatccggatccgattgctgcgcggtgtgcctccacgagttcgagaacgatgacgagatccgacggctgacgaattgtcaacacatatttcaccggagctgtttagaccgttggatgatgggttataatcagatgacgtgtccactttgtagaacgccgtttatttctgatgagttacaagttgcttttaaccaacgagtttggtctgaatctgaacttctcgcagaatcaaattagaatctttcttgtttgggtggaattagtttctactaatgagaaaattaatttctatcttttttttttttttttttgtttaatctttagctgagtggttgatatatgtaaatataaaattataggtggtgatgcttagtaaattagaagaatgaaatttgtattatccgttgaggaaaaaaaagaaatgaatggaaatcttaatttt

SEQ ID NO: 43604 - protein, 176 aa, Arabidopsis thaliana
  peptide (1)..(176): Ceres Seq. ID no. 13499999
MGYPVGYTELLLPRIFLHLLSLLGLIRTLIDTGFRILGLPDFLESDPVSSSSSWLEPPYMSTAAHHHQESSFFFPVAARLAGEILPVIRFSELTRPGFGSGSDCCAVCLHEFENDDEIRRLTNCQHIFHRSCLDRWMMGYNQMTCPLCRTPFISDELQVAFNQRVWSESELLAESN

SEQ ID NO: 43605 - protein, 117 aa, Arabidopsis thaliana
  peptide (1)..(117): Ceres Seq. ID no. 13500000
MSTAAHHHQESSFFFPVAARLAGEILPVIRFSELTRPGFGSGSDCCAVCLHEFENDDEIRRLTNCQHIFHRSCLDRWMMGYNQMTCPLCRTPFISDELQVAFNQRVWSESELLAESN

SEQ ID NO: 43606 - DNA, 1577 bp, Arabidopsis thaliana
  misc_feature (1)..(1577): Ceres Seq. ID no. 12370816
  misc_feature (1)..(1577): Ortholog of  Ceres SEQ ID NO 13596581 as cited in SEQ ID NO 62420
  misc_feature (1)..(1577): Ortholog of  Ceres SEQ ID NO 13591273 as cited in SEQ ID NO 65904
  misc_feature (1)..(1577): Ortholog of  Ceres SEQ ID NO 13623086 as cited in SEQ ID NO 0
aattcaatcaaagtgtccaacagattcagtctatcgtgtcaagtgcctgtctctttcgttgcccaaatctccgatcaaattcgtccgtcgtgtttgcatggcgtttgctccgattctccgccgcgcctccgccgttaagaacctcttctctttaacaagactcgccgttggctctgccctctccactaggtctctccaaaccggagcctccggcgatgattctcaatcgatgggtgggtatcacgtgagccccggcggattcatgcgtggagccgtgtatcgcgagcccaataagcctctaaccatcgaagaatttcatattccccgccccaaatccaatgaaattctcatcaaaaccaaagcttgtggagtttgccactctgatcttcatgtgatgaaaggagagataccgttcgctagtccttgtgttattggtcatgagattactggtgaagttgttgaacatggtccacttactgatcacaagatcattaatagatttccaatcgggtctcgtgtagttggagctttcattatgccttgtggaacctgttcttattgtgctaagggccatgatgatctatgtgaagacttctttgcttacaacagagccaagggaactctttacgatggcgaaactcgtctctttttgcgacatgatgattcaccagtgtatatgtatagtatgggagggatggctgagtactgtgttacaccagctcatggtttagctcctctaccagagtctttgccctactctgaatctgccattctgggatgtgctgtttttacagcatatggtgctatggctcatgctgctgagatccgtcctggagattctattgcagttattggaattggtggtgtgggctccagttgtttgcagatcgcaagggcttttggagcctcggatatcattgctgtggatgttcaggatgataaattacagaaggccaagacacttggtgctactcatattgtcaatgctgctaaagaagatgctgttgaaaggataagagaaataaccggtgggatgggtgttgatgttgctgttgaagccttgggaaagcctcaaactttcatgcagtgcacactaagtgtgaaagatggtggaaaagctgtgatgattggactctcacaagctggttccgttggagaaattgacataaatcgacttgttcgtagaaagataaaagttataggatcttatggaggaagagcaagacaggatcttcctaaagtagtgaaattggcagagtcagggattttcaatctcacaaacgcagtctcaagtaaatacaagtttgaagatgcaggaaaagcatttcaagatctcaacgaaggcaaaatcgtgagccgaggtgttgttgagatactataaccaatatagccttttgattctggtttgtgaatgactgcttcacacctgtttcactgaggtctatttttagttgctacaatcttcagacaaggtcattgttaatctgatatttgtgtttgtttagacagtgaaaaggaaaaaaaaaaactgtagtaactggacaaaatttataattttactgtttttcatttctttc

SEQ ID NO: 43607 - protein, 459 aa, Arabidopsis thaliana
  peptide (1)..(459): Ceres Seq. ID no. 12370817
IQSKCPTDSVYRVKCLSLSLPKSPIKFVRRVCMAFAPILRRASAVKNLFSLTRLAVGSALSTRSLQTGASGDDSQSMGGYHVSPGGFMRGAVYREPNKPLTIEEFHIPRPKSNEILIKTKACGVCHSDLHVMKGEIPFASPCVIGHEITGEVVEHGPLTDHKIINRFPIGSRVVGAFIMPCGTCSYCAKGHDDLCEDFFAYNRAKGTLYDGETRLFLRHDDSPVYMYSMGGMAEYCVTPAHGLAPLPESLPYSESAILGCAVFTAYGAMAHAAEIRPGDSIAVIGIGGVGSSCLQIARAFGASDIIAVDVQDDKLQKAKTLGATHIVNAAKEDAVERIREITGGMGVDVAVEALGKPQTFMQCTLSVKDGGKAVMIGLSQAGSVGEIDINRLVRRKIKVIGSYGGRARQDLPKVVKLAESGIFNLTNAVSSKYKFEDAGKAFQDLNEGKIVSRGVVEIL

SEQ ID NO: 43608 - protein, 427 aa, Arabidopsis thaliana
  peptide (1)..(427): Ceres Seq. ID no. 12370818
MAFAPILRRASAVKNLFSLTRLAVGSALSTRSLQTGASGDDSQSMGGYHVSPGGFMRGAVYREPNKPLTIEEFHIPRPKSNEILIKTKACGVCHSDLHVMKGEIPFASPCVIGHEITGEVVEHGPLTDHKIINRFPIGSRVVGAFIMPCGTCSYCAKGHDDLCEDFFAYNRAKGTLYDGETRLFLRHDDSPVYMYSMGGMAEYCVTPAHGLAPLPESLPYSESAILGCAVFTAYGAMAHAAEIRPGDSIAVIGIGGVGSSCLQIARAFGASDIIAVDVQDDKLQKAKTLGATHIVNAAKEDAVERIREITGGMGVDVAVEALGKPQTFMQCTLSVKDGGKAVMIGLSQAGSVGEIDINRLVRRKIKVIGSYGGRARQDLPKVVKLAESGIFNLTNAVSSKYKFEDAGKAFQDLNEGKIVSRGVVEIL

SEQ ID NO: 43609 - protein, 383 aa, Arabidopsis thaliana
  peptide (1)..(383): Ceres Seq. ID no. 12370819
MGGYHVSPGGFMRGAVYREPNKPLTIEEFHIPRPKSNEILIKTKACGVCHSDLHVMKGEIPFASPCVIGHEITGEVVEHGPLTDHKIINRFPIGSRVVGAFIMPCGTCSYCAKGHDDLCEDFFAYNRAKGTLYDGETRLFLRHDDSPVYMYSMGGMAEYCVTPAHGLAPLPESLPYSESAILGCAVFTAYGAMAHAAEIRPGDSIAVIGIGGVGSSCLQIARAFGASDIIAVDVQDDKLQKAKTLGATHIVNAAKEDAVERIREITGGMGVDVAVEALGKPQTFMQCTLSVKDGGKAVMIGLSQAGSVGEIDINRLVRRKIKVIGSYGGRARQDLPKVVKLAESGIFNLTNAVSSKYKFEDAGKAFQDLNEGKIVSRGVVEIL

SEQ ID NO: 43610 - DNA, 1521 bp, Arabidopsis thaliana; identical to SEQ ID NO: 28642
  misc_feature (1)..(1521): Ceres Seq. ID no. 13580594
  misc_feature (1)..(1521): Ortholog of  Ceres SEQ ID NO 12625388 as cited in SEQ ID NO 63299
  misc_feature (1)..(1521): Ortholog of  Ceres SEQ ID NO 15179860 as cited in SEQ ID NO 66716

SEQ ID NO: 43611 - protein, 405 aa, Arabidopsis thaliana; identical to SEQ ID NO: 28643
  peptide (1)..(405): Ceres Seq. ID no. 15222734

SEQ ID NO: 43612 - DNA, 1693 bp, Arabidopsis thaliana; identical to SEQ ID NO: 20808
  misc_feature (1)..(1693): Ceres Seq. ID no. 13509182
  misc_feature (1)..(1693): Ortholog of  Ceres SEQ ID NO 13656177 as cited in SEQ ID NO 64997

SEQ ID NO: 43613 - protein, 458 aa, Arabidopsis thaliana; identical to SEQ ID NO: 20809
  peptide (1)..(458): Ceres Seq. ID no. 13509183

SEQ ID NO: 43614 - protein, 427 aa, Arabidopsis thaliana; identical to SEQ ID NO: 20810
  peptide (1)..(427): Ceres Seq. ID no. 13509184

SEQ ID NO: 43615 - protein, 344 aa, Arabidopsis thaliana; identical to SEQ ID NO: 20811
  peptide (1)..(344): Ceres Seq. ID no. 13509185

SEQ ID NO: 43616 - DNA, 2108 bp, Arabidopsis thaliana
  misc_feature (1)..(2108): Ceres Seq. ID no. 13493961
  misc_feature (1)..(2108): Ortholog of  Ceres SEQ ID NO 13596338 as cited in SEQ ID NO 68005
acccccccccactccccccctcgcatcccgcgcacacccaccgaaacaggaccgcgcccggccgcgcgcccccgccctccctcactcacccataccgtgctccctcactcactcatcaaataacccgtgctcacacacacgctacccccgcacccaaccaacctatcaatcgacacacgcaagaccagcatgcaaacagcacaacaagctgccctgtctcactcccaaccccgcgagcgaactatctcacctccgggcggatcaaaagcgcgaactccctcgcaatcttatccacatctaactcccgaagacgcaagcacccgaatccaagaattagagaatataacaatgaaccaccacactacaattaatcccccccccccccccccgacaactaatcataggcttctccatcttcttgtctgcaggatgatgcaatttttcagacaattttcttccaaaatcttttcgtaattctgttttatttttcaacgttttaggtttttaccaatccgccgtagttatatccaacattaatttttttccctcttctcagaaaaaaataaaattcaactcatctctagagtttttaggttcttccaagaaattgaatttggaaggaggctttgatgggtttgaattttccataatcgtcccttgtttacgactcttgttgtttgaaaatgctatggctcgtgaggggatgttgttttgattttgggaaagtcttgtttgaatggtcacggcttttctgaacattcgcgtgttctttcttgtctcggctctgcttcgaaatgtctctcggccaagaaaatgttgatcctgttgaagtttcagggtcgcatgcttgcttatatgaacttttatgttctgagacacccaaatggactcctcttagggttgaagatttgcaaacatcttcttctgatcccagagatcggttggagaagttgctgaagcaacctgggaataaatattgtgctgactgtggctctcctgaaccaaaatgggtatcgttgagtcttggtgtatttatctgcattaagtgttctggtgtacacagaagtcttggagttcatatatcaaaggttctatcagtaaagctagacgagtggacagatgatcaggttgacatgcttgtaggttacggtggaaacacggcagtgaacgaaagattcgaagcttgcaacatcgaccagtcaaagaaaccaaaaccagattctactaatgaggaacgaaatgatttcattagaaaaaaatatgagcagcaccagtttatggatccaaaggatggtgctttgtgcacttatcagcagcctagcagaacaaacacttcaccaccgtctttatgttctgcaagccaccgttctacaaaaaaccgtattggtcatgcatttaggaatagctggggaagaagagaatctgatcacaaaggaccaaagaagagcaattccatggcaggtatggttgagtttgtggggttgattaaggttaacgtggtaaaaggaaccaaccttgcggttcgagacgtgatgaccagcgatccttatgttatccttgctcttggccaacaatcggtaaaaacacgggtgataaagaacaacttgaatcctgtgtggaatgagacgctaatgctttcgatacccgagcccatgcctcctctcaaagtgctagtgtacgacaaggatacattctcgacagatgatttcatgggagaggcagagatagacatacaaccattggtgagtgcagcaaaagcatacgagacatcgagcataaaggaaccgatgcagctgggaagttgggtggcgagcaaagagaacacattggtgagtgatggcataatcttacttgaagacgggaaagtgaaacaagacatttcacttaggctacaaaatgttgaaagaggtgttcttgagatccagcttgaatgtcttcctctcactcaatgatgatactttcttcttcatccctcttctttttttttttctttaaaagatttatttctaaatttatagtgaagaaaagatgctgctactttcttgttgttccacctcaaacaaaacctctgtaaaaaaacaacaccatgatttgatttgatgattctt

SEQ ID NO: 43617 - protein, 385 aa, Arabidopsis thaliana
  peptide (1)..(385): Ceres Seq. ID no. 13493962
MSLGQENVDPVEVSGSHACLYELLCSETPKWTPLRVEDLQTSSSDPRDRLEKLLKQPGNKYCADCGSPEPKWVSLSLGVFICIKCSGVHRSLGVHISKVLSVKLDEWTDDQVDMLVGYGGNTAVNERFEACNIDQSKKPKPDSTNEERNDFIRKKYEQHQFMDPKDGALCTYQQPSRTNTSPPSLCSASHRSTKNRIGHAFRNSWGRRESDHKGPKKSNSMAGMVEFVGLIKVNVVKGTNLAVRDVMTSDPYVILALGQQSVKTRVIKNNLNPVWNETLMLSIPEPMPPLKVLVYDKDTFSTDDFMGEAEIDIQPLVSAAKAYETSSIKEPMQLGSWVASKENTLVSDGIILLEDGKVKQDISLRLQNVERGVLEIQLECLPLTQ

SEQ ID NO: 43618 - protein, 272 aa, Arabidopsis thaliana
  peptide (1)..(272): Ceres Seq. ID no. 13493963
MLVGYGGNTAVNERFEACNIDQSKKPKPDSTNEERNDFIRKKYEQHQFMDPKDGALCTYQQPSRTNTSPPSLCSASHRSTKNRIGHAFRNSWGRRESDHKGPKKSNSMAGMVEFVGLIKVNVVKGTNLAVRDVMTSDPYVILALGQQSVKTRVIKNNLNPVWNETLMLSIPEPMPPLKVLVYDKDTFSTDDFMGEAEIDIQPLVSAAKAYETSSIKEPMQLGSWVASKENTLVSDGIILLEDGKVKQDISLRLQNVERGVLEIQLECLPLTQ

SEQ ID NO: 43619 - protein, 224 aa, Arabidopsis thaliana
  peptide (1)..(224): Ceres Seq. ID no. 13493964
MDPKDGALCTYQQPSRTNTSPPSLCSASHRSTKNRIGHAFRNSWGRRESDHKGPKKSNSMAGMVEFVGLIKVNVVKGTNLAVRDVMTSDPYVILALGQQSVKTRVIKNNLNPVWNETLMLSIPEPMPPLKVLVYDKDTFSTDDFMGEAEIDIQPLVSAAKAYETSSIKEPMQLGSWVASKENTLVSDGIILLEDGKVKQDISLRLQNVERGVLEIQLECLPLTQ

SEQ ID NO: 43620 - DNA, 1192 bp, Arabidopsis thaliana
  misc_feature (1)..(1192): Ceres Seq. ID no. 12331001
  misc_feature (1)..(1192): Ortholog of  Ceres SEQ ID NO 13584646 as cited in SEQ ID NO 60715
attagagaagaaaaaaagaatggcgaatccttggtgggtagggaatgttgcgatcggtggagttgagagtccagtgacgtcatcagctccttctttgcaccacagaaacagtaacaacaacaacccaccgactatgactcgttcggatccaagattggaccatgacttcaccaccaacaacagtggaagccctaatactcagactcagagccaagaagaacagaacagcagagacgagcaaccagctgttgaacccggatccggatccgggtctacgggtcgtcgtcctagaggtagacctcctggttccaagaacaaaccaaagagtccagttgttgttaccaaagaaagccctaactctctccagagccatgttcttgagattgctacgggagctgacgtggcggaaagcttaaacgcctttgctcgtagacgcggccggggcgtttcggtgctgagcggtagtggtttggttactaatgttactctgcgtcagcctgctgcatccggtggagttgttagtttacgtggtcagtttgagatcttgtctatgtgtggggcttttcttcctacgtctggctctcctgctgcagccgctggtttaaccatttacttagctggagctcaaggtcaagttgtgggaggtggagttgctggcccgcttattgcctctggacccgttattgtgatagctgctacgttttgcaatgccacttatgagaggttaccgattgaggaagaacaacagcaagagcagccgcttcaactagaagatgggaagaagcagaaagaagagaatgatgataacgagagtgggaataacggaaacgaaggatcgatgcagccgccgatgtataatatgcctcctaattttatcccaaatggtcatcaaatggctcaacacgacgtgtattggggtggtcctccgcctcgtgctcctccttcgtattgattagttaaataggcggtggttggtgcgttctttttactggaatgattatattttccattaggatggttaggcttttgtttattaaagctatcaagtttcttttttttttacgaataattcggatgacaattagctagtgtttgtttgtttgttttgtggcggcttttctgacttgactattttgatcgtggatagctttgtatgaaagtgaattgattgtagaatcgtcttttgaatttt

SEQ ID NO: 43621 - protein, 316 aa, Arabidopsis thaliana
  peptide (1)..(316): Ceres Seq. ID no. 12331002
LEKKKRMANPWWVGNVAIGGVESPVTSSAPSLHHRNSNNNNPPTMTRSDPRLDHDFTTNNSGSPNTQTQSQEEQNSRDEQPAVEPGSGSGSTGRRPRGRPPGSKNKPKSPVVVTKESPNSLQSHVLEIATGADVAESLNAFARRRGRGVSVLSGSGLVTNVTLRQPAASGGVVSLRGQFEILSMCGAFLPTSGSPAAAAGLTIYLAGAQGQVVGGGVAGPLIASGPVIVIAATFCNATYERLPIEEEQQQEQPLQLEDGKKQKEENDDNESGNNGNEGSMQPPMYNMPPNFIPNGHQMAQHDVYWGGPPPRAPPSY

SEQ ID NO: 43622 - protein, 310 aa, Arabidopsis thaliana
  peptide (1)..(310): Ceres Seq. ID no. 12331003
MANPWWVGNVAIGGVESPVTSSAPSLHHRNSNNNNPPTMTRSDPRLDHDFTTNNSGSPNTQTQSQEEQNSRDEQPAVEPGSGSGSTGRRPRGRPPGSKNKPKSPVVVTKESPNSLQSHVLEIATGADVAESLNAFARRRGRGVSVLSGSGLVTNVTLRQPAASGGVVSLRGQFEILSMCGAFLPTSGSPAAAAGLTIYLAGAQGQVVGGGVAGPLIASGPVIVIAATFCNATYERLPIEEEQQQEQPLQLEDGKKQKEENDDNESGNNGNEGSMQPPMYNMPPNFIPNGHQMAQHDVYWGGPPPRAPPSY

SEQ ID NO: 43623 - protein, 272 aa, Arabidopsis thaliana
  peptide (1)..(272): Ceres Seq. ID no. 12331004
MTRSDPRLDHDFTTNNSGSPNTQTQSQEEQNSRDEQPAVEPGSGSGSTGRRPRGRPPGSKNKPKSPVVVTKESPNSLQSHVLEIATGADVAESLNAFARRRGRGVSVLSGSGLVTNVTLRQPAASGGVVSLRGQFEILSMCGAFLPTSGSPAAAAGLTIYLAGAQGQVVGGGVAGPLIASGPVIVIAATFCNATYERLPIEEEQQQEQPLQLEDGKKQKEENDDNESGNNGNEGSMQPPMYNMPPNFIPNGHQMAQHDVYWGGPPPRAPPSY

SEQ ID NO: 43624 - DNA, 1211 bp, Arabidopsis thaliana
  misc_feature (1)..(1211): Ceres Seq. ID no. 13489559
  misc_feature (1)..(1211): Ortholog of  Ceres SEQ ID NO 13657170 as cited in SEQ ID NO 65651
  misc_feature (1)..(1211): Ortholog of  Ceres SEQ ID NO 12586854 as cited in SEQ ID NO 69102
aagaaaaaaaatggcggaactgttgttggtggaaactcgaatcccacagcaaaagcactacgaatccaaaccattcccggcggtgatatcaccgccgtctgcttcgattccaattcctgctctgtctctcccactattcactcaaactatcaaaactcagaaacactatctcgattctctcttgcacgaatccggagcagtgctattcagaggttttccggtgaattccgccgatgatttcaacgacgtcgttgaagctttcggtttcgatgagcttccttacgtcggaggcgctgctcctcgcactagcgtcgtcggtcgtgtcttcactgctaatgaatctcctcctgatcagaagattccttttcaccacgagatggctcaggtattgatcaaaatcagatttggatttatgtgaatttgattttttacatctaaagttttgagctttattgaatttgattgatggtgtttgttaggttcgtgagtttccatcaaagttgttcttttactgtgagattgagcctaagtgtggtggagagactccaattgtgttgagtcatgttgtgtatgagagaatgaaagataaacatccagagtttgttcagagattagaggaacatggtttgctttatgttagggttttaggtgaagatgatgatccttcatctcccattggacgtggttggaaatctacattcttaacccatgacaagaaccttgctgagcaaagggcggttgatttgggaatgaaactggaatggacagaggatggtggagccaagacggtaatgggtccgattccggctatcaaatatgacgagtcgagaaaccgcaaagtatggtttaacagcatggtagctgcttatacgggatgggaggataagcggaatgatccaagaaaggctgtgacttttggggatggaaagcctttacctgcggatatagtccatgattgtcttaggattcttgaagaggaatgtgttgctgttccgtggcagagaggagatgttttgcttatagataactgggcggttcttcattctcgaagaccgtttgatcctcctcgtcgagttcttgcatcactctgcaaatagattatgttgtctttcatgcataaatcaaagctttggatttcgaatttagaggcaacaacaacactgtacatattttggatacatatatgtgggtacatagtaacccatttcctc

SEQ ID NO: 43625 - protein, 172 aa, Arabidopsis thaliana
  peptide (1)..(172): Ceres Seq. ID no. 13489560
MKDKHPEFVQRLEEHGLLYVRVLGEDDDPSSPIGRGWKSTFLTHDKNLAEQRAVDLGMKLEWTEDGGAKTVMGPIPAIKYDESRNRKVWFNSMVAAYTGWEDKRNDPRKAVTFGDGKPLPADIVHDCLRILEEECVAVPWQRGDVLLIDNWAVLHSRRPFDPPRRVLASLCK

SEQ ID NO: 43626 - protein, 138 aa, Arabidopsis thaliana
  peptide (1)..(138): Ceres Seq. ID no. 13489561
RKKMAELLLVETRIPQQKHYESKPFPAVISPPSASIPIPALSLPLFTQTIKTQKHYLDSLLHESGAVLFRGFPVNSADDFNDVVEAFGFDELPYVGGAAPRTSVVGRVFTANESPPDQKIPFHHEMAQVLIKIRFGFM

SEQ ID NO: 43627 - protein, 135 aa, Arabidopsis thaliana
  peptide (1)..(135): Ceres Seq. ID no. 13489562
MAELLLVETRIPQQKHYESKPFPAVISPPSASIPIPALSLPLFTQTIKTQKHYLDSLLHESGAVLFRGFPVNSADDFNDVVEAFGFDELPYVGGAAPRTSVVGRVFTANESPPDQKIPFHHEMAQVLIKIRFGFM

SEQ ID NO: 43628 - DNA, 1213 bp, Arabidopsis thaliana
  misc_feature (1)..(1213): Ceres Seq. ID no. 5788431
  misc_feature (1)..(1213): Ortholog of  Ceres SEQ ID NO 13660487 as cited in SEQ ID NO 60849
caaagtttgtgatatagagctcgcacttgttttatattataccttgaccgtttggaatatttggacacattgttaggtccgatatgctccacatatgcctcttgtgttgcgaggaataacatgcacattcaaaggaggtttaagaacaggaattgttggaaggacaggaagcgggaaatcgactttgatacaaactcttttccgcattgtagaaccttcagctggagaaatcaggattgatggagtgaatattttgaccattgggttgcatgacttgcgtttaagactaagcatcataccccaagatccaaccatgtttgaaggaacaatgagaagtaacttggaccctcttgaagagtacacagatgatcaaatctgggaggtgcgtcggtttaaatctctgaaagtcgcacgttcttctttctttaactagtttaaacaatgttcagtcttggctaatgtttgcgcggtgttttaggctcttgacaagtgccaactaggagacgaggtgaggaaaaaagagcaaaagctcgattccagtgtgagcgagaatggagacaattggagtatgggtcagagacaactagtgtgtctcgggagagttcttctcaagagaagcaaaatcttggtgcttgatgaagccactgcttctgttgacactgcaactgacaatctgattcagaaaacgctaagagaacacttctcagactgtacagtgataaccattgcacacaggatatcttcagttattgacagcgacatggttctgcttctaagcaatggtttgtctgaaaaaaatctcaaattcattcgatggaacttgtgtgcatatgaaacattgagaaatgtcttgttgtgttctatttgcagggatcattgaggagtatgatacgccagtgagattactggaggataagtcttcctctttttctaagcttgtggctgagtacacctcaagatctagttccagtttcgattgaagcaaagactctgctattttcctgctgatgatgacgatgaagaaaaacttaggatgtctgaatctggtttagccacaacactagctggattatgattcacacaagaagaaacactatcttttgttaaaagcttttgttcttagtttatagcttctactactgttgaacccctaaaaacgattattctacatcgctagtttcaaatcaatgcaataaaagattgttcacttctg

SEQ ID NO: 43629 - protein, 112 aa, Arabidopsis thaliana
  peptide (1)..(112): Ceres Seq. ID no. 5788432
MPLVLRGITCTFKGGLRTGIVGRTGSGKSTLIQTLFRIVEPSAGEIRIDGVNILTIGLHDLRLRLSIIPQDPTMFEGTMRSNLDPLEEYTDDQIWEVRRFKSLKVARSSFFN

SEQ ID NO: 43630 - protein, 103 aa, Arabidopsis thaliana
  peptide (1)..(103): Ceres Seq. ID no. 5788433
MGQRQLVCLGRVLLKRSKILVLDEATASVDTATDNLIQKTLREHFSDCTVITIAHRISSVIDSDMVLLLSNGLSEKNLKFIRWNLCAYETLRNVLLCSICRDH

SEQ ID NO: 43631 - DNA, 1420 bp, Arabidopsis thaliana; identical to SEQ ID NO: 36272
  misc_feature (1)..(1420): Ceres Seq. ID no. 12580277
  misc_feature (1)..(1420): Ortholog of  Ceres SEQ ID NO 13592768 as cited in SEQ ID NO 20317
  misc_feature (1)..(1420): Ortholog of  Ceres SEQ ID NO 14303656 as cited in SEQ ID NO 61363

SEQ ID NO: 43632 - protein, 351 aa, Arabidopsis thaliana; identical to SEQ ID NO: 36273
  peptide (1)..(351): Ceres Seq. ID no. 12580278

SEQ ID NO: 43633 - protein, 315 aa, Arabidopsis thaliana; identical to SEQ ID NO: 36274
  peptide (1)..(315): Ceres Seq. ID no. 12580279

SEQ ID NO: 43634 - protein, 308 aa, Arabidopsis thaliana; identical to SEQ ID NO: 36275
  peptide (1)..(308): Ceres Seq. ID no. 12580280

SEQ ID NO: 43635 - DNA, 3276 bp, Arabidopsis thaliana
  misc_feature (1)..(3276): Ceres Seq. ID no. 13576594
  misc_feature (1)..(3276): Ortholog of  Ceres SEQ ID NO 13600595 as cited in SEQ ID NO 629
  misc_feature (1)..(3276): Ortholog of  Ceres SEQ ID NO 13593379 as cited in SEQ ID NO 20573
tccgaacaaaaaaaaaaacaagttttcttctttttacactcaagaatataaattccctgttctccagatcttttctcaagaaaatttaaagctttaacttaagaaagcttgaacctttctcttccaaccacatcttccttctttttatcctctagctcaacttagaaagaatagaataaagtggcaaaaccgaaagtgaaccaacttgtagtaaattaatagttatgggttcgaaacctaatgccatgaagaatgtggtggctatggcggcagtttctgctctgttccttctagggtttcttgtttgctctgtttctggttctgtctcttacgatagcagagccattaccatcaatggcaaaagaagaatccttatctctggatctattcactaccccagaagtactcctgagatgtggccagatctaattcggaaagcaaaggaaggaggcttagatgtgattcagacttatgtgttctggaatgggcatgagccatctcctggaaaatattatttcgagggcaactatgatttggttaagtttgtcaagttggtccaacaatctggactctatcttcatctaaggattggtccttatgtctgtgctgaatggaacttcggaggatttcctgtttggcttaagtacattccagggattagcttcagaacagataacggtcctttcaaggctcaaatgcaaagattcaccacgaagattgttaacatgatgaaagctgagaggctttttgaatctcaaggcggtcctataattctctctcagattgaaaatgaatatggaccaatggagtatgagcttggtgcaccgggccggtcatacaccaactgggcagctaagatggcggtggggctaggcactggtgtcccttgggtcatgtgcaaacaagacgatgctcccgaccccattatcaatgcttgcaatggcttctactgtgattacttctccccaaacaaggcttacaagcctaaaatgtggaccgaagcctggactggatggtttacaaagtttggaggcccagttccttaccgcccagctgaagatatggccttttccgttgcaaggtttatccaaaagggtggatctttcatcaactactatatgtatcatggtggaacaaactttggtcgaactgctggtggtccgtttatcgcaactagctatgattatgatgctcctcttgacgaatatggacttgaaaggcagcctaagtgggggcacttgaaagatttgcatagagcaattaagctgtgtgaaccagctttagtatcaggagagcccacaagaatgcctctcggaaactatcaagaggctcatgtgtacaaatcaaaatctggagcttgttctgcattcttagcaaattataatccaaaatcttacgccaaagtttctttcgggaacaatcactacaatctccctccgtggtctataagtattctcccagactgcaaaaacacagtttacaacacagccagggttggtgctcaaacttctaggatgaaaatggttcgggttcctgttcatggtggtttatcttggcaagcatacaatgaagacccatcaacttacatcgatgagtcattcacaatggtcggattagtggagcagataaacactacacgagacacttcggattacctgtggtacatgactgatgttaaagttgatgccaatgaaggatttttgaggaatggagatttgccgactcttactgttctatcagctggccatgctatgcatgtgtttatcaatggtcaattatctggatctgcatatggtagtttagactctcctaagctaacttttcggaaaggtgtgaatctaagagctggtttcaacaaaattgcgatactaagcattgctgttggtctcccgaatgtgggtccacattttgagacatggaatgctggagttttgggtccagtttcattgaacggtctcaatgggggacggagagatctatcatggcagaaatggacttataaggttggtcttaaaggagagtctctgagtcttcattcacttagtggtagctcatcggttgagtgggcagaaggtgcatttgttgcacagaagcaaccacttacttggtacaagacgactttctctgctccagctggagattcgccattggctgtagacatgggaagcatgggaaaaggtcaaatatggataaatgggcagagcctgggacgtcactggcctgcatataaagcagttggttcttgcagcgagtgttcttataccggaacattcagagaggacaagtgcttaagaaactgtggagaggcttctcaaagatggtaccatgtcccaaggtcgtggctaaaaccaagtggcaatctattggttgtctttgaggaatggggaggagacccgaacggaatcacgttggtcagaagagaagtggacagtgtatgtgcagatatctatgaatggcaatcaacgctggtgaactaccaattgcatgcttctggaaaagttaataaaccattgcatcccaaagcacatttacaatgcgggcccggacaaaagatcaccaccgtgaagtttgctagtttcgggacacctgaagggacttgtggtagttaccgtcaaggaagctgtcacgcccatcactcctatgacgctttcaacaaactttgtgttgggcagaactggtgttctgtaactgtagcaccggagatgtttggtggagatccgtgtccaaatgtgatgaagaaactcgcggtggaagccgtttgtgcttaaatgaaagcagacgcaacagcaatcaaaagactgtaaaggtggttacttacgcattcttacaggtttctgatggtattagtatgttttatgaagacaacagaagaagttggtatttttctagctccttattttatcacggtggaagttgtacaaagggacgcagcacgccgttcaacaatttgcagagttgtgatttatatgtaaataagcttgggaagggtttgttattgtaacccaagaaagaagatgaagaagaagaagaagcacattgagactggagaatctaagtccatgtgtagattcttttggtaggagcaaaactgggattagtttattctctgagttttgctttgaacgtgtttgttgttgctgttgttgtagtcgatactattagatgagacattctctgcaattatctcattgctaaatttatgtaatggtttttctttctttctatggaatgaagcatatcagtcttgaagtaaaccaatgtgtgaatcacccctcc

SEQ ID NO: 43636 - protein, 847 aa, Arabidopsis thaliana
  peptide (1)..(847): Ceres Seq. ID no. 13576595
MGSKPNAMKNVVAMAAVSALFLLGFLVCSVSGSVSYDSRAITINGKRRILISGSIHYPRSTPEMWPDLIRKAKEGGLDVIQTYVFWNGHEPSPGKYYFEGNYDLVKFVKLVQQSGLYLHLRIGPYVCAEWNFGGFPVWLKYIPGISFRTDNGPFKAQMQRFTTKIVNMMKAERLFESQGGPIILSQIENEYGPMEYELGAPGRSYTNWAAKMAVGLGTGVPWVMCKQDDAPDPIINACNGFYCDYFSPNKAYKPKMWTEAWTGWFTKFGGPVPYRPAEDMAFSVARFIQKGGSFINYYMYHGGTNFGRTAGGPFIATSYDYDAPLDEYGLERQPKWGHLKDLHRAIKLCEPALVSGEPTRMPLGNYQEAHVYKSKSGACSAFLANYNPKSYAKVSFGNNHYNLPPWSISILPDCKNTVYNTARVGAQTSRMKMVRVPVHGGLSWQAYNEDPSTYIDESFTMVGLVEQINTTRDTSDYLWYMTDVKVDANEGFLRNGDLPTLTVLSAGHAMHVFINGQLSGSAYGSLDSPKLTFRKGVNLRAGFNKIAILSIAVGLPNVGPHFETWNAGVLGPVSLNGLNGGRRDLSWQKWTYKVGLKGESLSLHSLSGSSSVEWAEGAFVAQKQPLTWYKTTFSAPAGDSPLAVDMGSMGKGQIWINGQSLGRHWPAYKAVGSCSECSYTGTFREDKCLRNCGEASQRWYHVPRSWLKPSGNLLVVFEEWGGDPNGITLVRREVDSVCADIYEWQSTLVNYQLHASGKVNKPLHPKAHLQCGPGQKITTVKFASFGTPEGTCGSYRQGSCHAHHSYDAFNKLCVGQNWCSVTVAPEMFGGDPCPNVMKKLAVEAVCA

SEQ ID NO: 43637 - protein, 840 aa, Arabidopsis thaliana
  peptide (1)..(840): Ceres Seq. ID no. 13576596
MKNVVAMAAVSALFLLGFLVCSVSGSVSYDSRAITINGKRRILISGSIHYPRSTPEMWPDLIRKAKEGGLDVIQTYVFWNGHEPSPGKYYFEGNYDLVKFVKLVQQSGLYLHLRIGPYVCAEWNFGGFPVWLKYIPGISFRTDNGPFKAQMQRFTTKIVNMMKAERLFESQGGPIILSQIENEYGPMEYELGAPGRSYTNWAAKMAVGLGTGVPWVMCKQDDAPDPIINACNGFYCDYFSPNKAYKPKMWTEAWTGWFTKFGGPVPYRPAEDMAFSVARFIQKGGSFINYYMYHGGTNFGRTAGGPFIATSYDYDAPLDEYGLERQPKWGHLKDLHRAIKLCEPALVSGEPTRMPLGNYQEAHVYKSKSGACSAFLANYNPKSYAKVSFGNNHYNLPPWSISILPDCKNTVYNTARVGAQTSRMKMVRVPVHGGLSWQAYNEDPSTYIDESFTMVGLVEQINTTRDTSDYLWYMTDVKVDANEGFLRNGDLPTLTVLSAGHAMHVFINGQLSGSAYGSLDSPKLTFRKGVNLRAGFNKIAILSIAVGLPNVGPHFETWNAGVLGPVSLNGLNGGRRDLSWQKWTYKVGLKGESLSLHSLSGSSSVEWAEGAFVAQKQPLTWYKTTFSAPAGDSPLAVDMGSMGKGQIWINGQSLGRHWPAYKAVGSCSECSYTGTFREDKCLRNCGEASQRWYHVPRSWLKPSGNLLVVFEEWGGDPNGITLVRREVDSVCADIYEWQSTLVNYQLHASGKVNKPLHPKAHLQCGPGQKITTVKFASFGTPEGTCGSYRQGSCHAHHSYDAFNKLCVGQNWCSVTVAPEMFGGDPCPNVMKKLAVEAVCA

SEQ ID NO: 43638 - protein, 834 aa, Arabidopsis thaliana
  peptide (1)..(834): Ceres Seq. ID no. 13576597
MAAVSALFLLGFLVCSVSGSVSYDSRAITINGKRRILISGSIHYPRSTPEMWPDLIRKAKEGGLDVIQTYVFWNGHEPSPGKYYFEGNYDLVKFVKLVQQSGLYLHLRIGPYVCAEWNFGGFPVWLKYIPGISFRTDNGPFKAQMQRFTTKIVNMMKAERLFESQGGPIILSQIENEYGPMEYELGAPGRSYTNWAAKMAVGLGTGVPWVMCKQDDAPDPIINACNGFYCDYFSPNKAYKPKMWTEAWTGWFTKFGGPVPYRPAEDMAFSVARFIQKGGSFINYYMYHGGTNFGRTAGGPFIATSYDYDAPLDEYGLERQPKWGHLKDLHRAIKLCEPALVSGEPTRMPLGNYQEAHVYKSKSGACSAFLANYNPKSYAKVSFGNNHYNLPPWSISILPDCKNTVYNTARVGAQTSRMKMVRVPVHGGLSWQAYNEDPSTYIDESFTMVGLVEQINTTRDTSDYLWYMTDVKVDANEGFLRNGDLPTLTVLSAGHAMHVFINGQLSGSAYGSLDSPKLTFRKGVNLRAGFNKIAILSIAVGLPNVGPHFETWNAGVLGPVSLNGLNGGRRDLSWQKWTYKVGLKGESLSLHSLSGSSSVEWAEGAFVAQKQPLTWYKTTFSAPAGDSPLAVDMGSMGKGQIWINGQSLGRHWPAYKAVGSCSECSYTGTFREDKCLRNCGEASQRWYHVPRSWLKPSGNLLVVFEEWGGDPNGITLVRREVDSVCADIYEWQSTLVNYQLHASGKVNKPLHPKAHLQCGPGQKITTVKFASFGTPEGTCGSYRQGSCHAHHSYDAFNKLCVGQNWCSVTVAPEMFGGDPCPNVMKKLAVEAVCA

SEQ ID NO: 43639 - DNA, 1313 bp, Arabidopsis thaliana
  misc_feature (1)..(1313): Ceres Seq. ID no. 12641113
  misc_feature (1)..(1313): Ortholog of  Ceres SEQ ID NO 14313449 as cited in SEQ ID NO 62735
gatttatagcagaggaaagtgaaatcatgaaagggattctagggtttgaatacgggatagttcaggcgccattaggaccagatatctccggaccagagcttgtagccgccgtcgctaatgcaggagggattggtcttctcagatgtcctgattgggtaaattgcaactttttcgttttctttgatttttgtttatagatatattgaattatgtgaatcaatgaatcaggagtgtcctgattacttgagagagcttataagaaagacaaagacattgacagagaaaccatttgggatcggtgttgttcttgcgtttcctcatgatttgaacattaagacaatcttagaagagaaagtggctgtcttgcagctttattggggtgattgttcacaggagcttgtggatgatgctcactttgccggtgtcaaagttattcctcaggtggggaatgtcgaagaagctagaaaggctgttgctgtaggagtagacgccattattgtccaagggcgtgaagcaggtgggcatgttattggcaaggatggtctcttttcattgttgccaagagtggtggatttagttggggaacgcgatattcccgttattgctgctggaggaattgtggatggacgcggttatgttgcagctttgtcacttggggctcaaggggtctgtctaggcacaagatttgtggcgactcatgaaagctatgcacacccaatatacaaaaggaagttgattgaatatgaaaaaaccgaatacacggatgtatttggaagagcaaggtggcctggtgcgcctcaacgtgttctggagacgcctttctttgatgactggaggtctcttccggctcatgagaatgaagttaaccaacctattattggacgttccaccatacatggcgttgaaaaggagataagaagattttcaggaacagtaccaaacatgacgacaacaggcgacttagagagtatggctatgtatgcaggccaaagcgtaggccttatcaaggagattttaccggctggagaggtagtgaaaagtcttgtggaagaagctcaggctctgatcctccaaaagttcaacaatgctactactacatgatgcagtcccagcctcaaatcatgagaaaacataaactttactgcttttggaatcgggatgaaaatagtctcatctaatgtaaataaggtacataaacttctgtatctctcgtgttgttttcaactagaaaaattgtgtccatcatgtgtaatccagcaatagaccttgtgtattggattaagtatacttcttatggttgtttgtttcctgtg

SEQ ID NO: 43640 - protein, 293 aa, Arabidopsis thaliana
  peptide (1)..(293): Ceres Seq. ID no. 12641114
MNQECPDYLRELIRKTKTLTEKPFGIGVVLAFPHDLNIKTILEEKVAVLQLYWGDCSQELVDDAHFAGVKVIPQVGNVEEARKAVAVGVDAIIVQGREAGGHVIGKDGLFSLLPRVVDLVGERDIPVIAAGGIVDGRGYVAALSLGAQGVCLGTRFVATHESYAHPIYKRKLIEYEKTEYTDVFGRARWPGAPQRVLETPFFDDWRSLPAHENEVNQPIIGRSTIHGVEKEIRRFSGTVPNMTTTGDLESMAMYAGQSVGLIKEILPAGEVVKSLVEEAQALILQKFNNATTT

SEQ ID NO: 43641 - DNA, 1372 bp, Arabidopsis thaliana
  misc_feature (1)..(1372): Ceres Seq. ID no. 12336296
  misc_feature (1)..(1372): Ortholog of  Ceres SEQ ID NO 13655988 as cited in SEQ ID NO 65557
aaaaatagctttcttcttttggccccttacccagagatagattcttatatactactgagaatcttcaatttctgcaacttttgtatctcttcctgatggagtcttcgagtccccaccatagtcacattgttgaggttaatgttggaaaatctgatgaagagagaataattgtggcgagtaaagtctgtggagaagcaccatgtgggttttcagattctaagaatgcttccggggatgctcacgaacgctctgcttctatgcggaagctttgtatcgccgtcgtgctgtgtctagtgttcatgagtgttgaagttgttggtgggattaaagccaatagtttagctatattaaccgatgcagctcatttgctctctgacgttgctgcctttgctatctccctcttctcattgtgggctgctggctgggaagcgactcctaggcagacttacgggttcttcaggattgagattttgggtgctcttgtatctatccagctcatttggttgctcacgggtattctggtttatgaagcgattatcagaattgttacagagaccagtgaggttaatggattcctcatgtttctggttgctgcctttggtctagtggtgaacatcataatggctgttctgctagggcatgatcatggtcacagtcatggacatgggcatggccacggccatgaccatcacaatcatagccatggggtgactgttaccactcatcaccatcatcacgatcatgaacatggccatagtcatggtcatggagaggacaagcatcatgctcatggggatgttactgagcaattgttggacaaatcgaagactcaagtcgcagcaaaagagaaaagaaagagaaacatcaatctccaaggagcttatctgcatgtccttggggattccatccagagtgttggtgttatgattggaggagctatcatttggtacaatccggaatggaagatagtggatctgatctgcacacttgccttttcggttattgtcctaggaacaaccatcaacatgattcgcaacattctagaagtattgatggagagtacacccagagagattgacgccacaaagctcgaaaagggtttgctcgaaatggaagaagtggtggctgttcatgagctccacatatgggctatcacagtgggaaaagtgctattggcttgccatgtcaatatcagaccagaagcagatgcagatatggtgctcaacaaggtaattgattacatccgcagggagtacaacattagtcatgtcacgatacaaatcgagcgctaaaagctaagtaagatctgatgaagggtttttgtatcagcattctcattaacaataaaatcaataaagtttctacatttttc

SEQ ID NO: 43642 - protein, 398 aa, Arabidopsis thaliana
  peptide (1)..(398): Ceres Seq. ID no. 12336297
MESSSPHHSHIVEVNVGKSDEERIIVASKVCGEAPCGFSDSKNASGDAHERSASMRKLCIAVVLCLVFMSVEVVGGIKANSLAILTDAAHLLSDVAAFAISLFSLWAAGWEATPRQTYGFFRIEILGALVSIQLIWLLTGILVYEAIIRIVTETSEVNGFLMFLVAAFGLVVNIIMAVLLGHDHGHSHGHGHGHGHDHHNHSHGVTVTTHHHHHDHEHGHSHGHGEDKHHAHGDVTEQLLDKSKTQVAAKEKRKRNINLQGAYLHVLGDSIQSVGVMIGGAIIWYNPEWKIVDLICTLAFSVIVLGTTINMIRNILEVLMESTPREIDATKLEKGLLEMEEVVAVHELHIWAITVGKVLLACHVNIRPEADADMVLNKVIDYIRREYNISHVTIQIER

SEQ ID NO: 43643 - protein, 344 aa, Arabidopsis thaliana
  peptide (1)..(344): Ceres Seq. ID no. 12336298
MRKLCIAVVLCLVFMSVEVVGGIKANSLAILTDAAHLLSDVAAFAISLFSLWAAGWEATPRQTYGFFRIEILGALVSIQLIWLLTGILVYEAIIRIVTETSEVNGFLMFLVAAFGLVVNIIMAVLLGHDHGHSHGHGHGHGHDHHNHSHGVTVTTHHHHHDHEHGHSHGHGEDKHHAHGDVTEQLLDKSKTQVAAKEKRKRNINLQGAYLHVLGDSIQSVGVMIGGAIIWYNPEWKIVDLICTLAFSVIVLGTTINMIRNILEVLMESTPREIDATKLEKGLLEMEEVVAVHELHIWAITVGKVLLACHVNIRPEADADMVLNKVIDYIRREYNISHVTIQIER

SEQ ID NO: 43644 - protein, 330 aa, Arabidopsis thaliana
  peptide (1)..(330): Ceres Seq. ID no. 12336299
MSVEVVGGIKANSLAILTDAAHLLSDVAAFAISLFSLWAAGWEATPRQTYGFFRIEILGALVSIQLIWLLTGILVYEAIIRIVTETSEVNGFLMFLVAAFGLVVNIIMAVLLGHDHGHSHGHGHGHGHDHHNHSHGVTVTTHHHHHDHEHGHSHGHGEDKHHAHGDVTEQLLDKSKTQVAAKEKRKRNINLQGAYLHVLGDSIQSVGVMIGGAIIWYNPEWKIVDLICTLAFSVIVLGTTINMIRNILEVLMESTPREIDATKLEKGLLEMEEVVAVHELHIWAITVGKVLLACHVNIRPEADADMVLNKVIDYIRREYNISHVTIQIER

SEQ ID NO: 43645 - DNA, 1665 bp, Arabidopsis thaliana
  misc_feature (1)..(1665): Ceres Seq. ID no. 12348569
  misc_feature (1)..(1665): Ortholog of  Ceres SEQ ID NO 12608463 as cited in SEQ ID NO 60238
aaaacagagaaaacaaaaaaatgaaaggaaagtagaaaaaagagaaaaagttttgcagaaggaagaaaaaaaaaaagaagagaaaaaatgggtcttcgtctccgtcttcgtctccctcacaaaagctctcctcgttcaccttcctatctccttctctgtgttcttgctctatccttcttctccttcaccgctcttcttttctacaaggttgacgactttatagctcagacaaaaactctggccggacataacttggaaccaacaccgtggcatatcttcccacgcaaatctttcagcgcagctacgaaacattctcaggcttaccgaatcctccagtgctcctacttctcatgtccgtacaaagccgtcgtccaaccaaagagtctccactcggaatctgggtcgggtcgtcaaacccatcaaccacaatgcccagacttcttcagccaggtggattcaccgggatttagagccgtgggcaaagactggggtgactaaagagcacgtgaagagggcaaaagcgaatgctgcgtttcgagtggtgatactatcagggaagttatacgtggatctctattacgcatgtgtgcagagcagaatgatgttcaccatttgggggattctgcaactgctcaccaagtatccagggatggttcctgatgtcgacatgatgtttgattgtatggacaaacccatcatcaaccagaccgagtaccagtcctttcctgttccgctttttcgatattgcaccaacgaagctcatttggacattccttttccggattggtcgttttggggatggtcggagacaaatctaaggccctgggaagaagagtttggggatataaagcaagggtctaggagaagaagttggtacaacaagcaacctagagcttactggaaaggcaatcccgatgttgtatcgcctatacgactggagctcatgaaatgcaaccattcaaggttatggggagcacagattatgcgccaggactgggcagaagaagcaaaaggtgggtttgagcaatccaagctttccaaccaatgcaatcaccggtacaaaatctatgcagaaggttatgcgtggtcagtttctctaaagtatatcttatcatgtggttccatgacactcataatatcacctgagtatgaagatttcttcagtagaggcctccttcccaaggaaaattactggcctatctctcccactgatctatgtcggtccatcaaatacgctgttgattggggaaattccaacccctctgaagctgaaacaattggaaaaagaggacagggttatatggaaagccttagcatgaaccgggtttatgactatatgtttcatctcatcactgagtactcgaaacttcagaagttcaagccagagaagccggcttccgctaatgaagtctgtgcaggatcattgctctgcattgcagaacaaaaagagcgggaactactcgaaagatccagagtcgtaccttctctggatcaaccatgtaaatttccagtagaagataggaataggcttgagtggttgatccaacagaagaataaaacaatcgaaaatgttagatacatggagatgacaagaacacagaggggttctaaatgaattgtctttttagggacatgaatttttggtgtatcctctctctttttttg

SEQ ID NO: 43646 - protein, 338 aa, Arabidopsis thaliana
  peptide (1)..(338): Ceres Seq. ID no. 12348570
MMFTIWGILQLLTKYPGMVPDVDMMFDCMDKPIINQTEYQSFPVPLFRYCTNEAHLDIPFPDWSFWGWSETNLRPWEEEFGDIKQGSRRRSWYNKQPRAYWKGNPDVVSPIRLELMKCNHSRLWGAQIMRQDWAEEAKGGFEQSKLSNQCNHRYKIYAEGYAWSVSLKYILSCGSMTLIISPEYEDFFSRGLLPKENYWPISPTDLCRSIKYAVDWGNSNPSEAETIGKRGQGYMESLSMNRVYDYMFHLITEYSKLQKFKPEKPASANEVCAGSLLCIAEQKERELLERSRVVPSLDQPCKFPVEDRNRLEWLIQQKNKTIENVRYMEMTRTQRGSK

SEQ ID NO: 43647 - protein, 337 aa, Arabidopsis thaliana
  peptide (1)..(337): Ceres Seq. ID no. 12348571
MFTIWGILQLLTKYPGMVPDVDMMFDCMDKPIINQTEYQSFPVPLFRYCTNEAHLDIPFPDWSFWGWSETNLRPWEEEFGDIKQGSRRRSWYNKQPRAYWKGNPDVVSPIRLELMKCNHSRLWGAQIMRQDWAEEAKGGFEQSKLSNQCNHRYKIYAEGYAWSVSLKYILSCGSMTLIISPEYEDFFSRGLLPKENYWPISPTDLCRSIKYAVDWGNSNPSEAETIGKRGQGYMESLSMNRVYDYMFHLITEYSKLQKFKPEKPASANEVCAGSLLCIAEQKERELLERSRVVPSLDQPCKFPVEDRNRLEWLIQQKNKTIENVRYMEMTRTQRGSK

SEQ ID NO: 43648 - protein, 321 aa, Arabidopsis thaliana
  peptide (1)..(321): Ceres Seq. ID no. 12348572
MVPDVDMMFDCMDKPIINQTEYQSFPVPLFRYCTNEAHLDIPFPDWSFWGWSETNLRPWEEEFGDIKQGSRRRSWYNKQPRAYWKGNPDVVSPIRLELMKCNHSRLWGAQIMRQDWAEEAKGGFEQSKLSNQCNHRYKIYAEGYAWSVSLKYILSCGSMTLIISPEYEDFFSRGLLPKENYWPISPTDLCRSIKYAVDWGNSNPSEAETIGKRGQGYMESLSMNRVYDYMFHLITEYSKLQKFKPEKPASANEVCAGSLLCIAEQKERELLERSRVVPSLDQPCKFPVEDRNRLEWLIQQKNKTIENVRYMEMTRTQRGSK

SEQ ID NO: 43649 - DNA, 1296 bp, Arabidopsis thaliana
  misc_feature (1)..(1296): Ceres Seq. ID no. 12738812
  misc_feature (1)..(1296): Ortholog of  Ceres SEQ ID NO 12578315 as cited in SEQ ID NO 62451
  misc_feature (1)..(1296): Ortholog of  Ceres SEQ ID NO 13584577 as cited in SEQ ID NO 65298
gtctatcttttataccaaaaaatataaaataaaaaacactatggcggaaaactacgaccgtgccagtgagttaaaagcattcgacgagatgaagattggcgtgaaaggactcgtcgacgccggagtcacaaatgtcccgcgcattttccataacccgcatgttaacgtagaaaaccctaagcctacatcgacggtggtgatgattccaacaatcgatctaggtggcgtgttcgaatccacggtcgtgcgagagagtgtagttgcgaaggttaaagacgcaatggagaagtttggatttttccaggcgattaaccatggggttccacttgatgtgatggagaagatgataaatggtattcgtcggtttcacgaccaagatccagaagtgaggaaaatgttctatacccgagacaaaaccaaaaagcttaaatatcactctaatgctgatctctatgagtctcctgctgcgagttggagagataccttaagttgtgtcatggctcctgatgttccaaaagcacaggaattacctgaggtttgtggggagatcatgttggagtactcaaaggaagtgatgaagttagcggagttaatgtttgaaattttatcagaagctttagggttgagtcctaaccacctcaaagaaatggattgcgcaaaaggtttatggatgctctgtcattgttttccaccctgtcctgagccaaaccgaacattcggcggcgctcagcacacagacagatctttccttactattcttcttaacgacaacaatggaggacttcaagttctctacgatggatactggatcgatgttcctcctaatcccgaagcacttatctttaacgtaggagatttcctccagcttatctcgaatgacaagtttgtaagcatggagcatagaattttggcaaatggaggtgaagagccgcgcatttcggtcgcttgtttctttgtgcatacttttacttcaccaagttcgagagtatatggacccattaaagagcttctgtctgagctaaaccctccaaaatacagagacaccacctcggaatcctccaatcactatgtggctagaaaacctaatgggaattcttcgttggaccatttaaggatctgaaacttgaacctatatctcagaggttttcttaagtttccaataaaatttggtgcacgctgtgacgtaccatgttcaagaccttgaacgtatcattcaataattcttccgttgtgagtttcggttgcatgtttgacccaaaccagagagagtatggatcaatcaaggagagtgaacct

SEQ ID NO: 43650 - protein, 372 aa, Arabidopsis thaliana
  peptide (1)..(372): Ceres Seq. ID no. 12738813
SIFYTKKYKIKNTMAENYDRASELKAFDEMKIGVKGLVDAGVTNVPRIFHNPHVNVENPKPTSTVVMIPTIDLGGVFESTVVRESVVAKVKDAMEKFGFFQAINHGVPLDVMEKMINGIRRFHDQDPEVRKMFYTRDKTKKLKYHSNADLYESPAASWRDTLSCVMAPDVPKAQELPEVCGEIMLEYSKEVMKLAELMFEILSEALGLSPNHLKEMDCAKGLWMLCHCFPPCPEPNRTFGGAQHTDRSFLTILLNDNNGGLQVLYDGYWIDVPPNPEALIFNVGDFLQLISNDKFVSMEHRILANGGEEPRISVACFFVHTFTSPSSRVYGPIKELLSELNPPKYRDTTSESSNHYVARKPNGNSSLDHLRI

SEQ ID NO: 43651 - protein, 359 aa, Arabidopsis thaliana
  peptide (1)..(359): Ceres Seq. ID no. 12738814
MAENYDRASELKAFDEMKIGVKGLVDAGVTNVPRIFHNPHVNVENPKPTSTVVMIPTIDLGGVFESTVVRESVVAKVKDAMEKFGFFQAINHGVPLDVMEKMINGIRRFHDQDPEVRKMFYTRDKTKKLKYHSNADLYESPAASWRDTLSCVMAPDVPKAQELPEVCGEIMLEYSKEVMKLAELMFEILSEALGLSPNHLKEMDCAKGLWMLCHCFPPCPEPNRTFGGAQHTDRSFLTILLNDNNGGLQVLYDGYWIDVPPNPEALIFNVGDFLQLISNDKFVSMEHRILANGGEEPRISVACFFVHTFTSPSSRVYGPIKELLSELNPPKYRDTTSESSNHYVARKPNGNSSLDHLRI

SEQ ID NO: 43652 - protein, 343 aa, Arabidopsis thaliana
  peptide (1)..(343): Ceres Seq. ID no. 12738815
MKIGVKGLVDAGVTNVPRIFHNPHVNVENPKPTSTVVMIPTIDLGGVFESTVVRESVVAKVKDAMEKFGFFQAINHGVPLDVMEKMINGIRRFHDQDPEVRKMFYTRDKTKKLKYHSNADLYESPAASWRDTLSCVMAPDVPKAQELPEVCGEIMLEYSKEVMKLAELMFEILSEALGLSPNHLKEMDCAKGLWMLCHCFPPCPEPNRTFGGAQHTDRSFLTILLNDNNGGLQVLYDGYWIDVPPNPEALIFNVGDFLQLISNDKFVSMEHRILANGGEEPRISVACFFVHTFTSPSSRVYGPIKELLSELNPPKYRDTTSESSNHYVARKPNGNSSLDHLRI

SEQ ID NO: 43653 - DNA, 1885 bp, Arabidopsis thaliana; identical to SEQ ID NO: 41792
  misc_feature (1)..(1885): Ceres Seq. ID no. 13497214
  misc_feature (1)..(1885): Ortholog of  Ceres SEQ ID NO 13596509 as cited in SEQ ID NO 62004
  misc_feature (1)..(1885): Ortholog of  Ceres SEQ ID NO 13659971 as cited in SEQ ID NO 67565
  misc_feature (1)..(1885): Ortholog of  Ceres SEQ ID NO 13500385 as cited in SEQ ID NO 67583

SEQ ID NO: 43654 - protein, 444 aa, Arabidopsis thaliana; identical to SEQ ID NO: 41793
  peptide (1)..(444): Ceres Seq. ID no. 13497215

SEQ ID NO: 43655 - protein, 430 aa, Arabidopsis thaliana; identical to SEQ ID NO: 41794
  peptide (1)..(430): Ceres Seq. ID no. 13497216

SEQ ID NO: 43656 - protein, 371 aa, Arabidopsis thaliana; identical to SEQ ID NO: 41795
  peptide (1)..(371): Ceres Seq. ID no. 13497217

SEQ ID NO: 43657 - DNA, 1376 bp, Arabidopsis thaliana; identical to SEQ ID NO: 40851
  misc_feature (1)..(1376): Ceres Seq. ID no. 13576752
  misc_feature (1)..(1376): Ortholog of  Ceres SEQ ID NO 14302123 as cited in SEQ ID NO 0
  misc_feature (1)..(1376): Ortholog of  Ceres SEQ ID NO 15179452 as cited in SEQ ID NO 0

SEQ ID NO: 43658 - protein, 258 aa, Arabidopsis thaliana [sequence omitted]

SEQ ID NO: 43659 - protein, 177 aa, Arabidopsis thaliana; identical to SEQ ID NO: 40853
  peptide (1)..(177): Ceres Seq. ID no. 13576754

SEQ ID NO: 43660 - protein, 134 aa, Arabidopsis thaliana; identical to SEQ ID NO: 40854
  peptide (1)..(134): Ceres Seq. ID no. 13576755
  misc_feature (123)..(123): Xaa is any aa, unknown or other

SEQ ID NO: 43661 - DNA, 1289 bp, Arabidopsis thaliana
  misc_feature (1)..(1289): Ceres Seq. ID no. 12371358
  misc_feature (1)..(1289): Ortholog of  Ceres SEQ ID NO 12782785 as cited in SEQ ID NO 0
tttgtatcatgagtaatgttgatatgtttagtgatgaaaagttctcagatgtcagaaacagaatttaaagtgttgcttgagacattcacatttcctgctgattctgctcccttcaagagttgtcatgcctctaccatagttgaggttgttaaagatcatttcttggctgcgtatttcggaggcaccagggaaggagcacctgatgtcaaaatctggttgcagcatttcaaggatggtcaatgggattcaccggttattgttgatgaagagccaggagttccaatgtataaccctgtcttgttcaaacttccatctcatgagctcttattgttctacaaaatcggccaggaggttcaaaaatggagtggttgcatgaaacgatcatatgataaaggtataacttggactgaaagagaacagcttcctcctgggattctcggtcctatcaaaaacaagcccattttgcttgaagacggtactctcctttgcggatcatctgttgagagttggaattcttggggagcatggatggaggtcacttcagatgcgggtagaacatggagaaagaaagggccaatatacattcaaggcaagagtcttagcgtgatccaaccagttccataccaaaccgcagctgggaacttacggattttactcagatcctttactggcattgacagaatctgtatctcagagtctttggatggcggtgagaactggagttttgcagtaccaacggttctcccaaacccaaattcaggtattgatggagtcaagcttaaggatggtaggctagtgcttgcttacaacacagactcaagaggtgtcctcaaattaggagtttctttagacgacggtgattcatggaccgatattttaacgttggaggaatctccgggaatggagtattcgtacccggctgttatacaagccggagacggcaatgtccacgtcacctatacatataacaggacacaaattaagcatgtggtgctcaagactgcgacagatatcgattcgaagccataccgacatggtgaagcaggaggaggacacgtgaacttggatttgtacgaaccaaacattaattaattagctatttgtctcttgaaccatcgatgtggagtgtgacttccttcttacggaagaacaaagaatgttctctttcttgtcttgtaagttattgattgatcgattcttgagtttgtaaaagttgccactagttgatgaatattattgagattgtttataatatatttattgtaatcatataagttagagatttactt

SEQ ID NO: 43662 - protein, 358 aa, Arabidopsis thaliana
  peptide (1)..(358): Ceres Seq. ID no. 12371359
MLICLVMKSSQMSETEFKVLLETFTFPADSAPFKSCHASTIVEVVKDHFLAAYFGGTREGAPDVKIWLQHFKDGQWDSPVIVDEEPGVPMYNPVLFKLPSHELLLFYKIGQEVQKWSGCMKRSYDKGITWTEREQLPPGILGPIKNKPILLEDGTLLCGSSVESWNSWGAWMEVTSDAGRTWRKKGPIYIQGKSLSVIQPVPYQTAAGNLRILLRSFTGIDRICISESLDGGENWSFAVPTVLPNPNSGIDGVKLKDGRLVLAYNTDSRGVLKLGVSLDDGDSWTDILTLEESPGMEYSYPAVIQAGDGNVHVTYTYNRTQIKHVVLKTATDIDSKPYRHGEAGGGHVNLDLYEPNIN

SEQ ID NO: 43663 - protein, 352 aa, Arabidopsis thaliana
  peptide (1)..(352): Ceres Seq. ID no. 12371360
MKSSQMSETEFKVLLETFTFPADSAPFKSCHASTIVEVVKDHFLAAYFGGTREGAPDVKIWLQHFKDGQWDSPVIVDEEPGVPMYNPVLFKLPSHELLLFYKIGQEVQKWSGCMKRSYDKGITWTEREQLPPGILGPIKNKPILLEDGTLLCGSSVESWNSWGAWMEVTSDAGRTWRKKGPIYIQGKSLSVIQPVPYQTAAGNLRILLRSFTGIDRICISESLDGGENWSFAVPTVLPNPNSGIDGVKLKDGRLVLAYNTDSRGVLKLGVSLDDGDSWTDILTLEESPGMEYSYPAVIQAGDGNVHVTYTYNRTQIKHVVLKTATDIDSKPYRHGEAGGGHVNLDLYEPNIN

SEQ ID NO: 43664 - protein, 347 aa, Arabidopsis thaliana; identical to SEQ ID NO: 35320
  peptide (1)..(347): Ceres Seq. ID no. 12371361

SEQ ID NO: 43665 - DNA, 1538 bp, Arabidopsis thaliana
  misc_feature (1)..(1538): Ceres Seq. ID no. 13622074
  misc_feature (1)..(1538): Ortholog of  Ceres SEQ ID NO 14310259 as cited in SEQ ID NO 20662
gcattttccgagtactcaagagaaaggcgatggggtcatcacagtcttcgcaattactcgatgaagaagaagaagaagaagatgaagcagagagcgaaggtgaagaagtagaagaagaagaagatgaagcagagagcgaattgaataacagaagaatcgagctggataatctcttggtcaagaaagttctcgagcaagagcctgagatgcttccttgtcacgcctctgcttctccactctctcctcagctctcttctcttggaactcctcgaatcggaccttccattaaagtctgggatccttacaacgtcctcgcgccacctcctccttcttctccgcctcttttctctcgtatctcctccgccgcggaacacgatcgctccgccgtgacggaagtctatttcatcagccacggcgagtgtgatctcaatctcaggcctgatctgattggaggtagatgccacgtggctactctcacacccaacgggaaacgtcaggcgagagctctagccgtatttttaaactctgaaggtgttcgattcacctccgtcttctcttcgcctctggatcgagctagatccatggctgtttctgtttgccaggaaatgaattttcctgaggagcatttgcaagtctcggatgctgtggttgagatgagtttaggggactgggaaagctgtcatcggtcagagatttacacacctgaaactctaagtttaatagaaagatgccaacctgatttctcagctccatctggtgaatcactcagacaagtagagtttcggatggttcagtttctgaatgggacagtctcaggactttcggagaagctcaggtcagaacttcttccatctacacagcacacaaattccagagggttctcgttagctacttctattcatcgcccaattcttacaaggaagaaatctgggaagagccggtttcaggtgatgaatgcaactggtgatcacgagggtagtgaagagatatttagtaatcacaatgatgaacaacacctaggtgatataaacatcaagagttcttcttctcaactctcaacctgcattggagttttcactcactctttacctataaagtgtcttcttaccggtatccttggatgcagcccggtaatgacacataagatctgtgtggaggattcctctgtgaccgtattacagcattcgtggaaaaccgggtggcaggtaaagcggttaaatgacaccgctcatcttagactgttgtagcctcatcatcatcaaattcttttactctctgaaagctcgaaaacacagcgagctggtaaattattgcaagaccttcacaagtcatttgagtctgcagaagaagatcaacaagcttgcagattacatgctcccgccacgagcctcttgtacgtttgttttgagaaagaaaagctaaagatttgttaatgctgatgtttcactaccttgttctgtttgattctttctatttgcaagcttcctcttatgtaattcttatgcttataatcacacaaaaaaaaaaagctcattgcc

SEQ ID NO: 43666 - protein, 414 aa, Arabidopsis thaliana
  peptide (1)..(414): Ceres Seq. ID no. 13622075
IFRVLKRKAMGSSQSSQLLDEEEEEEDEAESEGEEVEEEEDEAESELNNRRIELDNLLVKKVLEQEPEMLPCHASASPLSPQLSSLGTPRIGPSIKVWDPYNVLAPPPPSSPPLFSRISSAAEHDRSAVTEVYFISHGECDLNLRPDLIGGRCHVATLTPNGKRQARALAVFLNSEGVRFTSVFSSPLDRARSMAVSVCQEMNFPEEHLQVSDAVVEMSLGDWESCHRSEIYTPETLSLIERCQPDFSAPSGESLRQVEFRMVQFLNGTVSGLSEKLRSELLPSTQHTNSRGFSLATSIHRPILTRKKSGKSRFQVMNATGDHEGSEEIFSNHNDEQHLGDINIKSSSSQLSTCIGVFTHSLPIKCLLTGILGCSPVMTHKICVEDSSVTVLQHSWKTGWQVKRLNDTAHLRLL

SEQ ID NO: 43667 - protein, 405 aa, Arabidopsis thaliana
  peptide (1)..(405): Ceres Seq. ID no. 13622076
MGSSQSSQLLDEEEEEEDEAESEGEEVEEEEDEAESELNNRRIELDNLLVKKVLEQEPEMLPCHASASPLSPQLSSLGTPRIGPSIKVWDPYNVLAPPPPSSPPLFSRISSAAEHDRSAVTEVYFISHGECDLNLRPDLIGGRCHVATLTPNGKRQARALAVFLNSEGVRFTSVFSSPLDRARSMAVSVCQEMNFPEEHLQVSDAVVEMSLGDWESCHRSEIYTPETLSLIERCQPDFSAPSGESLRQVEFRMVQFLNGTVSGLSEKLRSELLPSTQHTNSRGFSLATSIHRPILTRKKSGKSRFQVMNATGDHEGSEEIFSNHNDEQHLGDINIKSSSSQLSTCIGVFTHSLPIKCLLTGILGCSPVMTHKICVEDSSVTVLQHSWKTGWQVKRLNDTAHLRLL

SEQ ID NO: 43668 - protein, 346 aa, Arabidopsis thaliana
  peptide (1)..(346): Ceres Seq. ID no. 13622077
MLPCHASASPLSPQLSSLGTPRIGPSIKVWDPYNVLAPPPPSSPPLFSRISSAAEHDRSAVTEVYFISHGECDLNLRPDLIGGRCHVATLTPNGKRQARALAVFLNSEGVRFTSVFSSPLDRARSMAVSVCQEMNFPEEHLQVSDAVVEMSLGDWESCHRSEIYTPETLSLIERCQPDFSAPSGESLRQVEFRMVQFLNGTVSGLSEKLRSELLPSTQHTNSRGFSLATSIHRPILTRKKSGKSRFQVMNATGDHEGSEEIFSNHNDEQHLGDINIKSSSSQLSTCIGVFTHSLPIKCLLTGILGCSPVMTHKICVEDSSVTVLQHSWKTGWQVKRLNDTAHLRLL

SEQ ID NO: 43669 - DNA, 1617 bp, Arabidopsis thaliana
  misc_feature (1)..(1617): Ceres Seq. ID no. 12336300
  misc_feature (1)..(1617): Ortholog of  Ceres SEQ ID NO 13639469 as cited in SEQ ID NO 54825
  misc_feature (1)..(1617): Ortholog of  Ceres SEQ ID NO 15179301 as cited in SEQ ID NO 0
aaactgaaagttaggacctttcatttccaatctctaaacccatttctctacgattagagaagctgacatcaaaattgaaacttgggaatttttagatttgttcttcttctatggcaactgaagacgatggtgaattgtcagctcgttaccagaacacgttggatgcattgtcgtctttgatcacaaaacgtggccgtttagctagtaacaaccaatctcaccgattccgtttgctctttcattatctcaaggttcttgagcttgaagatgcagtttcacaaatgaaaatcattcatgtggccggaactaaaggaaagggatcaacatgtacatttgcggagtctattcttcgttgttacggtcttcgaactggtctcttcacatctcctcacttaatcgatgtccgagagagattccgtcttaacggcattgagataagccaggagaaatttgtgaactacttttggtgttcctttcataagctcaaggagaaaaccagcaatgaggttgatgttgttatactagaagttggcttaggtgggagattcgatgcgactaatgtgattcagaaacctgtcgtctgtggtatttcttctctagggtatgaccatatggagattcttggatacacacttgctgaaattgctgcagagaaagccggtatcttcaagagtggagttcctgcttttacagtggctcaacctgatgaagcaatgcgtgtactcaatgaaaaagcttcaaaattggaggtgaatcttcaggtggtggaaccgttggactcaagccagagactcgggcttcaaggcgaacatcaatatctaaacgctggtcttgctgttgcgttgtgctctacatttcttaaagagattggtattgaggacaagaatggtttggatcagacaaacggtttacccgaaaaattcatctctggattgtcaaatgcttatttgatgggacgagctatgatagtgcctgattcagaactccctgaagagattgtgtattaccttgatggagctcatagtcctgaaagcatggaagcttgcgctatatggttttcaaaacagatcaaacaaaaccaagaaagaaaccagaaaagatcagagcagatactcttgttcaattgtatgtctgttcgtgacccgagtttgcttcttccgcgattaaggagtaaatgcattgatcaaggagttgatttcaagagagccgtttttgtgccaaacgtatcagtgtacaaccaagtgggatcttcgacaaacgttggcacacgtgtcgagtcgatgtcgtggcagttcggtcttcagaggatttgggagagtttagctcgaggtgaagcaaaatctaattcaaaaagtgattctaaaggcaaagaagaagagaagagtttcgttttctcgtcacttcctgtggctgttgactggctccgggacaatgctcgccaaagtaaacaagttcgttttcaggtgttggtaactggttcattacatttggtgggtgatctcttgagatttatcaagaaatgaatatgtttctgccatgtattcttggccaatctttgcctgtaatgactatatatctcacaacatgatttaacaaaagaaaagaaaagatatttcg

SEQ ID NO: 43670 - protein, 470 aa, Arabidopsis thaliana
  peptide (1)..(470): Ceres Seq. ID no. 12336301
MATEDDGELSARYQNTLDALSSLITKRGRLASNNQSHRFRLLFHYLKVLELEDAVSQMKIIHVAGTKGKGSTCTFAESILRCYGLRTGLFTSPHLIDVRERFRLNGIEISQEKFVNYFWCSFHKLKEKTSNEVDVVILEVGLGGRFDATNVIQKPVVCGISSLGYDHMEILGYTLAEIAAEKAGIFKSGVPAFTVAQPDEAMRVLNEKASKLEVNLQVVEPLDSSQRLGLQGEHQYLNAGLAVALCSTFLKEIGIEDKNGLDQTNGLPEKFISGLSNAYLMGRAMIVPDSELPEEIVYYLDGAHSPESMEACAIWFSKQIKQNQERNQKRSEQILLFNCMSVRDPSLLLPRLRSKCIDQGVDFKRAVFVPNVSVYNQVGSSTNVGTRVESMSWQFGLQRIWESLARGEAKSNSKSDSKGKEEEKSFVFSSLPVAVDWLRDNARQSKQVRFQVLVTGSLHLVGDLLRFIKK

SEQ ID NO: 43671 - protein, 413 aa, Arabidopsis thaliana
  peptide (1)..(413): Ceres Seq. ID no. 12336302
MKIIHVAGTKGKGSTCTFAESILRCYGLRTGLFTSPHLIDVRERFRLNGIEISQEKFVNYFWCSFHKLKEKTSNEVDVVILEVGLGGRFDATNVIQKPVVCGISSLGYDHMEILGYTLAEIAAEKAGIFKSGVPAFTVAQPDEAMRVLNEKASKLEVNLQVVEPLDSSQRLGLQGEHQYLNAGLAVALCSTFLKEIGIEDKNGLDQTNGLPEKFISGLSNAYLMGRAMIVPDSELPEEIVYYLDGAHSPESMEACAIWFSKQIKQNQERNQKRSEQILLFNCMSVRDPSLLLPRLRSKCIDQGVDFKRAVFVPNVSVYNQVGSSTNVGTRVESMSWQFGLQRIWESLARGEAKSNSKSDSKGKEEEKSFVFSSLPVAVDWLRDNARQSKQVRFQVLVTGSLHLVGDLLRFIKK

SEQ ID NO: 43672 - protein, 303 aa, Arabidopsis thaliana
  peptide (1)..(303): Ceres Seq. ID no. 12336303
MEILGYTLAEIAAEKAGIFKSGVPAFTVAQPDEAMRVLNEKASKLEVNLQVVEPLDSSQRLGLQGEHQYLNAGLAVALCSTFLKEIGIEDKNGLDQTNGLPEKFISGLSNAYLMGRAMIVPDSELPEEIVYYLDGAHSPESMEACAIWFSKQIKQNQERNQKRSEQILLFNCMSVRDPSLLLPRLRSKCIDQGVDFKRAVFVPNVSVYNQVGSSTNVGTRVESMSWQFGLQRIWESLARGEAKSNSKSDSKGKEEEKSFVFSSLPVAVDWLRDNARQSKQVRFQVLVTGSLHLVGDLLRFIKK

SEQ ID NO: 43673 - DNA, 1004 bp, Arabidopsis thaliana
  misc_feature (1)..(1004): Ceres Seq. ID no. 12336304
  misc_feature (1)..(1004): Ortholog of  Ceres SEQ ID NO 13595187 as cited in SEQ ID NO 56052
  misc_feature (1)..(1004): Ortholog of  Ceres SEQ ID NO 13662053 as cited in SEQ ID NO 61547
  misc_feature (1)..(1004): Ortholog of  Ceres SEQ ID NO 13624283 as cited in SEQ ID NO 0
aaagaccaaaagaaaaaaaaatctttttcttttctgatgaatcgtatctattagctatgagcctgaggtgatgatcatgtcaacataaccatcaacgttctaccatggctagtcctagcaacaaaggcaaaggcatagcagaaggatcgtctcaaccgcaatcgcaaccgcaaccacaaccacaccaactgcaatcacctcctaacccgccagcgttaagccggtacgagtcacagaaacgacgagactggaacacgttttgtcaatacctgcgtaaccaacagccaccggttcacatctcgcagtgtggatcaaaccacatcctcgatttcctccaatatctcgaccagtttgggaagacaaaggttcatatccatggatgcgttttcttcggacaggttgagccagcgggacagtgtaactgtcctttaaaacaagcgtgggggagtttagatgctttgatcggacggctaagagcggctttcgaggagaacggaggattgccggagagaaacccttttgccggcggcggaattagggtttttctgagggaagtgagagattcacaggcgaaggcaagaggagttccgtacaagaaaagaaaaaagaggaagaagaggaatcctatgaagagtcatgatggtgaagatggtactacgggaactagtagtagctccaacttggcttcttagcggaagcaaacaaaaaatctataataaaacaaaagtggaattagttaatggtaagcatttaatactctccataatctctattaattttcagtactttaatcctattttgtgatctatttacaattttacatatagagtgaaaagaaacaattctacatttgtttcttgatagtcagctcttaatgcatagttgaattttatacgtatcatacccaaactataagattaatcttgatcttagatcatatacatatatcatcatggtgtgtaccctaagtttcataatcatttttcttaactatttatgtggat

SEQ ID NO: 43674 - protein, 195 aa, Arabidopsis thaliana
  peptide (1)..(195): Ceres Seq. ID no. 12336305
MASPSNKGKGIAEGSSQPQSQPQPQPHQLQSPPNPPALSRYESQKRRDWNTFCQYLRNQQPPVHISQCGSNHILDFLQYLDQFGKTKVHIHGCVFFGQVEPAGQCNCPLKQAWGSLDALIGRLRAAFEENGGLPERNPFAGGGIRVFLREVRDSQAKARGVPYKKRKKRKKRNPMKSHDGEDGTTGTSSSSNLAS

SEQ ID NO: 43675 - DNA, 1292 bp, Arabidopsis thaliana
  misc_feature (1)..(1292): Ceres Seq. ID no. 12395382
  misc_feature (1)..(1292): Ortholog of  Ceres SEQ ID NO 15180702 as cited in SEQ ID NO 0
tgtattaggtttgacacctttcggaaaaatggaagatgtaaacggttccgatcgattctccttcgagatcaaacagccctacgttgaagaacggttggaaaataggaaacgggaagaagcagctgtagatgcggtgagtttcgtggcggagactgaaaatgggaagaaggaggtcaattttgtgccgaagaagcttctaattgtggtcacaccaacgtataatagagcgatgcaggcgtattacttgaacagggttgctcaaacgctgagactagttgagtcgcctgtgctgtggatagtggtggagggtaacgtggcgtcgtttgaaacctcagagattctgaggaagacgggagtgatgtacaggcacttggtttgcaagaggaacatgacgagtatcaaggatagaggagtgcatcagagaaacactgcattggaacatattgagttgcataagcttgatggaattgtctactttgctgatgatgacaatatctactcgcttgagctctttcaaagcttgagacaaatcagccgatttgggacttggcctgttgctatgctcgcacaaagcaaaaacaaggccatccttgaaggtccagtatgcaatggaagtcaagtaataggatggcacactaatgaaaagagtaaaagactaaggaggttccatgttgatatgtcgggatttgcttttaacagcactatactctgggaccctaaaaggtggcgacgtcccttttcacatccaacccgccaactagacacagtgaaggagggtttccaggagacatcatttatagagcaggtggtggctgatgaaagcgagatggaaggtgttccaccagcttgctcgagtatactgaactggcatcttcacttggatgccctggatgtcccttatccacaagggtgggcgatccaaaagaatctgcaggctctcataactatgaaatagtttgaagatagttttgactggtttctacttaccccatgtgctgtgctcattactggatatatatcaaagaagcatatgaagaatggaagaagacgagcgagggtagtttaggatagtgatgaggcacgcattttggataaacgttgctggaatcgtgagcctcccctgaatgcaagagttgcttggaattaaattgaaggccttggtgttttagtatgagatggaattatattaccttcggacattgatgattccacagcattgtattcgcctatggctaaccaaattcttcttgttcctttttttttttttgcaatgaagaaaaaaattcaccgcc

SEQ ID NO: 43676 - protein, 317 aa, Arabidopsis thaliana
  peptide (1)..(317): Ceres Seq. ID no. 12395383
VLGLTPFGKMEDVNGSDRFSFEIKQPYVEERLENRKREEAAVDAVSFVAETENGKKEVNFVPKKLLIVVTPTYNRAMQAYYLNRVAQTLRLVESPVLWIVVEGNVASFETSEILRKTGVMYRHLVCKRNMTSIKDRGVHQRNTALEHIELHKLDGIVYFADDDNIYSLELFQSLRQISRFGTWPVAMLAQSKNKAILEGPVCNGSQVIGWHTNEKSKRLRRFHVDMSGFAFNSTILWDPKRWRRPFSHPTRQLDTVKEGFQETSFIEQVVADESEMEGVPPACSSILNWHLHLDALDVPYPQGWAIQKNLQALITMK

SEQ ID NO: 43677 - protein, 308 aa, Arabidopsis thaliana
  peptide (1)..(308): Ceres Seq. ID no. 12395384
MEDVNGSDRFSFEIKQPYVEERLENRKREEAAVDAVSFVAETENGKKEVNFVPKKLLIVVTPTYNRAMQAYYLNRVAQTLRLVESPVLWIVVEGNVASFETSEILRKTGVMYRHLVCKRNMTSIKDRGVHQRNTALEHIELHKLDGIVYFADDDNIYSLELFQSLRQISRFGTWPVAMLAQSKNKAILEGPVCNGSQVIGWHTNEKSKRLRRFHVDMSGFAFNSTILWDPKRWRRPFSHPTRQLDTVKEGFQETSFIEQVVADESEMEGVPPACSSILNWHLHLDALDVPYPQGWAIQKNLQALITMK

SEQ ID NO: 43678 - protein, 241 aa, Arabidopsis thaliana
  peptide (1)..(241): Ceres Seq. ID no. 12395385
MQAYYLNRVAQTLRLVESPVLWIVVEGNVASFETSEILRKTGVMYRHLVCKRNMTSIKDRGVHQRNTALEHIELHKLDGIVYFADDDNIYSLELFQSLRQISRFGTWPVAMLAQSKNKAILEGPVCNGSQVIGWHTNEKSKRLRRFHVDMSGFAFNSTILWDPKRWRRPFSHPTRQLDTVKEGFQETSFIEQVVADESEMEGVPPACSSILNWHLHLDALDVPYPQGWAIQKNLQALITMK

SEQ ID NO: 43679 - DNA, 2821 bp, Arabidopsis thaliana
  misc_feature (1)..(2821): Ceres Seq. ID no. 13580519
  misc_feature (1)..(2821): Ortholog of  Ceres SEQ ID NO 14310362 as cited in SEQ ID NO 54251
  misc_feature (1)..(2821): Ortholog of  Ceres SEQ ID NO 12583314 as cited in SEQ ID NO 56435
  misc_feature (1)..(2821): Ortholog of  Ceres SEQ ID NO 13654989 as cited in SEQ ID NO 63117
  misc_feature (1)..(2821): Ortholog of  Ceres SEQ ID NO 13584744 as cited in SEQ ID NO 69137
aaaattcttcaattctcttctcgtttttttttttttatcaattccaatgatctgtcacgttttagtaattttcactattctcgtttccgccgtcgtcgacgcaacggcgtcgtatgagcccactgatgtctttctcatcaattgcggcgatacctccaacaacatggactacagtggccggaactggacgacggagaatccgaaatttatgtcatcgaatgcagttgacgacgcgtcgttcacttcatctgcgtcataccaagaatcagggattcctcaagtgccgtacttgaaagctaggattttccgatatgatttcacttacagttttccagtctctcccggctggaaattcctccggttatacttttatccgacccgttacggatccgatttcgacgccgttaaatccttcttctccgtcaacgtcaaccgtttcactctcttgcataacttcagtgtaaaagcttccataccggagtcaagttctctaatcaaagagtttatcgttccggttaaccaaactcttgatctcacgttcacgccctctccgaattcattagctttcgttaacggaatcgagattatctccatgcctgaccggttttactcaaagggaggatttgacgacgttgtaagaaacgttggtagggacgttgacttcgagatagacaactccacggctttcgagaccgtttatcgggtaaacgtaggtggaaaagtggtgggcgacgtcggagattcgggaatgttccggcgttggctttccgatgaaggtttcttactcggtattaattcgggagccattccgaatataacaggtgtaaagatcaactacacggataaaactcccgcgtacgttgcgccggaagatgtatacacgacgtgtcgcctgatggggaacaaagacagtcctgagctaaacctgaatttcaacctgacgtggctctttgaagtcgatgccgggtttgcctatatagtgaggcttcatttctgtgagacgcaaccggaagtcaacaaaacgggtgaccgcgtcttctccatcttcttcggatatcaactggccatgcgtgaaatggacgtgtttcggctgagtggtggttttcggctaccgatgtatctagatttcaaggtacttgtcgacgccgacggaactagccagagacctagtcttcgagttgacttgacaccttacaaagaggactatccaacctattacgacgctattttgagtggtgtagagattctcaagctgagtaattctgatggtaatcttgcggggcttaatccaattcctcaactaagtccaccaccacaatctataacgccactaaaaggaaaaggcaagtcatcacatgttttgccaataataattgcagtggttggttctgcagttgcgctagcgttttttgttcttgttgttgtcctcgttgttatgaagagaaagaagaagagcaacgagtctagtgtagataccacgaacaagccttctacgaactcgtcatggggtcctcttctgcacgggacaggctctacaaatacaaaatctgcctcatctcttccatcagatctctgccgtcgattctccatctacgaaatcaaatccgccacaaatgatttcgaggaaaaactaatcataggagtaggcgggtttggttctgtctacaaaggacgaatagacggtggagccacacttgttgcggttaaacggctggaaattacatcgaaccaaggtgctaaagagttcgatacagagctcgagatgctttcaaagcttcgacatgtacacctcgtctctctaatcggatattgcgatgacgacaacgagatggtacttgtctatgagtatttgccacatggtacacttaaagatcatcttttcaggagagacaaggcctctgatcctccattgtcatggaaacgaaggctagagatttgcattggagcagctcgtggattacagtatcttcatactggagccaagtacacgatcatacatagagacatcaaaaccacaaacatacttctcgatgagaacttcgtcgctaaagtatctgactttggtttatcaagagttggtcctactagtgcttctcaaacgcatgtctccaccgtcgttaaaggaacgtttggttacttggatcccgagtactatcgccgtcaaatcttgaccgaaaaatccgacgtgtactcttttggagttgttctgttggaggttttgtgctgtagaccgatcagaatgcaaagtgttccaccggaacaagcagatttgatccgatgggtgaagtcaaatttcaataaaagaaccgttgatcagatcattgactcagatttaaccgctgatatcacttcgacctcgatggagaagttttgtgagatagccattagatgtgttcaagaccgtggtatggaacggccaccgatgaacgacgttgtttgggcgcttgagtttgctcttcagcttcacgagactgctaagaagaagaatgacaacgtggagtctctggatctaatgccaagtggtgaagttggtacgaccacggacggagaagatgacttgtttagtaggactacaggacacgttgggaaatcgaccacgaccgatgactctgttctagttgttggtgatgagaggagtggttcgagttggggagtattttcggagatcaatgaacctaaagcacggtagatttgatggcttggtaaacaagtatcacattctggttagggttgatatatatttgtgtatgtataattgttgaataaacacattattgtatttaaattacattttgatgattatttagcagcttaaatttag

SEQ ID NO: 43680 - protein, 895 aa, Arabidopsis thaliana
  peptide (1)..(895): Ceres Seq. ID no. 13580520
KFFNSLLVFFFLSIPMICHVLVIFTILVSAVVDATASYEPTDVFLINCGDTSNNMDYSGRNWTTENPKFMSSNAVDDASFTSSASYQESGIPQVPYLKARIFRYDFTYSFPVSPGWKFLRLYFYPTRYGSDFDAVKSFFSVNVNRFTLLHNFSVKASIPESSSLIKEFIVPVNQTLDLTFTPSPNSLAFVNGIEIISMPDRFYSKGGFDDVVRNVGRDVDFEIDNSTAFETVYRVNVGGKVVGDVGDSGMFRRWLSDEGFLLGINSGAIPNITGVKINYTDKTPAYVAPEDVYTTCRLMGNKDSPELNLNFNLTWLFEVDAGFAYIVRLHFCETQPEVNKTGDRVFSIFFGYQLAMREMDVFRLSGGFRLPMYLDFKVLVDADGTSQRPSLRVDLTPYKEDYPTYYDAILSGVEILKLSNSDGNLAGLNPIPQLSPPPQSITPLKGKGKSSHVLPIIIAVVGSAVALAFFVLVVVLVVMKRKKKSNESSVDTTNKPSTNSSWGPLLHGTGSTNTKSASSLPSDLCRRFSIYEIKSATNDFEEKLIIGVGGFGSVYKGRIDGGATLVAVKRLEITSNQGAKEFDTELEMLSKLRHVHLVSLIGYCDDDNEMVLVYEYLPHGTLKDHLFRRDKASDPPLSWKRRLEICIGAARGLQYLHTGAKYTIIHRDIKTTNILLDENFVAKVSDFGLSRVGPTSASQTHVSTVVKGTFGYLDPEYYRRQILTEKSDVYSFGVVLLEVLCCRPIRMQSVPPEQADLIRWVKSNFNKRTVDQIIDSDLTADITSTSMEKFCEIAIRCVQDRGMERPPMNDVVWALEFALQLHETAKKKNDNVESLDLMPSGEVGTTTDGEDDLFSRTTGHVGKSTTTDDSVLVVGDERSGSSWGVFSEINEPKAR

SEQ ID NO: 43681 - protein, 880 aa, Arabidopsis thaliana
  peptide (1)..(880): Ceres Seq. ID no. 13580521
MICHVLVIFTILVSAVVDATASYEPTDVFLINCGDTSNNMDYSGRNWTTENPKFMSSNAVDDASFTSSASYQESGIPQVPYLKARIFRYDFTYSFPVSPGWKFLRLYFYPTRYGSDFDAVKSFFSVNVNRFTLLHNFSVKASIPESSSLIKEFIVPVNQTLDLTFTPSPNSLAFVNGIEIISMPDRFYSKGGFDDVVRNVGRDVDFEIDNSTAFETVYRVNVGGKVVGDVGDSGMFRRWLSDEGFLLGINSGAIPNITGVKINYTDKTPAYVAPEDVYTTCRLMGNKDSPELNLNFNLTWLFEVDAGFAYIVRLHFCETQPEVNKTGDRVFSIFFGYQLAMREMDVFRLSGGFRLPMYLDFKVLVDADGTSQRPSLRVDLTPYKEDYPTYYDAILSGVEILKLSNSDGNLAGLNPIPQLSPPPQSITPLKGKGKSSHVLPIIIAVVGSAVALAFFVLVVVLVVMKRKKKSNESSVDTTNKPSTNSSWGPLLHGTGSTNTKSASSLPSDLCRRFSIYEIKSATNDFEEKLIIGVGGFGSVYKGRIDGGATLVAVKRLEITSNQGAKEFDTELEMLSKLRHVHLVSLIGYCDDDNEMVLVYEYLPHGTLKDHLFRRDKASDPPLSWKRRLEICIGAARGLQYLHTGAKYTIIHRDIKTTNILLDENFVAKVSDFGLSRVGPTSASQTHVSTVVKGTFGYLDPEYYRRQILTEKSDVYSFGVVLLEVLCCRPIRMQSVPPEQADLIRWVKSNFNKRTVDQIIDSDLTADITSTSMEKFCEIAIRCVQDRGMERPPMNDVVWALEFALQLHETAKKKNDNVESLDLMPSGEVGTTTDGEDDLFSRTTGHVGKSTTTDDSVLVVGDERSGSSWGVFSEINEPKAR

SEQ ID NO: 43682 - protein, 841 aa, Arabidopsis thaliana
  peptide (1)..(841): Ceres Seq. ID no. 13580522
MDYSGRNWTTENPKFMSSNAVDDASFTSSASYQESGIPQVPYLKARIFRYDFTYSFPVSPGWKFLRLYFYPTRYGSDFDAVKSFFSVNVNRFTLLHNFSVKASIPESSSLIKEFIVPVNQTLDLTFTPSPNSLAFVNGIEIISMPDRFYSKGGFDDVVRNVGRDVDFEIDNSTAFETVYRVNVGGKVVGDVGDSGMFRRWLSDEGFLLGINSGAIPNITGVKINYTDKTPAYVAPEDVYTTCRLMGNKDSPELNLNFNLTWLFEVDAGFAYIVRLHFCETQPEVNKTGDRVFSIFFGYQLAMREMDVFRLSGGFRLPMYLDFKVLVDADGTSQRPSLRVDLTPYKEDYPTYYDAILSGVEILKLSNSDGNLAGLNPIPQLSPPPQSITPLKGKGKSSHVLPIIIAVVGSAVALAFFVLVVVLVVMKRKKKSNESSVDTTNKPSTNSSWGPLLHGTGSTNTKSASSLPSDLCRRFSIYEIKSATNDFEEKLIIGVGGFGSVYKGRIDGGATLVAVKRLEITSNQGAKEFDTELEMLSKLRHVHLVSLIGYCDDDNEMVLVYEYLPHGTLKDHLFRRDKASDPPLSWKRRLEICIGAARGLQYLHTGAKYTIIHRDIKTTNILLDENFVAKVSDFGLSRVGPTSASQTHVSTVVKGTFGYLDPEYYRRQILTEKSDVYSFGVVLLEVLCCRPIRMQSVPPEQADLIRWVKSNFNKRTVDQIIDSDLTADITSTSMEKFCEIAIRCVQDRGMERPPMNDVVWALEFALQLHETAKKKNDNVESLDLMPSGEVGTTTDGEDDLFSRTTGHVGKSTTTDDSVLVVGDERSGSSWGVFSEINEPKAR

SEQ ID NO: 43683 - DNA, 1373 bp, Arabidopsis thaliana
  misc_feature (1)..(1373): Ceres Seq. ID no. 12339572
  misc_feature (1)..(1373): Ortholog of  Ceres SEQ ID NO 14311553 as cited in SEQ ID NO 51462
  misc_feature (1)..(1373): Ortholog of  Ceres SEQ ID NO 13599003 as cited in SEQ ID NO 0
actctttgattagggttttatcattctcaatcagggttttagtttaaacatcgaattaagcactggattagctgattttgtgtgatttgatttcaaagttcacagcttttagtttctctgatcctaatttatgatttgaagtttctatcaaaaggtcaggaactgatgaataaccctgtaccgtgtcagtcggtctctggtggcaattctggtggttatttgtttccttcttcctctggatactgcaatgtttcagctgtcttgcctcatggaaggaatttgcaaaaccagccacctgtttccaccgtgcctagagacagattggctatgcaggattgtcctttgatagctcaatcctcgttgattaatcatcaccctcaagagttcatagatccacttcatgagttctttgatttctctgatcatgttcctgttcagaatctacaagcagagagtagtggagtaagggtggactcatccgtggaacttcataagaaaagtgaatggcaagattgggcagatcagctgatttctgttgacgatggttctgagccaaattggtctgaacttcttggagattcaagttcccacaatccaaattcagagatacctacaccatttttggatgtaccaaggctagatataacagctaaccagcagcaacagatggtttcatcagaggaccagctcagcggcagaaactcatcatctagtgtagcaacatctaaacaacgtatgcgttggacaccagaacttcacgaggcattcgttgaagctgttaatcagcttggtggtagtgaacgagccacccctaaggctgttttgaagctcttgaataaccctggcttgaccatttatcatgtaaaaagccatttgcagaaatatagaacggcaaggtataaaccggagacttcggaagttacaggagaacctcaagagaagaagatgacatctattgaagatatcaaatctcttgacatgaaaacgagcgttgagatcacacaagctctacggttacaaatggaagtgcagaaacgtctccacgagcagctcgagatccaacggtcactgcagttacagattgaaaaacagggccggtacctacagatgatgttcgagaaacaacaaaagatacaagacaacaagagctcttcttcagaagcatcaccaaagcaatgcaatggttcatttgcagaagttgaagttggtcttgagacactaacaggggaccaaaatgaatctgcttcagcatcaaggaaacgtgtcagagaagattaaagcatgtttaatttgatctcgtttgacgaaacatgtttattgggaattaattgtggaaaccaactccagttttgttaaaagaatctgtttctttc

SEQ ID NO: 43684 - protein, 370 aa, Arabidopsis thaliana; identical to SEQ ID NO: 29235
  peptide (1)..(370): Ceres Seq. ID no. 12339573

SEQ ID NO: 43685 - protein, 316 aa, Arabidopsis thaliana; identical to SEQ ID NO: 37572
  peptide (1)..(316): Ceres Seq. ID no. 12339574

SEQ ID NO: 43686 - protein, 203 aa, Arabidopsis thaliana
  peptide (1)..(203): Ceres Seq. ID no. 12339575
MVSSEDQLSGRNSSSSVATSKQRMRWTPELHEAFVEAVNQLGGSERATPKAVLKLLNNPGLTIYHVKSHLQKYRTARYKPETSEVTGEPQEKKMTSIEDIKSLDMKTSVEITQALRLQMEVQKRLHEQLEIQRSLQLQIEKQGRYLQMMFEKQQKIQDNKSSSSEASPKQCNGSFAEVEVGLETLTGDQNESASASRKRVRED

SEQ ID NO: 43687 - DNA, 1010 bp, Arabidopsis thaliana; identical to SEQ ID NO: 41607
  misc_feature (1)..(1010): Ceres Seq. ID no. 13646176
  misc_feature (1)..(1010): Ortholog of  Ceres SEQ ID NO 13593920 as cited in SEQ ID NO 54151
  misc_feature (1)..(1010): Ortholog of  Ceres SEQ ID NO 15225313 as cited in SEQ ID NO 58628

SEQ ID NO: 43688 - protein, 251 aa, Arabidopsis thaliana; identical to SEQ ID NO: 41608
  peptide (1)..(251): Ceres Seq. ID no. 13646177

SEQ ID NO: 43689 - protein, 232 aa, Arabidopsis thaliana; identical to SEQ ID NO: 41609
  peptide (1)..(232): Ceres Seq. ID no. 13646178

SEQ ID NO: 43690 - protein, 186 aa, Arabidopsis thaliana; identical to SEQ ID NO: 41610
  peptide (1)..(186): Ceres Seq. ID no. 13646179

SEQ ID NO: 43691 - DNA, 1152 bp, Arabidopsis thaliana
  misc_feature (1)..(1152): Ceres Seq. ID no. 12336310
  misc_feature (1)..(1152): Ortholog of  Ceres SEQ ID NO 14312262 as cited in SEQ ID NO 57108
acagagatatcttcctctctactttttcgccaccatctctcccatctctcctctctctctttgagttgcgactatgtccggcgaaaactggattcgagtggccatgtctgacgattccatggtggcggaggcgcttcttcggctccgccactccgaaccgaagaatagagtcgacgcgtcccctctcaagctgaaatggagcgtgcgtcaacggagatcgaagaaaggagaccagacgcgagcaagccccaccacaccgctttcctggagcggtgccacgtctcttagcggcggaggcggcagcggtggaagcggcgccggtgctaccaccatggaaggcctcgaggagtctagcgccgccgtaaaaccctctgagccatttagatctaagatttctcaaacgagtgcaataacaacaacaacaacaacaacccttttcaagagatcaagaaagaagaagactttggctgagcttaaagaggaagagatcatgctcttgaaggaaagtaacggcctgaaaaatgaattggcaaatatgcgcgatttgctcgagcaacaaagagcaagaaacactgctctaaagaagatgaaggctgaatcacaatctgccttatcgtgcaaactcactttcgaacaaggttcttccttcttgctccctgacctaaacatgcctctagataacgacccgagccctgaagttgtctgctgaacgggcgagccacaagcatatcattcttttgtttttcccattacacaacactataccactatacctcctccgtccacaaacatgttttttgaactgtaactatatgaatatgaagaacgtagattaatcctatatatccttcacccatatcccggtggaagctgaagaagattcgcctgaaggtgaagtggttcgagactatggttaagtgtgttaacaatatcttctagtttagctggtagtaagatttttgttctgccaatctcctaaatgattcttatctttctcccattttattaggatgagatgtaattatctacttagataatagatgtacaccttttttttttttttgttctttcttattatctctggtaagatgtattacatcgacatttataatcagtgtaacacgttccaaacattttactatattttgtatt

SEQ ID NO: 43692 - protein, 211 aa, Arabidopsis thaliana
  peptide (1)..(211): Ceres Seq. ID no. 12336311
MSGENWIRVAMSDDSMVAEALLRLRHSEPKNRVDASPLKLKWSVRQRRSKKGDQTRASPTTPLSWSGATSLSGGGGSGGSGAGATTMEGLEESSAAVKPSEPFRSKISQTSAITTTTTTTLFKRSRKKKTLAELKEEEIMLLKESNGLKNELANMRDLLEQQRARNTALKKMKAESQSALSCKLTFEQGSSFLLPDLNMPLDNDPSPEVVC

SEQ ID NO: 43693 - protein, 201 aa, Arabidopsis thaliana
  peptide (1)..(201): Ceres Seq. ID no. 12336312
MSDDSMVAEALLRLRHSEPKNRVDASPLKLKWSVRQRRSKKGDQTRASPTTPLSWSGATSLSGGGGSGGSGAGATTMEGLEESSAAVKPSEPFRSKISQTSAITTTTTTTLFKRSRKKKTLAELKEEEIMLLKESNGLKNELANMRDLLEQQRARNTALKKMKAESQSALSCKLTFEQGSSFLLPDLNMPLDNDPSPEVVC

SEQ ID NO: 43694 - protein, 196 aa, Arabidopsis thaliana
  peptide (1)..(196): Ceres Seq. ID no. 12336313
MVAEALLRLRHSEPKNRVDASPLKLKWSVRQRRSKKGDQTRASPTTPLSWSGATSLSGGGGSGGSGAGATTMEGLEESSAAVKPSEPFRSKISQTSAITTTTTTTLFKRSRKKKTLAELKEEEIMLLKESNGLKNELANMRDLLEQQRARNTALKKMKAESQSALSCKLTFEQGSSFLLPDLNMPLDNDPSPEVVC

SEQ ID NO: 43695 - DNA, 1954 bp, Arabidopsis thaliana
  misc_feature (1)..(1954): Ceres Seq. ID no. 13575154
  misc_feature (1)..(1954): Ortholog of  Ceres SEQ ID NO 14315346 as cited in SEQ ID NO 53970
cttcttcttctctactcttctccattttcttctcttcttctcttctttgtccattttttgacagatatggcgatctggtttgctagatccaaaacccttgtttctagcttgagacataatctaaatttgtcgacaattctcataaaacgtgattactctcatcgtcccatcttctatacaacttctcagttatcttcaacggcgtatttgagtcccttcggtagcctccgtcatgagtctacggccgtggagacacaggctgatcatttggttcagcagattgatgaagtcgatgcccaggaactggatttcccaggaggcaaagtcggttacacatcggagatgaaattcataccggaatcatcttcaaggaggattccatgttaccgggttcttgacgaagacggacgaatcatccccgatagcgattttattccggtgagtgagaaactcgctgttagaatgtacgaacaaatggcgacgctacaagtaatggatcacatcttctacgaagctcaacgtcaaggaagaatatctttttatcttacttccgtcggagaagaagccattaacatcgcttcagcagctgctctcagtcctgacgacgtcgttttacctcagtaccgagaacctggagttcttttgtggcgtggcttcacgttggaggagtttgctaatcagtgttttgggaacaaagctgattatggcaaaggcagacaaatgccaattcattacggttccaatcgtcttaattacttcactatctcctctccaattgccacgcaacttcctcaagctgctggagttggttattctttgaaaatggacaagaagaatgcttgtactgttacattcatcggagatggtggcacaagcgagggagattttcacgccggattgaattttgcggccgtaatggaagctccggttgtgtttatatgtcggaacaacggttgggcgattagtactcatatctcagaacagtttagaagtgatggaatagttgtgaaaggtcaagcttacggtatccgaagcatccgtgtggacggtaacgatgcacttgcggtttatagtgctgtacgctcagctcgagaaatggctgtaacagaacaaagacctgttctcattgagatgatgacatatagagtaggacatcattctacatcagatgattcaactaagtacagggcggcggatgaaatccagtactggaaaatgtcgagaaaccctgtgaatagatttcggaaatgggtcgaagataacggatggtggagtgaggaagatgaatccaagctaagatctaacgcaagaaaacagcttctgcaagcgattcaggctgcggagaagtgggagaaacaaccattgacagagttgtttaacgatgtatatgatgttaaaccgaagaacctagaagagcaagaacttggtttgaaggaattagtaaagaaacaacctcaagattatcctcctggctttcatgtttgaatctagaggaactgtgtggttaaaatacctcatatagtatcatgtccatatcgacttctcattgcagactatttatattgtccacgtatcgaatagtaatcaagtatcaatgtagagaccagcatttggagcatcatgaaatggccttgagaatgttattttcatggtccggctgacccttaaccggttcaaactggagtaaatgagtgaatgttaatgctcgagaatgggtgaggctccgttaatcgttaagaaaaaaacgtgcctacctagccaaatgacatcttcctcttttgtgtttagcacaagtgaatgatccaaatatcatctacctaatatgacccataaaatagtatgtgattgtctttggatgttatcccataacataacttaaatttgggatgcatgcatatattatatacttcatataaaatgagtggacctcataagttgcggtttcgatttttat

SEQ ID NO: 43696 - protein, 494 aa, Arabidopsis thaliana
  peptide (1)..(494): Ceres Seq. ID no. 13575155
LLLLYSSPFSSLLLFFVHFLTDMAIWFARSKTLVSSLRHNLNLSTILIKRDYSHRPIFYTTSQLSSTAYLSPFGSLRHESTAVETQADHLVQQIDEVDAQELDFPGGKVGYTSEMKFIPESSSRRIPCYRVLDEDGRIIPDSDFIPVSEKLAVRMYEQMATLQVMDHIFYEAQRQGRISFYLTSVGEEAINIASAAALSPDDVVLPQYREPGVLLWRGFTLEEFANQCFGNKADYGKGRQMPIHYGSNRLNYFTISSPIATQLPQAAGVGYSLKMDKKNACTVTFIGDGGTSEGDFHAGLNFAAVMEAPVVFICRNNGWAISTHISEQFRSDGIVVKGQAYGIRSIRVDGNDALAVYSAVRSAREMAVTEQRPVLIEMMTYRVGHHSTSDDSTKYRAADEIQYWKMSRNPVNRFRKWVEDNGWWSEEDESKLRSNARKQLLQAIQAAEKWEKQPLTELFNDVYDVKPKNLEEQELGLKELVKKQPQDYPPGFHV

SEQ ID NO: 43697 - protein, 472 aa, Arabidopsis thaliana
  peptide (1)..(472): Ceres Seq. ID no. 13575156
MAIWFARSKTLVSSLRHNLNLSTILIKRDYSHRPIFYTTSQLSSTAYLSPFGSLRHESTAVETQADHLVQQIDEVDAQELDFPGGKVGYTSEMKFIPESSSRRIPCYRVLDEDGRIIPDSDFIPVSEKLAVRMYEQMATLQVMDHIFYEAQRQGRISFYLTSVGEEAINIASAAALSPDDVVLPQYREPGVLLWRGFTLEEFANQCFGNKADYGKGRQMPIHYGSNRLNYFTISSPIATQLPQAAGVGYSLKMDKKNACTVTFIGDGGTSEGDFHAGLNFAAVMEAPVVFICRNNGWAISTHISEQFRSDGIVVKGQAYGIRSIRVDGNDALAVYSAVRSAREMAVTEQRPVLIEMMTYRVGHHSTSDDSTKYRAADEIQYWKMSRNPVNRFRKWVEDNGWWSEEDESKLRSNARKQLLQAIQAAEKWEKQPLTELFNDVYDVKPKNLEEQELGLKELVKKQPQDYPPGFHV

SEQ ID NO: 43698 - protein, 380 aa, Arabidopsis thaliana
  peptide (1)..(380): Ceres Seq. ID no. 13575157
MKFIPESSSRRIPCYRVLDEDGRIIPDSDFIPVSEKLAVRMYEQMATLQVMDHIFYEAQRQGRISFYLTSVGEEAINIASAAALSPDDVVLPQYREPGVLLWRGFTLEEFANQCFGNKADYGKGRQMPIHYGSNRLNYFTISSPIATQLPQAAGVGYSLKMDKKNACTVTFIGDGGTSEGDFHAGLNFAAVMEAPVVFICRNNGWAISTHISEQFRSDGIVVKGQAYGIRSIRVDGNDALAVYSAVRSAREMAVTEQRPVLIEMMTYRVGHHSTSDDSTKYRAADEIQYWKMSRNPVNRFRKWVEDNGWWSEEDESKLRSNARKQLLQAIQAAEKWEKQPLTELFNDVYDVKPKNLEEQELGLKELVKKQPQDYPPGFHV

SEQ ID NO: 43699 - DNA, 1655 bp, Arabidopsis thaliana
  misc_feature (1)..(1655): Ceres Seq. ID no. 12558738
  misc_feature (1)..(1655): Ortholog of  Ceres SEQ ID NO 13584805 as cited in SEQ ID NO 65488
cattcacgagatacgttgacctaaagggtaaattttcccgccattgttagtaccagaactctctgggccgccgcgtctccgtcgtcgtggctatctacagatggcggataagaagaagcgaaagcgatcaaaagatgacgaggcggaggaacttcctttcaaaagcattctggaatcagacgacgttatcacggagcttctcaaatcgtatatttcctcttctatcaaagccgccgccggagccggcggtgcctcctcctcttcatcgaaacctctaaccctagctgacctctctctatcatcttcctgtcgtgaagtcgcagatctctcactctcctccgtgcagacagagatagagacagtcatcgtccagatcgcccgttctattctcgccggtgatggcttctccttcagtgttccttcacgcgccgcctcgaatcagctgtatgttcctgagctcgaccgtatagtgctaaaagacaaatctaccctccgtccatttgcctccgtttcttctgtcaggaaaaccaccatcaccactcgtatcctcgcccttatccaccaactctgcctcaggaacattcacgttactaagcgtgatctcttctacaccgacgttaagcttttccaggaccagacacagagtgatgctgtgttggatgatgtctcatgtatgctcggttgcacaaggtcaagtctcaatgtcattgcagcagagaaaggtgtggtggtgggaaggcttatattcagtgacaatggagacatgatagattgcacaaagatgggaatgggtgggaaagccattccaccaaacattgaccgggttggagatatgcagagtgatgctatgttcatactcttagttgaaaaagatgcagcttatatgaggttagctgaagacagattctataaccggttcccttgtatcatcgtgactgcaaaaggccagcctgatgtagctacaaggctcttcttgaggaaaatgaaaatggagcttaagcttccggtacttgccttggtggatagtgatccttacggattgaagatcttgtcggtgtatggatgtgggtcgaagaacatgtcatatgatagtgcaaacttgactacgcctgatattaagtggcttggaattaggccgagtgatttggacaagtataagatacctgaacagtgtaggttgccgatgactgagcaggatattaagaccgggaaggatatgctagaggaggatttcgtgaagaaaaatcccgggtgggtcgaggaacttaacctgatggtgaaaacgaagcaaaaggctgagattcaggcgttgagctcttttggtttccagtatttatcggaagtttacttgcccctgaaactgcagcagcaggattggctctgataatcaggtttcttcctgatcaattagatagaccaacaagtgtactctacaaatttcgaatttttgataatgcaattgcctgtttcttagcatgtgaattattattgcaaagatcgaaatttggttttaaatttatggttgaatctacacagaactggaaagatagctgtcagatgattatttagaagacaactcttttgtttatttagaagattgtatacaatatgatgggcattgagatgatatgcaatctttccccattcttttctgc

SEQ ID NO: 43700 - protein, 427 aa, Arabidopsis thaliana
  peptide (1)..(427): Ceres Seq. ID no. 12558739
MADKKKRKRSKDDEAEELPFKSILESDDVITELLKSYISSSIKAAAGAGGASSSSSKPLTLADLSLSSSCREVADLSLSSVQTEIETVIVQIARSILAGDGFSFSVPSRAASNQLYVPELDRIVLKDKSTLRPFASVSSVRKTTITTRILALIHQLCLRNIHVTKRDLFYTDVKLFQDQTQSDAVLDDVSCMLGCTRSSLNVIAAEKGVVVGRLIFSDNGDMIDCTKMGMGGKAIPPNIDRVGDMQSDAMFILLVEKDAAYMRLAEDRFYNRFPCIIVTAKGQPDVATRLFLRKMKMELKLPVLALVDSDPYGLKILSVYGCGSKNMSYDSANLTTPDIKWLGIRPSDLDKYKIPEQCRLPMTEQDIKTGKDMLEEDFVKKNPGWVEELNLMVKTKQKAEIQALSSFGFQYLSEVYLPLKLQQQDWL

SEQ ID NO: 43701 - protein, 236 aa, Arabidopsis thaliana
  peptide (1)..(236): Ceres Seq. ID no. 12558740
MLGCTRSSLNVIAAEKGVVVGRLIFSDNGDMIDCTKMGMGGKAIPPNIDRVGDMQSDAMFILLVEKDAAYMRLAEDRFYNRFPCIIVTAKGQPDVATRLFLRKMKMELKLPVLALVDSDPYGLKILSVYGCGSKNMSYDSANLTTPDIKWLGIRPSDLDKYKIPEQCRLPMTEQDIKTGKDMLEEDFVKKNPGWVEELNLMVKTKQKAEIQALSSFGFQYLSEVYLPLKLQQQDWL

SEQ ID NO: 43702 - DNA, 1762 bp, Arabidopsis thaliana
  misc_feature (1)..(1762): Ceres Seq. ID no. 12337098
  misc_feature (1)..(1762): Ortholog of  Ceres SEQ ID NO 14307571 as cited in SEQ ID NO 58392
agaccgctagtttttttttgccactctcttcgtctctctcttgtagcaatgccgcttcttcatccacagtcgttgcggcatccttctttcgagattcagacccaaagaagaagcaattccacaacaagattgcttctttctcacaagtttctccattctcaagcttccattatctcaatctccaggacaagaatcctcaaacgggtctctcagaatctctctgtagctaaagctgcttcagctcaagctagtagtagtgttggtgagagtgttgctcaaacatcagaaaaagatgtgttgaaggctctgtctcagattattgatcctgattttgggacagatattgtttcttgtggttttgtgaaagatttggggattaatgaagctttgggtgaggtttcgttccgtttggagctgacaacacccgcatgtccagtcaaagacatgtttgagaacaaggcaaatgaggtagttgcagcccttccatgggtgaagaaggtaaatctgacaatgtcagcacaaccagccaagcccatttttgcagggcagcttccctttggattatcaagaatttcgaacatcatcgctgtttctagttgcaagggtggtgttgggaaatcaacagtagctgtaaatcttgcttatacattagctggtatgggtgctagagttggtatctttgatgctgatgtctatggtccaagtctaccaaccatggtcaatcctgagagccgtatattggaaatgaacccggagaagaagaccatcattccaacagaatacatgggcgtcaagctagtctcatttggatttgcaggacaagggcgtgccattatgagaggtcctatggtgtctggtgttataaaccaactccttacaacaactgaatggggagagctggactatcttgttatcgacatgcctcctggaactggtgatatacaactgaccttatgccaggttgcgccattgacagcagcggtaattgtcaccacccctcaaaagttggcgtttattgatgttgcaaaaggtgtaaggatgttctcaaaacttaaggtgccttgcgttgctgttgtggagaatatgtgccactttgacgctgatgggaaacgttattacccttttgggaaaggttcaggttctgaggtggtcaagcaattcggcatacctcacctctttgacctccccattagaccaacgttatctgcttcgggggatagcggaactcctgaagtagtgtcggatcctctaagtgacgttgccagaacgttccaggatcttggtgtatgtgtagtgcaacaatgcgccaagatacgccagcaagtatcaacggccgtgacatacgacaagtatctcaaggcaattagagtgaaggtaccaaactcagacgaagagttcttactgcaccctgcaaccgtcagaagaaatgatagatctgcacaaagtgtggatgaatggactggagagcaaaaagttctatatggcgatgtagcggaagatatcgaacctgaggacatacgaccaatgggaaactacgctgtctcgataacctggcccgacgggtttagccagattgctccatatgaccagttggaagaaattgaaaggctagtagatgttcctccattgtctccagtcgaagtctagttcttgaacaatatgttttcgctttacgatatctcttgaaaatgaaatttgtatattcatattaagagcattgttatgaatcttacaatgatgaaaagagggttactgtaagctg

SEQ ID NO: 43703 - protein, 548 aa, Arabidopsis thaliana
  peptide (1)..(548): Ceres Seq. ID no. 12337099
RPLVFFCHSLRLSLVAMPLLHPQSLRHPSFEIQTQRRSNSTTRLLLSHKFLHSQASIISISRTRILKRVSQNLSVAKAASAQASSSVGESVAQTSEKDVLKALSQIIDPDFGTDIVSCGFVKDLGINEALGEVSFRLELTTPACPVKDMFENKANEVVAALPWVKKVNLTMSAQPAKPIFAGQLPFGLSRISNIIAVSSCKGGVGKSTVAVNLAYTLAGMGARVGIFDADVYGPSLPTMVNPESRILEMNPEKKTIIPTEYMGVKLVSFGFAGQGRAIMRGPMVSGVINQLLTTTEWGELDYLVIDMPPGTGDIQLTLCQVAPLTAAVIVTTPQKLAFIDVAKGVRMFSKLKVPCVAVVENMCHFDADGKRYYPFGKGSGSEVVKQFGIPHLFDLPIRPTLSASGDSGTPEVVSDPLSDVARTFQDLGVCVVQQCAKIRQQVSTAVTYDKYLKAIRVKVPNSDEEFLLHPATVRRNDRSAQSVDEWTGEQKVLYGDVAEDIEPEDIRPMGNYAVSITWPDGFSQIAPYDQLEEIERLVDVPPLSPVEV

SEQ ID NO: 43704 - protein, 532 aa, Arabidopsis thaliana
  peptide (1)..(532): Ceres Seq. ID no. 12337100
MPLLHPQSLRHPSFEIQTQRRSNSTTRLLLSHKFLHSQASIISISRTRILKRVSQNLSVAKAASAQASSSVGESVAQTSEKDVLKALSQIIDPDFGTDIVSCGFVKDLGINEALGEVSFRLELTTPACPVKDMFENKANEVVAALPWVKKVNLTMSAQPAKPIFAGQLPFGLSRISNIIAVSSCKGGVGKSTVAVNLAYTLAGMGARVGIFDADVYGPSLPTMVNPESRILEMNPEKKTIIPTEYMGVKLVSFGFAGQGRAIMRGPMVSGVINQLLTTTEWGELDYLVIDMPPGTGDIQLTLCQVAPLTAAVIVTTPQKLAFIDVAKGVRMFSKLKVPCVAVVENMCHFDADGKRYYPFGKGSGSEVVKQFGIPHLFDLPIRPTLSASGDSGTPEVVSDPLSDVARTFQDLGVCVVQQCAKIRQQVSTAVTYDKYLKAIRVKVPNSDEEFLLHPATVRRNDRSAQSVDEWTGEQKVLYGDVAEDIEPEDIRPMGNYAVSITWPDGFSQIAPYDQLEEIERLVDVPPLSPVEV

SEQ ID NO: 43705 - protein, 400 aa, Arabidopsis thaliana
  peptide (1)..(400): Ceres Seq. ID no. 12337101
MFENKANEVVAALPWVKKVNLTMSAQPAKPIFAGQLPFGLSRISNIIAVSSCKGGVGKSTVAVNLAYTLAGMGARVGIFDADVYGPSLPTMVNPESRILEMNPEKKTIIPTEYMGVKLVSFGFAGQGRAIMRGPMVSGVINQLLTTTEWGELDYLVIDMPPGTGDIQLTLCQVAPLTAAVIVTTPQKLAFIDVAKGVRMFSKLKVPCVAVVENMCHFDADGKRYYPFGKGSGSEVVKQFGIPHLFDLPIRPTLSASGDSGTPEVVSDPLSDVARTFQDLGVCVVQQCAKIRQQVSTAVTYDKYLKAIRVKVPNSDEEFLLHPATVRRNDRSAQSVDEWTGEQKVLYGDVAEDIEPEDIRPMGNYAVSITWPDGFSQIAPYDQLEEIERLVDVPPLSPVEV

SEQ ID NO: 43706 - DNA, 1475 bp, Arabidopsis thaliana
  misc_feature (1)..(1475): Ceres Seq. ID no. 13575158
  misc_feature (1)..(1475): Ortholog of  Ceres SEQ ID NO 13599859 as cited in SEQ ID NO 1323
  misc_feature (1)..(1475): Ortholog of  Ceres SEQ ID NO 13596244 as cited in SEQ ID NO 69307
aagtgacaaagattcaagctttaatgttctttgattggaattttttcaggttttgctcaatgtaaagaagttaaagattcaaactnttttttcacaatgggagagaatctgcatttgtctccacgacaccgatcttctctaaagaagccattgttgattgttttgttagtctgtatcacaagtgtgcttttggtgatcacttacatgtatccacaacacaacaacagtaagagctctgcttgtgcgggtttgtctagtagaggctgtcaagctgcgctctctggatggcttcctgttcatgtcaggaaattcactgatgaagaagtagcagctcgagttgtgatcaaagatatactgagactacctcctgctctaaccgctaaatcgaaaatcgcttttatgtttttgactcctggtactttgccatttgagaagctttgggataagtttttccagggtcaagaaggaagattctctatttacatccacccttccaggttacgaccagttcacattagccgtcacttttcagaccgtgaaattcatagtgatcatgtcacttggggaaggatttctatggttgatgctgagagacggcttctagcaaatgctcttgaagatcctgataaccagcactttgttcttctttcagaaagttgtataccgttgcatacatttgactacacctatcgatatttgatgcacgcaaatgtcagcttcattgatagttttgaggatcttggtcctcatgggactggcagacacatggatcacatgttacctgagatcccaaggcaagatttcagaaagggtgcacagtggttcacaatgaagcgtcaacacgctgtaatagtgatggctgatggtctctactactcgaaattccgggagtattgcagacctggagtagaagcaaacaagaactgcatcgcggatgaacattacctgccaacattctttcatatgcttgatcctggaggaatctcgaactggtcagtcacatatgttgattggtctgagcgtagatggcatccaaagacatatagagcacgcgatgtctcactcaagctcttgaaaaatatcacgtctgacgacatgagtgtacatgtaacaagcgttggcaagcgcggagaagagctgcgttggccttgtacatggaagggaattagacgaccatgttatctatttgcaaggaagcttcactcagatgctctttacaaactggtcagactctttccaaattacacaagcacagtggtctaagccagagacaaattcttgaaactaaaccatacgattcttgaaaccggaactaaacacttccagatatgccgagattggatcgcaatttactgtaaatttttgctttctcttgctgagatttagtgtctctttacatggtactctacttttattaaggtttagtataagaagaaagttagaagcagaaattttttggtcaaggagagatttgg

SEQ ID NO: 43707 - protein, 388 aa, Arabidopsis thaliana
  peptide (1)..(388): Ceres Seq. ID no. 13575159
MGENLHLSPRHRSSLKKPLLIVLLVCITSVLLVITYMYPQHNNSKSSACAGLSSRGCQAALSGWLPVHVRKFTDEEVAARVVIKDILRLPPALTAKSKIAFMFLTPGTLPFEKLWDKFFQGQEGRFSIYIHPSRLRPVHISRHFSDREIHSDHVTWGRISMVDAERRLLANALEDPDNQHFVLLSESCIPLHTFDYTYRYLMHANVSFIDSFEDLGPHGTGRHMDHMLPEIPRQDFRKGAQWFTMKRQHAVIVMADGLYYSKFREYCRPGVEANKNCIADEHYLPTFFHMLDPGGISNWSVTYVDWSERRWHPKTYRARDVSLKLLKNITSDDMSVHVTSVGKRGEELRWPCTWKGIRRPCYLFARKLHSDALYKLVRLFPNYTSTVV

SEQ ID NO: 43708 - protein, 352 aa, Arabidopsis thaliana
  peptide (1)..(352): Ceres Seq. ID no. 13575160
MYPQHNNSKSSACAGLSSRGCQAALSGWLPVHVRKFTDEEVAARVVIKDILRLPPALTAKSKIAFMFLTPGTLPFEKLWDKFFQGQEGRFSIYIHPSRLRPVHISRHFSDREIHSDHVTWGRISMVDAERRLLANALEDPDNQHFVLLSESCIPLHTFDYTYRYLMHANVSFIDSFEDLGPHGTGRHMDHMLPEIPRQDFRKGAQWFTMKRQHAVIVMADGLYYSKFREYCRPGVEANKNCIADEHYLPTFFHMLDPGGISNWSVTYVDWSERRWHPKTYRARDVSLKLLKNITSDDMSVHVTSVGKRGEELRWPCTWKGIRRPCYLFARKLHSDALYKLVRLFPNYTSTVV

SEQ ID NO: 43709 - protein, 287 aa, Arabidopsis thaliana
  peptide (1)..(287): Ceres Seq. ID no. 13575161
MFLTPGTLPFEKLWDKFFQGQEGRFSIYIHPSRLRPVHISRHFSDREIHSDHVTWGRISMVDAERRLLANALEDPDNQHFVLLSESCIPLHTFDYTYRYLMHANVSFIDSFEDLGPHGTGRHMDHMLPEIPRQDFRKGAQWFTMKRQHAVIVMADGLYYSKFREYCRPGVEANKNCIADEHYLPTFFHMLDPGGISNWSVTYVDWSERRWHPKTYRARDVSLKLLKNITSDDMSVHVTSVGKRGEELRWPCTWKGIRRPCYLFARKLHSDALYKLVRLFPNYTSTVV

SEQ ID NO: 43710 - DNA, 866 bp, Arabidopsis thaliana; identical to SEQ ID NO: 26734
  misc_feature (1)..(866): Ceres Seq. ID no. 12559528
  misc_feature (1)..(866): Ortholog of  Ceres SEQ ID NO 13595667 as cited in SEQ ID NO 56786

SEQ ID NO: 43711 - protein, 245 aa, Arabidopsis thaliana; identical to SEQ ID NO: 26735
  peptide (1)..(245): Ceres Seq. ID no. 12559529

SEQ ID NO: 43712 - protein, 222 aa, Arabidopsis thaliana; identical to SEQ ID NO: 26736
  peptide (1)..(222): Ceres Seq. ID no. 12559530

SEQ ID NO: 43713 - protein, 210 aa, Arabidopsis thaliana; identical to SEQ ID NO: 26737
  peptide (1)..(210): Ceres Seq. ID no. 12559531

SEQ ID NO: 43714 - DNA, 1211 bp, Arabidopsis thaliana
  misc_feature (1)..(1211): Ceres Seq. ID no. 12336314
  misc_feature (1)..(1211): Ortholog of  Ceres SEQ ID NO 13585342 as cited in SEQ ID NO 63601
  misc_feature (1)..(1211): Ortholog of  Ceres SEQ ID NO 15177459 as cited in SEQ ID NO 0
aagcatctctccctcatattcacctaaaaatcaggttaataaaaaagaataatgatgttttcggtgacggttgcgatccttgtttgtcttattggctacatttaccgatcatttaagcctccaccaccgcgaatctgcggccatcctaacggtcctccggttacttctccgagaatcaagctcagtgatggaagatatcttgcttatagagaatctggggttgatagagacaatgctaactacaagatcattgtcgttcatggcttcaacagctccaaagacactgaattttccatccctaaggatgtaattgaggagcttgggatatactttgtgttctacgatagagcaggatatggagaaagtgatccacacccatcacgcactgttaagagtgaagcacacgacattcaagaactcgccgataaactcaagatcggaccaaagttctacgttcttggtatatcactcggtgcttactcggtttatagttgcctcaaatacattccccacagactagctggagcagtcttaatggttccatttgtgaactattggtggactaaagtgcctcaagaaaaattgagtaaagcgttggagctaatgccaaagaaagaccaatggacgtttaaagtggctcattatgttccgtggttgttatattggtggttgacccaaaaactatttccgtcttcgagtatgatcacggggaacaatgcgttatgcagcgacaaagatttggtcgtcataaagaagaaaatggagaatccacgccctggcttggaaaaagttagacaacaaggtgaccatgaatgtcttcaccgggacatgatagccggattcgcgacatgggaattcgacccgactgaattagaaaatccgtttgcggaaggcgaaggatcggtccacgtttggcaagggatggaagacagaatcattccatacgaaattaatcgatatatatcagagaagcttccatggattaagtaccatgaggtcttaggttatggacatcttctaaacgccgaggaggagaaatgcaaagacattatcaaggcacttcttgtcaactgatgatcatctctacacaagatgccacaaaaaatatagcatatttaatagattttattttttatttatggattataatattatagcatattataagtttgtaagtaagatgaaaaccacttgaaagtcattaatttact

SEQ ID NO: 43715 - protein, 340 aa, Arabidopsis thaliana
  peptide (1)..(340): Ceres Seq. ID no. 12336315
MMFSVTVAILVCLIGYIYRSFKPPPPRICGHPNGPPVTSPRIKLSDGRYLAYRESGVDRDNANYKIIVVHGFNSSKDTEFSIPKDVIEELGIYFVFYDRAGYGESDPHPSRTVKSEAHDIQELADKLKIGPKFYVLGISLGAYSVYSCLKYIPHRLAGAVLMVPFVNYWWTKVPQEKLSKALELMPKKDQWTFKVAHYVPWLLYWWLTQKLFPSSSMITGNNALCSDKDLVVIKKKMENPRPGLEKVRQQGDHECLHRDMIAGFATWEFDPTELENPFAEGEGSVHVWQGMEDRIIPYEINRYISEKLPWIKYHEVLGYGHLLNAEEEKCKDIIKALLVN

SEQ ID NO: 43716 - protein, 339 aa, Arabidopsis thaliana
  peptide (1)..(339): Ceres Seq. ID no. 12336316
MFSVTVAILVCLIGYIYRSFKPPPPRICGHPNGPPVTSPRIKLSDGRYLAYRESGVDRDNANYKIIVVHGFNSSKDTEFSIPKDVIEELGIYFVFYDRAGYGESDPHPSRTVKSEAHDIQELADKLKIGPKFYVLGISLGAYSVYSCLKYIPHRLAGAVLMVPFVNYWWTKVPQEKLSKALELMPKKDQWTFKVAHYVPWLLYWWLTQKLFPSSSMITGNNALCSDKDLVVIKKKMENPRPGLEKVRQQGDHECLHRDMIAGFATWEFDPTELENPFAEGEGSVHVWQGMEDRIIPYEINRYISEKLPWIKYHEVLGYGHLLNAEEEKCKDIIKALLVN

SEQ ID NO: 43717 - protein, 179 aa, Arabidopsis thaliana
  peptide (1)..(179): Ceres Seq. ID no. 12336317
MVPFVNYWWTKVPQEKLSKALELMPKKDQWTFKVAHYVPWLLYWWLTQKLFPSSSMITGNNALCSDKDLVVIKKKMENPRPGLEKVRQQGDHECLHRDMIAGFATWEFDPTELENPFAEGEGSVHVWQGMEDRIIPYEINRYISEKLPWIKYHEVLGYGHLLNAEEEKCKDIIKALLVN

SEQ ID NO: 43718 - DNA, 1333 bp, Arabidopsis thaliana
  misc_feature (1)..(1333): Ceres Seq. ID no. 12336318
  misc_feature (1)..(1333): Ortholog of  Ceres SEQ ID NO 14311568 as cited in SEQ ID NO 51732
  misc_feature (1)..(1333): Ortholog of  Ceres SEQ ID NO 14303877 as cited in SEQ ID NO 53500
  misc_feature (1)..(1333): Ortholog of  Ceres SEQ ID NO 15169781 as cited in SEQ ID NO 54829
  misc_feature (1)..(1333): Ortholog of  Ceres SEQ ID NO 15173757 as cited in SEQ ID NO 57537
  misc_feature (1)..(1333): Ortholog of  Ceres SEQ ID NO 13654231 as cited in SEQ ID NO 68285
atctacgcatgaaaatatgattctgtcttttttttgtttgtctatctttcaatactttaaaaagtgtatttctagaggcgatttgtcatttcccgaataggaatttgagtaaaaaaaacactctgttttttatttccactaatatcaaatcggcgaatatagttcccaccattcttatctccttgtcgtcactcggaattttttaaataataggatcgctttaataatataatctctataatttatagttccttttccaatattggcgtctccgttgaagctttccacaaatctcaaatttgtttggagactctcaaatgtatccttctctcgacgatgatttcgtctctgatttgttttgcttcgatcaaagcaatggagcagaacttgatgattacacacagtttggtgtaaatttgcagactgatcaagaggatacctttccagattttgtgtcatatggtgtgaatttgcagcaggagccagatgaagtctttagtattggagcttctcaattggatttgtcctcgtataatggagttttgtcgctagagccagaacaggtggggcaacaagattgtgaagttgtgcaggaagaagaagtagagatcaattctggttcatctggtggagctgttaaggaagaacaggaacatttagatgacgattgctccagaaagcgggcaaggactggatcgtgtagcagaggaggaggaactaaagcgtgtcgtgaaaggttgaggagggagaagctaaatgagaggtttatggatttgagctcggttttggagcctgggaggactcctaagactgataaaccggctatactcgatgatgcaatccgtatattgaatcaacttagagatgaagctcttaagcttgaagaaactaaccagaagcttttagaggagatcaagagtctcaaggcggagaagaacgagctgagggaggaaaagctggtgttgaaggcggataaagagaagacagaacaacagttaaagtctatgacggctccatcttcagggttcatacctcatattccagctgcatttaaccacaacaaaatggctgtttatccaagttacggttacatgccaatgtggcattatatgcctcaatccgttcgtgacacatctcgtgatcaagaactcaggcctcctgctgcttaaactctcaattgtttttttttggtacccatagggaactcatagagatttctgaatcacttggtttaggattcttccgtttggcaagtgtaaaagctttactcttgatcttgggttgtatttttcttataaaataaatataactccagaaacttgtgattcttctc

SEQ ID NO: 43719 - protein, 283 aa, Arabidopsis thaliana; identical to SEQ ID NO: 25496
  peptide (1)..(283): Ceres Seq. ID no. 12336319

SEQ ID NO: 43720 - DNA, 973 bp, Arabidopsis thaliana
  misc_feature (1)..(973): Ceres Seq. ID no. 12560047
  misc_feature (1)..(973): Ortholog of  Ceres SEQ ID NO 13594435 as cited in SEQ ID NO 57977
agaatacttttatctcatattcccaacacttgttcaagcatatctaagtcaataacaacattacaacataacatggtgaaacaagaactcaagatccaagttactacttcctcatcatcactctctcattcttcatcttcttcttcttcttcaacgtcggcactacgtcatcaatcttgtaagaacaagataaagaagtataaaggtgtgaggatgcgaagttggggatcatgggttactgaaattagggcaccaaatcaaaagacaagaatctggttaggttcttactccaccgcagaagcagctgctagggcttacgacgctgctctcttgtgtcttaagggacctaaagctaatctcaacttccctaacatcaccactacttctccttttcttatgaacatcgacgaaaagacccttttgtccccaaaatcaatccaaaaggtcgccgctcaagccgctaactcctcttctgaccattttacccctccgtccgatgaaaatgatcatgatcatgaagacggactcgatcaccatccatctgcttcttcttcagctgcatcttcaccaccagatgatgatcatcataatggatgacgatgggtgatttggtatcgttgatggaatctttcgggggataccaacgaacaccgtggctttggatgggatccatcgctgtatgaatttggacataatgagatcttcttcaccaacggagatccgtttgattattctccacagttacatagctcaaaggcaacgatggatgacttctacgacgatgttgatattccgctgtggagtttcagttaatccaacggtccatattattatactacgaaacacttttaattcacattatttcatttaatttattctttcaattcatattattcgtccttgttgtttcgttatgtattaaatatacacacactaatttaagaagatcacatggactagaggtttttttgtc

SEQ ID NO: 43721 - protein, 198 aa, Arabidopsis thaliana
  peptide (1)..(198): Ceres Seq. ID no. 12560048
RILLSHIPNTCSSISKSITTLQHNMVKQELKIQVTTSSSSLSHSSSSSSSSTSALRHQSCKNKIKKYKGVRMRSWGSWVTEIRAPNQKTRIWLGSYSTAEAAARAYDAALLCLKGPKANLNFPNITTTSPFLMNIDEKTLLSPKSIQKVAAQAANSSSDHFTPPSDENDHDHEDGLDHHPSASSSAASSPPDDDHHNG

SEQ ID NO: 43722 - protein, 174 aa, Arabidopsis thaliana
  peptide (1)..(174): Ceres Seq. ID no. 12560049
MVKQELKIQVTTSSSSLSHSSSSSSSSTSALRHQSCKNKIKKYKGVRMRSWGSWVTEIRAPNQKTRIWLGSYSTAEAAARAYDAALLCLKGPKANLNFPNITTTSPFLMNIDEKTLLSPKSIQKVAAQAANSSSDHFTPPSDENDHDHEDGLDHHPSASSSAASSPPDDDHHNG

SEQ ID NO: 43723 - protein, 127 aa, Arabidopsis thaliana
  peptide (1)..(127): Ceres Seq. ID no. 12560050
MRSWGSWVTEIRAPNQKTRIWLGSYSTAEAAARAYDAALLCLKGPKANLNFPNITTTSPFLMNIDEKTLLSPKSIQKVAAQAANSSSDHFTPPSDENDHDHEDGLDHHPSASSSAASSPPDDDHHNG

SEQ ID NO: 43724 - DNA, 1043 bp, Arabidopsis thaliana
  misc_feature (1)..(1043): Ceres Seq. ID no. 12330493
  misc_feature (1)..(1043): Ortholog of  Ceres SEQ ID NO 15178596 as cited in SEQ ID NO 53922
  misc_feature (1)..(1043): Ortholog of  Ceres SEQ ID NO 12780542 as cited in SEQ ID NO 65674
gaaatttcctctcttcttcttttgcttgagctttaggttttgagagcaaagaaaaacgaagacgcgtcaaagagcttttgtggagaggttctgcttgcttgctacaatgggttacgcccagctagttattggtccagcaggcagtggaaagtcaacttattgctcgtctttgtatgaacattgtgaaactatcggtcgaacaatgcatgttgttaaccttgatcctgctgcggagatcttcaactatcctgtggctatggatatcagagaacttatttctttggaagatgtgatggaggatctaaagcttggtcctaatggtgcccttatgtattgcatggagtatcttgaggatagcttacatgattgggtggatgaagaattggagaactacagggatgacgattaccttatctttgattgtccaggccagatagagctgtttacacatgttcctgtgctcaagaactttgtggagcatttgaagcagaagaacttcaacgtctgtgttgtttatctgcttgattcacagttcatcacagatgtaaccaagtttatcagtggttgcatgtcatctctcgctgcaatgatccagcttgaattaccacatgtcaacatcctctcaaaaatggacctcttgcaggacaaaagcaacattgatgattacttgaatccggagcctcgcacattgctagcagagttaaacaaaaggatgggtcctcaatatgcaaaactaaacaaagccttgattgagatggtgggagagtatgggatggtgaatttcatacccattaacttgaggaaagaaaagagcattcaatatgttctgtcacaaatcgacgtctgtattcagtttggagaagatgctgatgtgaacatcaaagatgatgacgattttagtgacgatggtcctgacctataattgttatattcggtttctacaacttttgttaaaagtctaaacaagcttggtctcattgttcttgtcagttaccaatggcgtttgtgagaacttttgttgaatatcaaaagccttcaatgtg

SEQ ID NO: 43725 - protein, 271 aa, Arabidopsis thaliana; identical to SEQ ID NO: 28955
  peptide (1)..(271): Ceres Seq. ID no. 12330494

SEQ ID NO: 43726 - protein, 239 aa, Arabidopsis thaliana; identical to SEQ ID NO: 28956
  peptide (1)..(239): Ceres Seq. ID no. 12330495

SEQ ID NO: 43727 - protein, 221 aa, Arabidopsis thaliana; identical to SEQ ID NO: 28957
  peptide (1)..(221): Ceres Seq. ID no. 12330496

SEQ ID NO: 43728 - DNA, 1342 bp, Arabidopsis thaliana
  misc_feature (1)..(1342): Ceres Seq. ID no. 13575162
  misc_feature (1)..(1342): Ortholog of  Ceres SEQ ID NO 13654989 as cited in SEQ ID NO 63117
  misc_feature (1)..(1342): Ortholog of  Ceres SEQ ID NO 13657138 as cited in SEQ ID NO 65923
  misc_feature (1)..(1342): Ortholog of  Ceres SEQ ID NO 13584744 as cited in SEQ ID NO 69137
attgattgtcatttgttcttcttcactctctctaataattctccagaacattttgcacattccgtttcactccgtgttgttggatcccccaaagaaaatgagttgctttgggtgttgtggggaggatgatgatatgcataaaactgctgattatggaggtcgtcataaccaagccaaacactttcctccaggaaatgatgcaaggcaccaccaagcctctgaaactgcacagaagggtcctccagttgtgaagttgcagcctattgaagtacctattatcccttttagtgaactcaaagaagcaactgatgattttggatcgaattctctcatcggtgaaggctcttatggaagagtatactacggggtattaaacaatgatctgccttcagcgattaaaaagttggattctaacaaacagcctgacaatgaattccttgctcaggtttccatggtttctaggcttaaacatgataactttgttcaacttcttggctactgtgttgatgggaattcacggatactttcttatgaatttgccaataatggatctcttcatgatattcttcatgggagaaaaggtgtgaaaggagcacagccaggtcctgtcttgtcgtggtatcaacgagtcaaaattgcagttggagctgcaagaggccttgagtacttgcatgaaaaagctaatcctcacatcattcaccgtgacattaaatccagcaatgtcctcctctttgaagatgatgttgccaaaattgctgactttgatctctctaatcaagctcctgatatggcagctcgccttcattccacccgagttcttgggacttttggttaccatgcccctgaatatgcaatgaccgggcagttaaatgccaagagtgatgtctacagctttggagttgtcttactcgaacttcttacaggtcgaaagcctgttgatcatagactacccagaggccagcaaagtttagtcacatgggctacacctaaactgagtgaagacaaggttaaacaatgcgttgatgcaagactcggtggcgattaccctccaaaagctgttgctaagttagccgcggttgctgcgttgtgtgtgcaatatgaagcagattttaggccgaatatgagtatcgttgtcaaagctcttcaacctttgttgaatgctcgagccgtagctccaggggaaggagtacattagccacctctgtctcggcgtttctcttcttaccagaaaatttgatttttacatatacacgatataccagtcaaaacttaatttatgtgcatagaaatctctgtaatgttttttaaaaaactatatttttacattaaatccgttaccctt

SEQ ID NO: 43729 - protein, 397 aa, Arabidopsis thaliana
  peptide (1)..(397): Ceres Seq. ID no. 13575163
LIVICSSSLSLIILQNILHIPFHSVLLDPPKKMSCFGCCGEDDDMHKTADYGGRHNQAKHFPPGNDARHHQASETAQKGPPVVKLQPIEVPIIPFSELKEATDDFGSNSLIGEGSYGRVYYGVLNNDLPSAIKKLDSNKQPDNEFLAQVSMVSRLKHDNFVQLLGYCVDGNSRILSYEFANNGSLHDILHGRKGVKGAQPGPVLSWYQRVKIAVGAARGLEYLHEKANPHIIHRDIKSSNVLLFEDDVAKIADFDLSNQAPDMAARLHSTRVLGTFGYHAPEYAMTGQLNAKSDVYSFGVVLLELLTGRKPVDHRLPRGQQSLVTWATPKLSEDKVKQCVDARLGGDYPPKAVAKLAAVAALCVQYEADFRPNMSIVVKALQPLLNARAVAPGEGVH

SEQ ID NO: 43730 - protein, 365 aa, Arabidopsis thaliana
  peptide (1)..(365): Ceres Seq. ID no. 13575164
MSCFGCCGEDDDMHKTADYGGRHNQAKHFPPGNDARHHQASETAQKGPPVVKLQPIEVPIIPFSELKEATDDFGSNSLIGEGSYGRVYYGVLNNDLPSAIKKLDSNKQPDNEFLAQVSMVSRLKHDNFVQLLGYCVDGNSRILSYEFANNGSLHDILHGRKGVKGAQPGPVLSWYQRVKIAVGAARGLEYLHEKANPHIIHRDIKSSNVLLFEDDVAKIADFDLSNQAPDMAARLHSTRVLGTFGYHAPEYAMTGQLNAKSDVYSFGVVLLELLTGRKPVDHRLPRGQQSLVTWATPKLSEDKVKQCVDARLGGDYPPKAVAKLAAVAALCVQYEADFRPNMSIVVKALQPLLNARAVAPGEGVH

SEQ ID NO: 43731 - protein, 353 aa, Arabidopsis thaliana
  peptide (1)..(353): Ceres Seq. ID no. 13575165
MHKTADYGGRHNQAKHFPPGNDARHHQASETAQKGPPVVKLQPIEVPIIPFSELKEATDDFGSNSLIGEGSYGRVYYGVLNNDLPSAIKKLDSNKQPDNEFLAQVSMVSRLKHDNFVQLLGYCVDGNSRILSYEFANNGSLHDILHGRKGVKGAQPGPVLSWYQRVKIAVGAARGLEYLHEKANPHIIHRDIKSSNVLLFEDDVAKIADFDLSNQAPDMAARLHSTRVLGTFGYHAPEYAMTGQLNAKSDVYSFGVVLLELLTGRKPVDHRLPRGQQSLVTWATPKLSEDKVKQCVDARLGGDYPPKAVAKLAAVAALCVQYEADFRPNMSIVVKALQPLLNARAVAPGEGVH

SEQ ID NO: 43732 - DNA, 1190 bp, Arabidopsis thaliana
  misc_feature (1)..(1190): Ceres Seq. ID no. 12336324
  misc_feature (1)..(1190): Ortholog of  Ceres SEQ ID NO 15224625 as cited in SEQ ID NO 1390
atcagattctatctctctctctctgtaagattccttgctctcgcgcttttctctctctctctcgcgttcgttcttatccacgagctctgcaccgtcgcaatctccgtcttctccatttagatccaacacagagccttttctacatgaaattcggcaaagagtttcgtactcacctcgaagaaactttaccagagtggagagacaagttcctttgctataaacctttaaaaaagcttctcaaatattatccttattactccgccgattttggacccgccaattccgatcacaacgattcgcgtccagtatttgctgatactactaacatctcttccgccgccgacgacggcggtgtggttcccggcgtcaggccatcggaagatctccagggagctcaaggaaagaatcgagcaagttaaagaaaagaatggggaatttgcatcagaaagtgagttcagcgaagaaatgatggatattcggagagaccttgttaccattcatggcgagatggtgctcctgaaaaactacagctcccttaattttgcaggacttgtcaagattttgaagaagtacgataaaagaacaggtggacttttacgtttgcctttcacacagcttgttctccatcaacccttctttactacagagccacttactaggttagtccgtgaatgtgaggccaatcttgagcttctttttccttcagaagcggaagttgtagagtcttctagcgcagtgcaagcacactcaagctcacatcagcacaactccccaagaatctcagctgagacttcctcaactctcggcaatgaaaatcttgatatatataagagtacactcgctgcaatgagagctataagagggttacaaaaggctagctcgacgtacaaccctttatcattctcatcgcttcttcagaacgaggatgatgagacggtaacagctgaaaactctccaaactctgggaacaaagatgattcagagaaggaagatactggaccttcccactgatcagaagagaatgatgctctttttgatcaagattttgagaatttgcttcttgatttcaccctaacttttcataaaattaacacattttactttacttcttcaccttttgcaggacacaacttctgtatgcatttgaattgtagtacagtcgtttatagattttcaatgaaattttcctc

SEQ ID NO: 43733 - protein, 181 aa, Arabidopsis thaliana; identical to SEQ ID NO: 42980
  peptide (1)..(181): Ceres Seq. ID no. 12336325

SEQ ID NO: 43734 - protein, 180 aa, Arabidopsis thaliana
  peptide (1)..(180): Ceres Seq. ID no. 12336326
MDIRRDLVTIHGEMVLLKNYSSLNFAGLVKILKKYDKRTGGLLRLPFTQLVLHQPFFTTEPLTRLVRECEANLELLFPSEAEVVESSSAVQAHSSSHQHNSPRISAETSSTLGNENLDIYKSTLAAMRAIRGLQKASSTYNPLSFSSLLQNEDDETVTAENSPNSGNKDDSEKEDTGPSH

SEQ ID NO: 43735 - protein, 167 aa, Arabidopsis thaliana
  peptide (1)..(167): Ceres Seq. ID no. 12336327
MVLLKNYSSLNFAGLVKILKKYDKRTGGLLRLPFTQLVLHQPFFTTEPLTRLVRECEANLELLFPSEAEVVESSSAVQAHSSSHQHNSPRISAETSSTLGNENLDIYKSTLAAMRAIRGLQKASSTYNPLSFSSLLQNEDDETVTAENSPNSGNKDDSEKEDTGPSH

SEQ ID NO: 43736 - DNA, 1851 bp, Arabidopsis thaliana
  misc_feature (1)..(1851): Ceres Seq. ID no. 13491315
  misc_feature (1)..(1851): Ortholog of  Ceres SEQ ID NO 13595529 as cited in SEQ ID NO 56687
ggggtcatacaataaaaattgtgtttcttttttgccctaaaccaaaaatttcatctctcttttccctcttcccgtctctatctctctgagaagcgttttttcggtggagagaaagagagatttgactctgtcaagttattagtacattgaggtcgggctgtcaaaacttgacagcccgagtttgaagcttccaggactctttttctattaatgagattggtatgctagatttggagtgtattggattagattgtggcgatcatgggttctttgtctgggatcattcaacggccacttgttgctgctgctgctgtgattacagcttctgtgtctgcagatgtctctgagaggttctcatctcttagatcactagttcgaggttctgaatcagagcagattgctccttcagtgtctggtttagttcaggaagaaaggtccttgtgggtttctcaagtctcggcctccaagcttgcagatttatcttttgtgtcgaggatttgtgttcctgtaccaaatgttgatctcctagcttctaatcctagctgtagtctcgctacttctgttacttctctgtccgctcttcgtagtgtttatcagtctgcagagttggctaaagcatcgaaaccggttgcattcacaatcggtgcctcacttgtggttcctgatatttcctacagatggcatttacctgagcctagtgcagtcgatatgtctggttcttcgagttgtgtgtctgaaaagaatagaactgttgtggttttgcttggatggcttggatcaaagcagaagcatctgaagaaatatgctgattggtacacttcaaagggttaccatgtcattacatttactcttccgatgaatgagattatgagttatcaagttggagggaaagcagagaagaacatcgagtcgctggttaatcacttggctgattggttggatgaagagcaaaagaaaaatctcgtctttcacaccttcagcaacaccgggtggttaacatatggagccattttggaaaagtttcagaagcaagattcatcattgatgggaagagttaaaggttgcatagtggactcagctcctgttgctgctgcagatcctacggtatgggcatcaggtttctcagctgcgttcttgaagaaaagcagtgtagccactaaaggatctgcgagctcatcatatgagtcaaacggtataaacatctcccagcctaaacccgctgcaacagaaacagctttgcttttggttcttgaaaagttctttgcggtgattctaaatcttcccaaagtaaacaggagacttgccgatgttcttgacacattatcaacagcacaaccaagttgtccacagttatacatttacagctctgcagacagagttataccggtggaacaagttgaatcattcattgtagagcagaggaaagcaggacatgaggtccgtgcttgcaacttcatatcttcacctcatgtagaccatttccggagtaacccagaactgtatacagctgagctcaaccatttcatgaacaactttgtcctttcttgctgccaccattcttcatagcgacttccacaagtgttgttgttgctaaccatttttggggtccttttaactcttatacaagaaagagaaaaatagttactgattgatgattctttttggtttggattggtttatagattcaaattcattattcctttgtaaattgttggatattgtacatttaggagaatgaagattcaagaaagtgacgtccttgtcctttgtagtggagatttggatcttatggttgtcttttgttatttgttcaaagagggttgttaagaacccaatcataaagtttttgcc

SEQ ID NO: 43737 - protein, 434 aa, Arabidopsis thaliana
  peptide (1)..(434): Ceres Seq. ID no. 13491316
MGSLSGIIQRPLVAAAAVITASVSADVSERFSSLRSLVRGSESEQIAPSVSGLVQEERSLWVSQVSASKLADLSFVSRICVPVPNVDLLASNPSCSLATSVTSLSALRSVYQSAELAKASKPVAFTIGASLVVPDISYRWHLPEPSAVDMSGSSSCVSEKNRTVVVLLGWLGSKQKHLKKYADWYTSKGYHVITFTLPMNEIMSYQVGGKAEKNIESLVNHLADWLDEEQKKNLVFHTFSNTGWLTYGAILEKFQKQDSSLMGRVKGCIVDSAPVAAADPTVWASGFSAAFLKKSSVATKGSASSSYESNGINISQPKPAATETALLLVLEKFFAVILNLPKVNRRLADVLDTLSTAQPSCPQLYIYSSADRVIPVEQVESFIVEQRKAGHEVRACNFISSPHVDHFRSNPELYTAELNHFMNNFVLSCCHHSS

SEQ ID NO: 43738 - protein, 285 aa, Arabidopsis thaliana
  peptide (1)..(285): Ceres Seq. ID no. 13491317
MSGSSSCVSEKNRTVVVLLGWLGSKQKHLKKYADWYTSKGYHVITFTLPMNEIMSYQVGGKAEKNIESLVNHLADWLDEEQKKNLVFHTFSNTGWLTYGAILEKFQKQDSSLMGRVKGCIVDSAPVAAADPTVWASGFSAAFLKKSSVATKGSASSSYESNGINISQPKPAATETALLLVLEKFFAVILNLPKVNRRLADVLDTLSTAQPSCPQLYIYSSADRVIPVEQVESFIVEQRKAGHEVRACNFISSPHVDHFRSNPELYTAELNHFMNNFVLSCCHHSS

SEQ ID NO: 43739 - protein, 236 aa, Arabidopsis thaliana
  peptide (1)..(236): Ceres Seq. ID no. 13491318
MNEIMSYQVGGKAEKNIESLVNHLADWLDEEQKKNLVFHTFSNTGWLTYGAILEKFQKQDSSLMGRVKGCIVDSAPVAAADPTVWASGFSAAFLKKSSVATKGSASSSYESNGINISQPKPAATETALLLVLEKFFAVILNLPKVNRRLADVLDTLSTAQPSCPQLYIYSSADRVIPVEQVESFIVEQRKAGHEVRACNFISSPHVDHFRSNPELYTAELNHFMNNFVLSCCHHSS

SEQ ID NO: 43740 - DNA, 1161 bp, Arabidopsis thaliana
  misc_feature (1)..(1161): Ceres Seq. ID no. 12331115
  misc_feature (1)..(1161): Ortholog of  Ceres SEQ ID NO 14314331 as cited in SEQ ID NO 57390
ccagcttgacgatgtcgttgacggagctagacgacggactggttcgcaggatggccatgggccagtcttctctgattttggagggaagatacattcggtgggtttccataggactgatgatctattggtcacatccagcgaagatgattcacttcgcctcttcgatatcgccaacgctaaacagctgaagattacataccataagaaacatggcaccgatcgtgtatgctttacccatcatcctagctctctaatttgctcttctcgatacaatttggagtccactggtgaatccttgagatatctctcaatgtatgataatcggatcctacgctactttaaagggcataaagacagggttgtatcactttgtatgtctcctataaatgatagcttcatgtctggttctctcgaccgaagtgttagactctgggatcttcgtgtaaatgcctgccagggaattctacatctacgtggtagacctgcagttgcgtatgaccaacaaggccttgtgtttgcaattgcaatggaaggaggtgctgttaaattatttgattccaggtgttatgacaagggtccctttgacacatttctggtgggtggggatactgctgaggttaacgatataaaattcagcaacgatgggaaatccatgctcctaacgactacaaataacaatatctacgttcttgatgcatatcgtggagagaagaaatgtggttttagtttggagccttcacagggtacacccatagaggccaccttcacaccagatggcaagtatgttctgtcaggttcaggtgatggaaccttacatgcgtggaacatcgagaacccatctgaggtggcgaggtgggagaacaacataggagtagtgtcgtgtctgaaatgggcaccacgtagagccatgttcgttgctgcttctacggttctcacattctggatcccaaacgacggtgaatcaccagcccccgccgatcctcctaccgatcaacaacagtgacgacatatatgtttccattatgcacttgtgtatcgttttttaatgttgacaattagaaaaatttggaagcagtagtatgttaatcaaatttagagtttatgaatttgagtctagatggttacaatatgttttctttaatgactatttactcttatttt

SEQ ID NO: 43741 - protein, 333 aa, Arabidopsis thaliana
  peptide (1)..(333): Ceres Seq. ID no. 12331116
QLDDVVDGARRRTGSQDGHGPVFSDFGGKIHSVGFHRTDDLLVTSSEDDSLRLFDIANAKQLKITYHKKHGTDRVCFTHHPSSLICSSRYNLESTGESLRYLSMYDNRILRYFKGHKDRVVSLCMSPINDSFMSGSLDRSVRLWDLRVNACQGILHLRGRPAVAYDQQGLVFAIAMEGGAVKLFDSRCYDKGPFDTFLVGGDTAEVNDIKFSNDGKSMLLTTTNNNIYVLDAYRGEKKCGFSLEPSQGTPIEATFTPDGKYVLSGSGDGTLHAWNIENPSEVARWENNIGVVSCLKWAPRRAMFVAASTVLTFWIPNDGESPAPADPPTDQQQ

SEQ ID NO: 43742 - protein, 230 aa, Arabidopsis thaliana
  peptide (1)..(230): Ceres Seq. ID no. 12331117
MYDNRILRYFKGHKDRVVSLCMSPINDSFMSGSLDRSVRLWDLRVNACQGILHLRGRPAVAYDQQGLVFAIAMEGGAVKLFDSRCYDKGPFDTFLVGGDTAEVNDIKFSNDGKSMLLTTTNNNIYVLDAYRGEKKCGFSLEPSQGTPIEATFTPDGKYVLSGSGDGTLHAWNIENPSEVARWENNIGVVSCLKWAPRRAMFVAASTVLTFWIPNDGESPAPADPPTDQQQ

SEQ ID NO: 43743 - protein, 209 aa, Arabidopsis thaliana
  peptide (1)..(209): Ceres Seq. ID no. 12331118
MSPINDSFMSGSLDRSVRLWDLRVNACQGILHLRGRPAVAYDQQGLVFAIAMEGGAVKLFDSRCYDKGPFDTFLVGGDTAEVNDIKFSNDGKSMLLTTTNNNIYVLDAYRGEKKCGFSLEPSQGTPIEATFTPDGKYVLSGSGDGTLHAWNIENPSEVARWENNIGVVSCLKWAPRRAMFVAASTVLTFWIPNDGESPAPADPPTDQQQ

SEQ ID NO: 43744 - DNA, 2389 bp, Arabidopsis thaliana
  misc_feature (1)..(2389): Ceres Seq. ID no. 13591580
  misc_feature (1)..(2389): Ortholog of  Ceres SEQ ID NO 12465083 as cited in SEQ ID NO 68239
gagttaaatttcttcgtcttccatacaaagcgactacttcaccatcaccttcgggcactggacctatttaagcatcctaacttcttcttcaaagcttraaaaccagaaaacaaaaggaagctctntgttcaaatcaaaaagagagatcgtacgcaaaagtttccgatatggctcgctcgtttggagctaacagtaccgttgtgttggcgatcatcttcttcggatgtttatttgcgttgtcctctgcaatagaagaggctacgaagttaggatcagtgatagggatagatcttggtactacttactcttgtgttggtgtttacaagaatggtcatgtcgaaattattgccaatgaccaaggaaaccgtattacaccttcatgggttggttttactgactctgaaagactcattggtgaggctgctaagaatcaagcagctgttaatccagagaggactgtcttcgacgttaagagattgatcgggcgaaaatttgaggataaggaggttcaaaaggataggaaacttgtaccttaccagattgtgaacaaggatggtaagccatacattcaagtcaagatcaaggatggtgagactaaggttttcagtcctgaggagattagtgctatgattctgactaagatgaaggagacagctgaagcctaccttggaaagaaaatcaaggacgctgttgtcactgttccagcttacttcaatgatgctcaaaggcaagctactaaggatgctggtgttattgctgggctcaatgttgctagaatcattaatgaacctactgctgctgctattgcctatggtcttgataagaagggtggcgagaagaatatccttgtgtttgatcttggtggtggtacttttgatgtcagtgtcttgaccattgataacggagtgtttgaggttctctccacaaatggtgacactcacttgggaggtgaggactttgaccacagggtgatggagtacttcatcaagttgattaagaagaagcaccagaaggacatcagcaaggacaacaaggctcttggtaagctccgaagggaatgtgagagggcaaagagagctctaagtagtcagcaccaagtccgtgtagagattgagtcactctttgatggtgttgatttttctgagccactcaccagagctcgtttcgaggagcttaacaatgatttgttcaggaagaccatgggacctgtgaagaaggccatggatgatgccggtctacagaagagccagatcgatgagattgtccttgttggtggaagcaccaggatcccaaaggttcagcaactgttgaaggacttctttgaaggtaaagagccaaacaagggtgtgaaccccgacgaggctgttgcctatggtgctgctgttcagggtggtattttgagcggagaaggcggtgatgagaccaaagatatccttcttcttgatgttgcgccactcactttgggtatcgagactgtaggaggagtgatgacaaagttgatcccgagaaacacggttattccaaccaagaaatctcaggttttcacaacgtaccaagaccagcagactaccgtctccattcaggtctttgaaggtgaacgaagtctcaccaaggactgcaggctactcgggaaattcgacctcaatggaatcccaccggccccaagaggaacccctcaaatcgaggtcacattcgaagtggacgccaacggtattcttaatgtgaaagcagaggacaaggcgagtggtaaatcagagaagattactatcacaaacgagaagggtcgtctgagccaagaagagattgaccggatggtgaaggaggcagaggagtttgcagaggaagacaagaaggtaaaggagaagatcgacgccaggaatgccctggagacatacgtgtacaacatgaagaaccaagtgaacgacaaggacaagcttgccgacaaattggaaggagatgaaaaggagaagatcgaagcagcgacgaaagaggctttggagtggctcgacgaaaaccaaaactcagagaaagaagagtacgacgagaagctcaaggaggtagaggcagtgtgtaacccaatcatcacagcagtttaccagagatctggcggagcaccaggtggtgcaggaggagaatcatcgactgaggaggaagatgagtctcacgatgagctctagatgtcttytgttattgttaatttrttaaaccatagagacragttttgaggatgaaacgtcgtttttgttttttgtatttggtttcctttttcwtatggatttttaggaaaaggggagagattaagtarcgtcccttctttagtctccctggacgttctctttatgttcatctgataactttacttcttcataacaaataccttttttctatt

SEQ ID NO: 43745 - protein, 669 aa, Arabidopsis thaliana; identical to SEQ ID NO: 25857
  peptide (1)..(669): Ceres Seq. ID no. 15221053

SEQ ID NO: 43746 - protein, 516 aa, Arabidopsis thaliana; identical to SEQ ID NO: 25858
  peptide (1)..(516): Ceres Seq. ID no. 15221054

SEQ ID NO: 43747 - protein, 511 aa, Arabidopsis thaliana
  peptide (1)..(511): Ceres Seq. ID no. 15221055
MKETAEAYLGKKIKDAVVTVPAYFNDAQRQATKDAGVIAGLNVARIINEPTAAAIAYGLDKKGGEKNILVFDLGGGTFDVSVLTIDNGVFEVLSTNGDTHLGGEDFDHRVMEYFIKLIKKKHQKDISKDNKALGKLRRECERAKRALSSQHQVRVEIESLFDGVDFSEPLTRARFEELNNDLFRKTMGPVKKAMDDAGLQKSQIDEIVLVGGSTRIPKVQQLLKDFFEGKEPNKGVNPDEAVAYGAAVQGGILSGEGGDETKDILLLDVAPLTLGIETVGGVMTKLIPRNTVIPTKKSQVFTTYQDQQTTVSIQVFEGERSLTKDCRLLGKFDLNGIPPAPRGTPQIEVTFEVDANGILNVKAEDKASGKSEKITITNEKGRLSQEEIDRMVKEAEEFAEEDKKVKEKIDARNALETYVYNMKNQVNDKDKLADKLEGDEKEKIEAATKEALEWLDENQNSEKEEYDEKLKEVEAVCNPIITAVYQRSGGAPGGAGGESSTEEEDESHDEL

SEQ ID NO: 43748 - DNA, 1662 bp, Arabidopsis thaliana
  misc_feature (1)..(1662): Ceres Seq. ID no. 12421352
  misc_feature (1)..(1662): Ortholog of  Ceres SEQ ID NO 13594209 as cited in SEQ ID NO 59089
  misc_feature (1)..(1662): Ortholog of  Ceres SEQ ID NO 13664173 as cited in SEQ ID NO 61223
  misc_feature (1)..(1662): Ortholog of  Ceres SEQ ID NO 15169599 as cited in SEQ ID NO 66096
  misc_feature (1)..(1662): Ortholog of  Ceres SEQ ID NO 13502874 as cited in SEQ ID NO 66298
  misc_feature (1)..(1662): Ortholog of  Ceres SEQ ID NO 12614124 as cited in SEQ ID NO 68392
  misc_feature (1)..(1662): Ortholog of  Ceres SEQ ID NO 14308011 as cited in SEQ ID NO 69234
aaacctgtattttatcaattaccacactttgtctaagcaaaatggatttattactcatatccttaaccactatcataatcgccgcctacatgcaaaatctacgacgtcggggatccaacataccgccgggaccaccaacgcgatttctggtcggaaaccttcatcaactgaaaccattatggacgcagtctttctccgagtggtcacagacttatggccccatcatatcggtgtggttaggatcacagctagctgttgtggtctcgagctctgacttagccaaacaagtgttgagagacaaagactaccaactctgtaaccgacacagaaccgcaaggatgactcagaacggcagcgatcttatttggtctgactacggagcacattatgtgaaaatgagaaaactctgtacactcgagctcttttctttgaaaagcatagagtgtttcaggtcgatgagagagatggaagtaagttccatggttaagtcgattttcaatgacttcatgagcgatgatcagaaaccagtggtgttgaggaactatctagattctgttgctttgaacattgtttcaagattagttatcgggaaaacattcgaacccaaagatggaagagagtttagatcaattgtagaaagggagactcgcttgcccggcgcaaccaagatgcttgattacaccgtttggcttaaacgtctttcgtcatggttcactagcgacaaggcgttcatgaagcacatggctcggaaaagaaattggtttaaacgagctgtaatggatgaagtatatggaggaagagatcaaaagtgttttgttcagagtctgttagagttgaaagagaaggatgagctgaccgaggagactgtgatgggactggtctggaacatgttaactgcaggagctgacacaaccgccataactattgaatgggcaatggcagagatgatcagatgcccgaccgtgaaagaaaaggtgcaggatgagcttgattccgtggttggatccggacggttaatgtctgatgcagatatcccaaaactgccgtttctgcaatgcgtactcaaagaagctctccggcttcaccctccaacaccattgatgcttccacacaaggccagcgaatcagttcaggtaggtgggtacaaagttcctaagggagccacggtttatgtcaacgtgcaggcgattgctcgagatcctgcaaactggagtaacccagatgagtttagaccagagaggtttcttgtggaggaaacggacgttaaaggtcaagactttcgggttcttccatttgggtcgggaagacgggtgtgtccagccgctcaactcagcctcaatatgatgacattagcactaggtagtttgttgcattgtttctcatggacatcctctacacctcgagaacacattgacatgaccgagaagcctggattagtttgttacatgaaggctccattgcaggctctagcttcgtccaggctgccacaagagttatacctttaacttttaactgagatagattatattaatcaacataagataaagagagattctcaattgcgaaaaacagatgtagctatggcaagatttaggacatggatgatgaaatggttcgtacaaacagaatgtagctattgatagtaaataaactaaatattcc

SEQ ID NO: 43749 - protein, 500 aa, Arabidopsis thaliana
  peptide (1)..(500): Ceres Seq. ID no. 12421353
TCILSITTLCLSKMDLLLISLTTIIIAAYMQNLRRRGSNIPPGPPTRFLVGNLHQLKPLWTQSFSEWSQTYGPIISVWLGSQLAVVVSSSDLAKQVLRDKDYQLCNRHRTARMTQNGSDLIWSDYGAHYVKMRKLCTLELFSLKSIECFRSMREMEVSSMVKSIFNDFMSDDQKPVVLRNYLDSVALNIVSRLVIGKTFEPKDGREFRSIVERETRLPGATKMLDYTVWLKRLSSWFTSDKAFMKHMARKRNWFKRAVMDEVYGGRDQKCFVQSLLELKEKDELTEETVMGLVWNMLTAGADTTAITIEWAMAEMIRCPTVKEKVQDELDSVVGSGRLMSDADIPKLPFLQCVLKEALRLHPPTPLMLPHKASESVQVGGYKVPKGATVYVNVQAIARDPANWSNPDEFRPERFLVEETDVKGQDFRVLPFGSGRRVCPAAQLSLNMMTLALGSLLHCFSWTSSTPREHIDMTEKPGLVCYMKAPLQALASSRLPQELYL

SEQ ID NO: 43750 - protein, 487 aa, Arabidopsis thaliana
  peptide (1)..(487): Ceres Seq. ID no. 12421354
MDLLLISLTTIIIAAYMQNLRRRGSNIPPGPPTRFLVGNLHQLKPLWTQSFSEWSQTYGPIISVWLGSQLAVVVSSSDLAKQVLRDKDYQLCNRHRTARMTQNGSDLIWSDYGAHYVKMRKLCTLELFSLKSIECFRSMREMEVSSMVKSIFNDFMSDDQKPVVLRNYLDSVALNIVSRLVIGKTFEPKDGREFRSIVERETRLPGATKMLDYTVWLKRLSSWFTSDKAFMKHMARKRNWFKRAVMDEVYGGRDQKCFVQSLLELKEKDELTEETVMGLVWNMLTAGADTTAITIEWAMAEMIRCPTVKEKVQDELDSVVGSGRLMSDADIPKLPFLQCVLKEALRLHPPTPLMLPHKASESVQVGGYKVPKGATVYVNVQAIARDPANWSNPDEFRPERFLVEETDVKGQDFRVLPFGSGRRVCPAAQLSLNMMTLALGSLLHCFSWTSSTPREHIDMTEKPGLVCYMKAPLQALASSRLPQELYL

SEQ ID NO: 43751 - protein, 471 aa, Arabidopsis thaliana
  peptide (1)..(471): Ceres Seq. ID no. 12421355
MQNLRRRGSNIPPGPPTRFLVGNLHQLKPLWTQSFSEWSQTYGPIISVWLGSQLAVVVSSSDLAKQVLRDKDYQLCNRHRTARMTQNGSDLIWSDYGAHYVKMRKLCTLELFSLKSIECFRSMREMEVSSMVKSIFNDFMSDDQKPVVLRNYLDSVALNIVSRLVIGKTFEPKDGREFRSIVERETRLPGATKMLDYTVWLKRLSSWFTSDKAFMKHMARKRNWFKRAVMDEVYGGRDQKCFVQSLLELKEKDELTEETVMGLVWNMLTAGADTTAITIEWAMAEMIRCPTVKEKVQDELDSVVGSGRLMSDADIPKLPFLQCVLKEALRLHPPTPLMLPHKASESVQVGGYKVPKGATVYVNVQAIARDPANWSNPDEFRPERFLVEETDVKGQDFRVLPFGSGRRVCPAAQLSLNMMTLALGSLLHCFSWTSSTPREHIDMTEKPGLVCYMKAPLQALASSRLPQELYL

SEQ ID NO: 43752 - DNA, 573 bp, Arabidopsis thaliana
  misc_feature (1)..(573): Ceres Seq. ID no. 4921303
  misc_feature (1)..(573): Ortholog of  Ceres SEQ ID NO 14309653 as cited in SEQ ID NO 0
gaaggacagatttgtaaacattctcaaatccttcaaaaaccctaatttctttctgtgaggttattgagaacgaagaagatgacgggagaggtagtgaaccctaaggcgtacccgttagcagattctcagctttcgataacaataatggatcttgttcaacaagctactaactacaagcagcttaagaagggagctaatgaagctaccaaaacattgaaccgtggaatctctgagttcgttgttatggctgctgatgctgaaccacttgagattcttcttcatcttcctttgcttgccgaagataagaatgtgccatatgtgtttgtaccttcgaaacaagcattgggaagagcatgtggagtaacaagacctgttattgcttgttcagtgacatcgaatgaggcaagccagttgaaatcgcagattcagcatctcaaggatgcgattgagaagctcctgatctaaggattctgctcagtatgagagtctntgcaatgtggatggctctgntgaagtantttggtgattacctntttaagatgtattggactggggtatgctagttggggacat

SEQ ID NO: 43753 - protein, 128 aa, Arabidopsis thaliana; identical to SEQ ID NO: 26405
  peptide (1)..(128): Ceres Seq. ID no. 4921304

SEQ ID NO: 43754 - protein, 106 aa, Arabidopsis thaliana; identical to SEQ ID NO: 26406
  peptide (1)..(106): Ceres Seq. ID no. 4921305

SEQ ID NO: 43755 - protein, 73 aa, Arabidopsis thaliana; identical to SEQ ID NO: 21543
  peptide (1)..(73): Ceres Seq. ID no. 4921306

SEQ ID NO: 43756 - DNA, 854 bp, Arabidopsis thaliana; identical to SEQ ID NO: 40130
  misc_feature (1)..(854): Ceres Seq. ID no. 13497569
  misc_feature (1)..(854): Ortholog of  Ceres SEQ ID NO 13594501 as cited in SEQ ID NO 51327

SEQ ID NO: 43757 - protein, 142 aa, Arabidopsis thaliana; identical to SEQ ID NO: 40131
  peptide (1)..(142): Ceres Seq. ID no. 13497570

SEQ ID NO: 43758 - DNA, 1213 bp, Arabidopsis thaliana; identical to SEQ ID NO: 40126
  misc_feature (1)..(1213): Ceres Seq. ID no. 12481792
  misc_feature (1)..(1213): Ortholog of  Ceres SEQ ID NO 14304969 as cited in SEQ ID NO 53193
  misc_feature (1)..(1213): Ortholog of  Ceres SEQ ID NO 14314851 as cited in SEQ ID NO 54014
  misc_feature (1)..(1213): Ortholog of  Ceres SEQ ID NO 15227214 as cited in SEQ ID NO 55368
  misc_feature (1)..(1213): Ortholog of  Ceres SEQ ID NO 13638897 as cited in SEQ ID NO 55839
  misc_feature (1)..(1213): Ortholog of  Ceres SEQ ID NO 15177758 as cited in SEQ ID NO 57504
  misc_feature (1)..(1213): Ortholog of  Ceres SEQ ID NO 15177710 as cited in SEQ ID NO 59217
  misc_feature (1)..(1213): Ortholog of  Ceres SEQ ID NO 15173484 as cited in SEQ ID NO 61804
  misc_feature (1)..(1213): Ortholog of  Ceres SEQ ID NO 13596958 as cited in SEQ ID NO 63319
  misc_feature (1)..(1213): Ortholog of  Ceres SEQ ID NO 12614814 as cited in SEQ ID NO 68816

SEQ ID NO: 43759 - protein, 306 aa, Arabidopsis thaliana; identical to SEQ ID NO: 40127
  peptide (1)..(306): Ceres Seq. ID no. 12481793

SEQ ID NO: 43760 - protein, 305 aa, Arabidopsis thaliana; identical to SEQ ID NO: 40128
  peptide (1)..(305): Ceres Seq. ID no. 12481794

SEQ ID NO: 43761 - protein, 286 aa, Arabidopsis thaliana; identical to SEQ ID NO: 40129
  peptide (1)..(286): Ceres Seq. ID no. 12481795

SEQ ID NO: 43762 - DNA, 780 bp, Arabidopsis thaliana; identical to SEQ ID NO: 21927
  misc_feature (1)..(780): Ceres Seq. ID no. 12331618
  misc_feature (1)..(780): Ortholog of  Ceres SEQ ID NO 13595021 as cited in SEQ ID NO 55815

SEQ ID NO: 43763 - protein, 222 aa, Arabidopsis thaliana; identical to SEQ ID NO: 21928
  peptide (1)..(222): Ceres Seq. ID no. 12331619

SEQ ID NO: 43764 - protein, 204 aa, Arabidopsis thaliana; identical to SEQ ID NO: 21929
  peptide (1)..(204): Ceres Seq. ID no. 12331620

SEQ ID NO: 43765 - DNA, 854 bp, Arabidopsis thaliana; identical to SEQ ID NO: 40130
  misc_feature (1)..(854): Ceres Seq. ID no. 13497569
  misc_feature (1)..(854): Ortholog of  Ceres SEQ ID NO 13594501 as cited in SEQ ID NO 51327

SEQ ID NO: 43766 - protein, 142 aa, Arabidopsis thaliana; identical to SEQ ID NO: 40131
  peptide (1)..(142): Ceres Seq. ID no. 13497570

SEQ ID NO: 43767 - DNA, 781 bp, Arabidopsis thaliana; identical to SEQ ID NO: 29994
  misc_feature (1)..(781): Ceres Seq. ID no. 13487058
  misc_feature (1)..(781): Ortholog of  Ceres SEQ ID NO 15173990 as cited in SEQ ID NO 1070
  misc_feature (1)..(781): Ortholog of  Ceres SEQ ID NO 13594900 as cited in SEQ ID NO 52042

SEQ ID NO: 43768 - protein, 130 aa, Arabidopsis thaliana; identical to SEQ ID NO: 29995
  peptide (1)..(130): Ceres Seq. ID no. 13487059

SEQ ID NO: 43769 - protein, 71 aa, Arabidopsis thaliana; identical to SEQ ID NO: 29996
  peptide (1)..(71): Ceres Seq. ID no. 13487060

SEQ ID NO: 43770 - protein, 70 aa, Arabidopsis thaliana; identical to SEQ ID NO: 29997
  peptide (1)..(70): Ceres Seq. ID no. 13487061

SEQ ID NO: 43771 - DNA, 639 bp, Arabidopsis thaliana
  misc_feature (1)..(639): Ceres Seq. ID no. 13503788
  misc_feature (1)..(639): Ortholog of  Ceres SEQ ID NO 13595226 as cited in SEQ ID NO 56331
  misc_feature (1)..(639): Ortholog of  Ceres SEQ ID NO 13661903 as cited in SEQ ID NO 61722
  misc_feature (1)..(639): Ortholog of  Ceres SEQ ID NO 15173940 as cited in SEQ ID NO 61934
aaaacaatcaagaaccactctttcgtgtcgcaataacaataagaaagaaagaaaaagaaaaccagagatggcgatgacgacagcatctacggtatttgttctaccggccaatgtcacctcggtcgccggcgcttcgtcgtccaggagctccgtgtctttcttgccgatgagaaacgccggttctaggctcgtagtcagggcagccgaagatcctgctccggcttcctcttcttcaaaagattctccggcagctgccgctgctccggatggagctactgccaccaaacccaagccaccaccgattggtcctaagagagggtctaaggtcaagattctaaggagagaatcctattggttcaagaacgttggatcagttgttgccgttgatcaggaccctaagactcgatacccggttgtggtccggttcgcaaaagtcaattacgccaacatatcgaccaacaactatgcattggatgaggtcgaagaagttgcagcttaaatgggagaattcaaaaactctgtgtattctataccggtttatccgtttgtaacttgacccaaaccgtatgtaccgcaaaagtttaccaattatttctcctcaaaaaaaaaaaaaaaaaaaactcgagggggggcccggta

SEQ ID NO: 43772 - protein, 165 aa, Arabidopsis thaliana
  peptide (1)..(165): Ceres Seq. ID no. 13503789
KQSRTTLSCRNNNKKERKRKPEMAMTTASTVFVLPANVTSVAGASSSRSSVSFLPMRNAGSRLVVRAAEDPAPASSSSKDSPAAAAAPDGATATKPKPPPIGPKRGSKVKILRRESYWFKNVGSVVAVDQDPKTRYPVVVRFAKVNYANISTNNYALDEVEEVAA

SEQ ID NO: 43773 - protein, 143 aa, Arabidopsis thaliana
  peptide (1)..(143): Ceres Seq. ID no. 13503790
MAMTTASTVFVLPANVTSVAGASSSRSSVSFLPMRNAGSRLVVRAAEDPAPASSSSKDSPAAAAAPDGATATKPKPPPIGPKRGSKVKILRRESYWFKNVGSVVAVDQDPKTRYPVVVRFAKVNYANISTNNYALDEVEEVAA

SEQ ID NO: 43774 - protein, 141 aa, Arabidopsis thaliana
  peptide (1)..(141): Ceres Seq. ID no. 13503791
MTTASTVFVLPANVTSVAGASSSRSSVSFLPMRNAGSRLVVRAAEDPAPASSSSKDSPAAAAAPDGATATKPKPPPIGPKRGSKVKILRRESYWFKNVGSVVAVDQDPKTRYPVVVRFAKVNYANISTNNYALDEVEEVAA

SEQ ID NO: 43775 - DNA, 1206 bp, Arabidopsis thaliana; identical to SEQ ID NO: 29329
  misc_feature (1)..(1206): Ceres Seq. ID no. 12601145
  misc_feature (1)..(1206): Ortholog of  Ceres SEQ ID NO 15179153 as cited in SEQ ID NO 1066
  misc_feature (1)..(1206): Ortholog of  Ceres SEQ ID NO 15176047 as cited in SEQ ID NO 55988
  misc_feature (1)..(1206): Ortholog of  Ceres SEQ ID NO 13582167 as cited in SEQ ID NO 56203
  misc_feature (1)..(1206): Ortholog of  Ceres SEQ ID NO 13658295 as cited in SEQ ID NO 66515

SEQ ID NO: 43776 - protein, 325 aa, Arabidopsis thaliana; identical to SEQ ID NO: 29330
  peptide (1)..(325): Ceres Seq. ID no. 12601146

SEQ ID NO: 43777 - protein, 323 aa, Arabidopsis thaliana; identical to SEQ ID NO: 29331
  peptide (1)..(323): Ceres Seq. ID no. 12601147

SEQ ID NO: 43778 - protein, 322 aa, Arabidopsis thaliana; identical to SEQ ID NO: 29332
  peptide (1)..(322): Ceres Seq. ID no. 12601148

SEQ ID NO: 43779 - DNA, 750 bp, Arabidopsis thaliana; identical to SEQ ID NO: 30484
  misc_feature (1)..(750): Ceres Seq. ID no. 13497622
  misc_feature (1)..(750): Ortholog of  Ceres SEQ ID NO 15227036 as cited in SEQ ID NO 61662
  misc_feature (1)..(750): Ortholog of  Ceres SEQ ID NO 12635268 as cited in SEQ ID NO 0

SEQ ID NO: 43780 - protein, 161 aa, Arabidopsis thaliana; identical to SEQ ID NO: 30485
  peptide (1)..(161): Ceres Seq. ID no. 13497623

SEQ ID NO: 43781 - protein, 144 aa, Arabidopsis thaliana; identical to SEQ ID NO: 30486
  peptide (1)..(144): Ceres Seq. ID no. 13497624

SEQ ID NO: 43782 - protein, 121 aa, Arabidopsis thaliana; identical to SEQ ID NO: 30487
  peptide (1)..(121): Ceres Seq. ID no. 13497625

SEQ ID NO: 43783 - DNA, 627 bp, Arabidopsis thaliana; identical to SEQ ID NO: 35506
  misc_feature (1)..(627): Ceres Seq. ID no. 12377321
  misc_feature (1)..(627): Ortholog of  Ceres SEQ ID NO 13638769 as cited in SEQ ID NO 51773
  misc_feature (1)..(627): Ortholog of  Ceres SEQ ID NO 12583723 as cited in SEQ ID NO 58297
  misc_feature (1)..(627): Ortholog of  Ceres SEQ ID NO 12623263 as cited in SEQ ID NO 60988
  misc_feature (1)..(627): Ortholog of  Ceres SEQ ID NO 15225568 as cited in SEQ ID NO 61512
  misc_feature (1)..(627): Ortholog of  Ceres SEQ ID NO 13590249 as cited in SEQ ID NO 68385
  misc_feature (1)..(627): Ortholog of  Ceres SEQ ID NO 12635807 as cited in SEQ ID NO 0
  misc_feature (1)..(627): Ortholog of  Ceres SEQ ID NO 15179245 as cited in SEQ ID NO 0

SEQ ID NO: 43784 - protein, 165 aa, Arabidopsis thaliana; identical to SEQ ID NO: 35507
  peptide (1)..(165): Ceres Seq. ID no. 12377322

SEQ ID NO: 43785 - protein, 148 aa, Arabidopsis thaliana; identical to SEQ ID NO: 35508
  peptide (1)..(148): Ceres Seq. ID no. 12377323

SEQ ID NO: 43786 - protein, 97 aa, Arabidopsis thaliana; identical to SEQ ID NO: 35509
  peptide (1)..(97): Ceres Seq. ID no. 12377324

SEQ ID NO: 43787 - DNA, 715 bp, Arabidopsis thaliana; identical to SEQ ID NO: 35383
  misc_feature (1)..(715): Ceres Seq. ID no. 12322680
  misc_feature (1)..(715): Ortholog of  Ceres SEQ ID NO 14305657 as cited in SEQ ID NO 52544

SEQ ID NO: 43788 - protein, 146 aa, Arabidopsis thaliana; identical to SEQ ID NO: 35384
  peptide (1)..(146): Ceres Seq. ID no. 12322681

SEQ ID NO: 43789 - protein, 117 aa, Arabidopsis thaliana; identical to SEQ ID NO: 35385
  peptide (1)..(117): Ceres Seq. ID no. 12322682

SEQ ID NO: 43790 - protein, 100 aa, Arabidopsis thaliana; identical to SEQ ID NO: 35386
  peptide (1)..(100): Ceres Seq. ID no. 12322683

SEQ ID NO: 43791 - DNA, 690 bp, Arabidopsis thaliana
  misc_feature (1)..(690): Ceres Seq. ID no. 13575241
  misc_feature (1)..(690): Ortholog of  Ceres SEQ ID NO 13599595 as cited in SEQ ID NO 0
atgtcggaagaaatacgagagaaagatctcaccgactctaaaccatctccaccgcaaccaccaccgaaacgtggtctcatcagccgcaaaagacagcttgtgtttctctctttcatgattttattagccgcaaaaggactcgttgggatcggagaaatagcgtttgtaatcttgtgttatatctacttgtatgagtttctctcaagatttgccttccctcgcaagcaaacagaacagaagaagagactctcaaaccctaaaaacaaactctttcaagcttacttcctcgccactgcaattataggcctactcttccctctttgttacatcggagatggaatataccgtggagacattcacggtgctggagccgccgcaccacatctatttctcctctcaggtcaagctttcacagaacctattggtttctctgacaagtattcgatgccaataggtattcttggaccggttttctacaacgctcgtaggattttcgctcttttggattgggttaaagcagaattctccgacactcaacgtcctggtggtccgttgagattgtacggaggaagagtgattgcatcggttaacacggtgatgtggttttataatctgtttggtctcttgttgcctgtgtttcttcctaggtcttgtgagatttacttctccggtgataacaaagatgattga

SEQ ID NO: 43792 - protein, 229 aa, Arabidopsis thaliana
  peptide (1)..(229): Ceres Seq. ID no. 13575242
MSEEIREKDLTDSKPSPPQPPPKRGLISRKRQLVFLSFMILLAAKGLVGIGEIAFVILCYIYLYEFLSRFAFPRKQTEQKKRLSNPKNKLFQAYFLATAIIGLLFPLCYIGDGIYRGDIHGAGAAAPHLFLLSGQAFTEPIGFSDKYSMPIGILGPVFYNARRIFALLDWVKAEFSDTQRPGGPLRLYGGRVIASVNTVMWFYNLFGLLLPVFLPRSCEIYFSGDNKDD

SEQ ID NO: 43793 - protein, 191 aa, Arabidopsis thaliana
  peptide (1)..(191): Ceres Seq. ID no. 13575243
MILLAAKGLVGIGEIAFVILCYIYLYEFLSRFAFPRKQTEQKKRLSNPKNKLFQAYFLATAIIGLLFPLCYIGDGIYRGDIHGAGAAAPHLFLLSGQAFTEPIGFSDKYSMPIGILGPVFYNARRIFALLDWVKAEFSDTQRPGGPLRLYGGRVIASVNTVMWFYNLFGLLLPVFLPRSCEIYFSGDNKDD

SEQ ID NO: 43794 - DNA, 1108 bp, Arabidopsis thaliana
  misc_feature (1)..(1108): Ceres Seq. ID no. 12558765
  misc_feature (1)..(1108): Ortholog of  Ceres SEQ ID NO 13594515 as cited in SEQ ID NO 51496
aatttcttccctttcttcttcttcttctagttccttgataccaacgcgtaatcctaacccttaatctacttcctccttaattaatcagaggtttctacttattatttccacttctcatctctttcaatcgcaatctgagttctggctaaagattttgtcttgaaggtgagattcattgttccgaatagagtgagaaaaagacttataagattgaaaaagcaagatgcggattttgtgcgatgcttgcgagaacgcagccgcaatcatcttttgcgccgccgatgaagctgccctttgtcgcccctgcgatgaaaaagttcatatgtgcaacaagctagctagtcggcatgtacgtgttggtttagctgaaccaagcaatgccccatgctgtgatatatgcgaaaatgcacctgccttcttttactgtgagatagacggtagttctctttgtctgcaatgtgacatggtagtacatgttggtggcaagagaacacacggtcggtttcttttgctgagacagagaatcgagtttccaggggataagcctaaagaaaacaatacgagggacaatttgcagaaccaaagagtctctacaaatggaaatggtgaagccaatgggaagattgatgacgaaatgattgatctaaatgctaatccacaaagagtacatgagccatcatcaaataacaacgggattgatgtaaataacgagaacaatcacgagcctgcaggccttgtaccagttggaccctttaaacgagagtctgagaagtgataaggtgagagagagagagaaagagactctttaccctgattcaaaaaatcagtttaagaagaagattgtaaaaagtttcaagaactggagatttcatggccgtttttttnanaaccttctgattncttagatcgttgcgggtgtaaccgagctttgttgttgaagagggaaggtttatgttgtttgtgcattatncttagttttaaggaattagcttaagtgctcacatgaacgtaagctatgncctgaaattcctaaataattttattngtttcctgttaaaaaaaaaaaaaaaaggaaattaaacncgcacgggaaaaacccgggttttct

SEQ ID NO: 43795 - protein, 183 aa, Arabidopsis thaliana
  peptide (1)..(183): Ceres Seq. ID no. 12558766
MRILCDACENAAAIIFCAADEAALCRPCDEKVHMCNKLASRHVRVGLAEPSNAPCCDICENAPAFFYCEIDGSSLCLQCDMVVHVGGKRTHGRFLLLRQRIEFPGDKPKENNTRDNLQNQRVSTNGNGEANGKIDDEMIDLNANPQRVHEPSSNNNGIDVNNENNHEPAGLVPVGPFKRESEK

SEQ ID NO: 43796 - protein, 150 aa, Arabidopsis thaliana
  peptide (1)..(150): Ceres Seq. ID no. 12558767
MCNKLASRHVRVGLAEPSNAPCCDICENAPAFFYCEIDGSSLCLQCDMVVHVGGKRTHGRFLLLRQRIEFPGDKPKENNTRDNLQNQRVSTNGNGEANGKIDDEMIDLNANPQRVHEPSSNNNGIDVNNENNHEPAGLVPVGPFKRESEK

SEQ ID NO: 43797 - protein, 103 aa, Arabidopsis thaliana
  peptide (1)..(103): Ceres Seq. ID no. 12558768
MVVHVGGKRTHGRFLLLRQRIEFPGDKPKENNTRDNLQNQRVSTNGNGEANGKIDDEMIDLNANPQRVHEPSSNNNGIDVNNENNHEPAGLVPVGPFKRESEK

SEQ ID NO: 43798 - DNA, 611 bp, Arabidopsis thaliana; identical to SEQ ID NO: 39806
  misc_feature (1)..(611): Ceres Seq. ID no. 12338945
  misc_feature (1)..(611): Ortholog of  Ceres SEQ ID NO 14308991 as cited in SEQ ID NO 0

SEQ ID NO: 43799 - protein, 140 aa, Arabidopsis thaliana; identical to SEQ ID NO: 39807
  peptide (1)..(140): Ceres Seq. ID no. 12338947

SEQ ID NO: 43800 - protein, 135 aa, Arabidopsis thaliana; identical to SEQ ID NO: 39808
  peptide (1)..(135): Ceres Seq. ID no. 12338948

SEQ ID NO: 43801 - protein, 82 aa, Arabidopsis thaliana; identical to SEQ ID NO: 39809
  peptide (1)..(82): Ceres Seq. ID no. 12338949

SEQ ID NO: 43802 - DNA, 1837 bp, Arabidopsis thaliana
  misc_feature (1)..(1837): Ceres Seq. ID no. 12558769
  misc_feature (1)..(1837): Ortholog of  Ceres SEQ ID NO 14306569 as cited in SEQ ID NO 53008
  misc_feature (1)..(1837): Ortholog of  Ceres SEQ ID NO 14304855 as cited in SEQ ID NO 53974
gttaattttggggatcgatgtcggaaaaggaagaagctccgtcgacatcgaagtccaccggagctccgtcgcgtccgactttatctcttcctccacggccgtttagtgagatgttctttaacggtggcgttggattcagtcctggtccgatgactctggtctctaatatgttccctgattccgatgagtttaggtctttctctcagcttctcgctggagccatgtcttctccagcgactgcagctgctgctgctgctgctgcgacggctagtgattaccagagacttggtgaagggactaatagctctagtggtgatgttgacccgagattcaagcaaaacagaccaaccggtttgatgatttctcaatctcaatcgccgtcgatgttcaccgtaccgcctggtttaagtccagctatgttgctcgattcaccaagctttttgggtcttttctctcccgttcagggatcatatggaatgacacatcagcaagctctagctcaagtcactgctcaagcagttcaagccaatgccaatatgcaaccacaaacagagtaccctcctccctctcaagttcaatcattttcatcgggtcaagcgcagatcccgacctcggctccactaccagctcaaagagaaacctcagatgtaaccatcatagagcacaggtcacaacagcctctaaatgttgacaaaccagctgatgatggctataactggcgaaaatatgggcaaaagcaagttaaaggtagcgagtttccacgaagctattacaagtgtactaatccaggatgtcctgtcaagaagaaggttgagagatctcttgatggacaagtaacggagattatctacaaaggtcagcacaatcatgaacctcctcaaaacactaagcgaggtaacaaagataacaccgcgaatataaatgggagttcgataaataacaatcgcgggagttctgaattgggggcatcacagtttcaaactaatagctccaacaagactaagagagagcaacatgaagcagtaagtcaagctacgacaacagagcacttgtctgaggcaagtgacggtgaagaagttggtaatggagaaactgatgtgagagagaaagatgagaatgagcctgatcccaagagaagaagtacagaagttcggatttcagaaccagctcctgctgcttcacatagaactgtgacagagcctagaattattgtccaaacgacgagtgaagttgatcttctagatgatggatataggtggcgtaaatatggacagaaagttgtcaaagggaatccttatccgaggagctactacaagtgcacaacaccaggatgtggtgtgaggaaacatgtagagagagcagcaacagatccaaaagctgtagtaacaacatatgaaggaaaacataaccatgaccttcccgctgctaaatcaagcagccatgccgctgcagcggcacagttaaggccagataatcgacctggcggtttggctaacttaaatcaacagcagcagcaacagcccgttgcgcggctaaggcttaaagaagagcaaacaacttgagagaagaaaactcttgaccgtttttcattacaaaagctttcaaattccactcacacacttgtctgaaaaatctagcagtttgcaggaaagaaacagcttcaagaggttgtagttcttctatgttctggtgtaaaacttaaaagctttttagggttttcagatttctgtttactaatactgtatgtgaattcttttgtacatgaggaagaaaattacagggggatattttgtgttgtatcttttgtgttattgtttcagtaaaagataggtcttac

SEQ ID NO: 43803 - protein, 514 aa, Arabidopsis thaliana
  peptide (1)..(514): Ceres Seq. ID no. 12558770
MSEKEEAPSTSKSTGAPSRPTLSLPPRPFSEMFFNGGVGFSPGPMTLVSNMFPDSDEFRSFSQLLAGAMSSPATAAAAAAAATASDYQRLGEGTNSSSGDVDPRFKQNRPTGLMISQSQSPSMFTVPPGLSPAMLLDSPSFLGLFSPVQGSYGMTHQQALAQVTAQAVQANANMQPQTEYPPPSQVQSFSSGQAQIPTSAPLPAQRETSDVTIIEHRSQQPLNVDKPADDGYNWRKYGQKQVKGSEFPRSYYKCTNPGCPVKKKVERSLDGQVTEIIYKGQHNHEPPQNTKRGNKDNTANINGSSINNNRGSSELGASQFQTNSSNKTKREQHEAVSQATTTEHLSEASDGEEVGNGETDVREKDENEPDPKRRSTEVRISEPAPAASHRTVTEPRIIVQTTSEVDLLDDGYRWRKYGQKVVKGNPYPRSYYKCTTPGCGVRKHVERAATDPKAVVTTYEGKHNHDLPAAKSSSHAAAAAQLRPDNRPGGLANLNQQQQQQPVARLRLKEEQTT

SEQ ID NO: 43804 - protein, 483 aa, Arabidopsis thaliana
  peptide (1)..(483): Ceres Seq. ID no. 12558771
MFFNGGVGFSPGPMTLVSNMFPDSDEFRSFSQLLAGAMSSPATAAAAAAAATASDYQRLGEGTNSSSGDVDPRFKQNRPTGLMISQSQSPSMFTVPPGLSPAMLLDSPSFLGLFSPVQGSYGMTHQQALAQVTAQAVQANANMQPQTEYPPPSQVQSFSSGQAQIPTSAPLPAQRETSDVTIIEHRSQQPLNVDKPADDGYNWRKYGQKQVKGSEFPRSYYKCTNPGCPVKKKVERSLDGQVTEIIYKGQHNHEPPQNTKRGNKDNTANINGSSINNNRGSSELGASQFQTNSSNKTKREQHEAVSQATTTEHLSEASDGEEVGNGETDVREKDENEPDPKRRSTEVRISEPAPAASHRTVTEPRIIVQTTSEVDLLDDGYRWRKYGQKVVKGNPYPRSYYKCTTPGCGVRKHVERAATDPKAVVTTYEGKHNHDLPAAKSSSHAAAAAQLRPDNRPGGLANLNQQQQQQPVARLRLKEEQTT

SEQ ID NO: 43805 - protein, 470 aa, Arabidopsis thaliana
  peptide (1)..(470): Ceres Seq. ID no. 12558772
MTLVSNMFPDSDEFRSFSQLLAGAMSSPATAAAAAAAATASDYQRLGEGTNSSSGDVDPRFKQNRPTGLMISQSQSPSMFTVPPGLSPAMLLDSPSFLGLFSPVQGSYGMTHQQALAQVTAQAVQANANMQPQTEYPPPSQVQSFSSGQAQIPTSAPLPAQRETSDVTIIEHRSQQPLNVDKPADDGYNWRKYGQKQVKGSEFPRSYYKCTNPGCPVKKKVERSLDGQVTEIIYKGQHNHEPPQNTKRGNKDNTANINGSSINNNRGSSELGASQFQTNSSNKTKREQHEAVSQATTTEHLSEASDGEEVGNGETDVREKDENEPDPKRRSTEVRISEPAPAASHRTVTEPRIIVQTTSEVDLLDDGYRWRKYGQKVVKGNPYPRSYYKCTTPGCGVRKHVERAATDPKAVVTTYEGKHNHDLPAAKSSSHAAAAAQLRPDNRPGGLANLNQQQQQQPVARLRLKEEQTT

SEQ ID NO: 43806 - DNA, 804 bp, Arabidopsis thaliana
  misc_feature (1)..(804): Ceres Seq. ID no. 12601213
  misc_feature (1)..(804): Ortholog of  Ceres SEQ ID NO 15177927 as cited in SEQ ID NO 1170
  misc_feature (1)..(804): Ortholog of  Ceres SEQ ID NO 13596295 as cited in SEQ ID NO 68019
cttcgccaaaatcagggagaggctaaaatggtttcgttgaagctccagaagcgtctcgcatcctcagtactcaagtgcgggaagagaaaagtatggctcgacccgaacgaaggaagtgatatctccatggccaattcgcgtcaaaacatcaggaagcttgtgaaggatggattcatcatcaggaagccaacgaagatccactcacgatccagggcacgtcaattgaatatagccaagagaaagggacgtcactctggttatggtaagaggaagggtacccgagaggcaaggttgccaacaaaagttttgtggatgaggaggatgagagtgctgaggcgtctgttgaagaagtatagggagaccaagaagattgacagacatatgtaccatgacatgtacatgaaagtcaagggaaacgtcttcaagaacaagcgtgtgttgatggaaagtattcacaaatccaaggctgagaaggctagagagaagacattgtctgaccagtttgaggctaagagggctaagaacaaggctagccgagagaggaaacatgctcgacgagaggagcgtcttgccaagggtcctggaggagacatacctgccgctgcaccacctgcacaaaccgctgaggtacctgcgaaaaagtctaagaagtgagaagcttgctcggtagtgaattctcttataagcagtgattttgaatggtttatgtgatatagctttgtgaaaactctttatttgtcacaaatatgagaacctttgtcagtagttcgtactgtttcaggagacttaattctatcttcaagt

SEQ ID NO: 43807 - protein, 217 aa, Arabidopsis thaliana
  peptide (1)..(217): Ceres Seq. ID no. 12601214
LRQNQGEAKMVSLKLQKRLASSVLKCGKRKVWLDPNEGSDISMANSRQNIRKLVKDGFIIRKPTKIHSRSRARQLNIAKRKGRHSGYGKRKGTREARLPTKVLWMRRMRVLRRLLKKYRETKKIDRHMYHDMYMKVKGNVFKNKRVLMESIHKSKAEKAREKTLSDQFEAKRAKNKASRERKHARREERLAKGPGGDIPAAAPPAQTAEVPAKKSKK

SEQ ID NO: 43808 - protein, 208 aa, Arabidopsis thaliana
  peptide (1)..(208): Ceres Seq. ID no. 12601215
MVSLKLQKRLASSVLKCGKRKVWLDPNEGSDISMANSRQNIRKLVKDGFIIRKPTKIHSRSRARQLNIAKRKGRHSGYGKRKGTREARLPTKVLWMRRMRVLRRLLKKYRETKKIDRHMYHDMYMKVKGNVFKNKRVLMESIHKSKAEKAREKTLSDQFEAKRAKNKASRERKHARREERLAKGPGGDIPAAAPPAQTAEVPAKKSKK

SEQ ID NO: 43809 - protein, 175 aa, Arabidopsis thaliana
  peptide (1)..(175): Ceres Seq. ID no. 12601216
MANSRQNIRKLVKDGFIIRKPTKIHSRSRARQLNIAKRKGRHSGYGKRKGTREARLPTKVLWMRRMRVLRRLLKKYRETKKIDRHMYHDMYMKVKGNVFKNKRVLMESIHKSKAEKAREKTLSDQFEAKRAKNKASRERKHARREERLAKGPGGDIPAAAPPAQTAEVPAKKSKK

SEQ ID NO: 43810 - DNA, 1452 bp, Arabidopsis thaliana
  misc_feature (1)..(1452): Ceres Seq. ID no. 13575593
  misc_feature (1)..(1452): Ortholog of  Ceres SEQ ID NO 13654989 as cited in SEQ ID NO 63117
  misc_feature (1)..(1452): Ortholog of  Ceres SEQ ID NO 13655640 as cited in SEQ ID NO 63844
gagtctaatcaaatgtgccttaatttacaaaaatgacttctcacgactcacgccattaaactccacgtacacctttccctttcactttcatcttcttcttccctcgattcaatgggttatctctcctgcaaagctggatccgccgtcgcaatcgccgtttcatctgccgcatcaacctccggatccacctccagcaaagcttctgctcctcccgaatctcccattgaagaccgtcctagacttcgtcgtttcctccatcgcgatctcgaatcagccacaggaggtttcgacatcaacaatctcctcggacgtggaagccatggaagcgtttacaaagctgtcatcggttcacgtcacatcgcggtcaagagaccttcgaaatctcgagaaatcagccgtgagttccacaacgaattcgagattctctccagaatccgtagccctaggtttgtgaatctcttaggttttagcgccgataactccaaagaaccacttctcgttgttgaattcatgggaaacggaagcttatacgacgtgattcactcagataccgttttaaactccggtgcgatttcgagctggagtaagagaatcaaaatcgctcttcagattgcaaaagccgtacatcttctacattctcaagagacaccgatcatacacagagatataaaatcagcaaacgtattgatggataagaatctaaacgcgaagctaggcgatttcggattagcgatcagatgcaatgttgatgatcaaaaagtgaaatcaacaccacctgcaggaacaatgggttacttagatccagattacgtaacggctgatagattaagcacgaaaactgatgtgtttagcttcgggatcttgttgttagagataatcagcggaagaaaagcaatcgacgttagatattcgccgtcgtttatagtagattgggcgattccgatgataaaaagaggcaaaatcggtgggatttatgatccgagaatcggaccaccgattgatgtaagtgtgaggaatcatttggggttagtggcggctaagtgtgtgagaacgtgtagagagaaacggccggggatggaggaagtggttgggtggctcacggggttgactaagtcggttaggtcacgacggtgggatgagttaagcattggaaacccgtgtatgatggtcgagacggtgggtggtcgacccgtggaatgattttttatttgtttaaaatcaagtgcttcgctttgaagccattgttttttctcttatgggttggtcaatttattcatttaacataataaagcatatactgtaacatcatggttgcatatggtatttgactggatcatcatattcataactaccgcttgttctaaaaacatgccatgtaaagccttttgcactagtgcataactttctcatatcacaagttttttagcatctctttgtagagttggaactttc

SEQ ID NO: 43811 - protein, 362 aa, Arabidopsis thaliana
  peptide (1)..(362): Ceres Seq. ID no. 13575594
MGYLSCKAGSAVAIAVSSAASTSGSTSSKASAPPESPIEDRPRLRRFLHRDLESATGGFDINNLLGRGSHGSVYKAVIGSRHIAVKRPSKSREISREFHNEFEILSRIRSPRFVNLLGFSADNSKEPLLVVEFMGNGSLYDVIHSDTVLNSGAISSWSKRIKIALQIAKAVHLLHSQETPIIHRDIKSANVLMDKNLNAKLGDFGLAIRCNVDDQKVKSTPPAGTMGYLDPDYVTADRLSTKTDVFSFGILLLEIISGRKAIDVRYSPSFIVDWAIPMIKRGKIGGIYDPRIGPPIDVSVRNHLGLVAAKCVRTCREKRPGMEEVVGWLTGLTKSVRSRRWDELSIGNPCMMVETVGGRPVE

SEQ ID NO: 43812 - protein, 229 aa, Arabidopsis thaliana
  peptide (1)..(229): Ceres Seq. ID no. 13575595
MGNGSLYDVIHSDTVLNSGAISSWSKRIKIALQIAKAVHLLHSQETPIIHRDIKSANVLMDKNLNAKLGDFGLAIRCNVDDQKVKSTPPAGTMGYLDPDYVTADRLSTKTDVFSFGILLLEIISGRKAIDVRYSPSFIVDWAIPMIKRGKIGGIYDPRIGPPIDVSVRNHLGLVAAKCVRTCREKRPGMEEVVGWLTGLTKSVRSRRWDELSIGNPCMMVETVGGRPVE

SEQ ID NO: 43813 - DNA, 944 bp, Arabidopsis thaliana
  misc_feature (1)..(944): Ceres Seq. ID no. 13575244
  misc_feature (1)..(944): Ortholog of  Ceres SEQ ID NO 13595658 as cited in SEQ ID NO 59888
  misc_feature (1)..(944): Ortholog of  Ceres SEQ ID NO 13661330 as cited in SEQ ID NO 61614
  misc_feature (1)..(944): Ortholog of  Ceres SEQ ID NO 13596025 as cited in SEQ ID NO 62024
  misc_feature (1)..(944): Ortholog of  Ceres SEQ ID NO 13662324 as cited in SEQ ID NO 62162
  misc_feature (1)..(944): Ortholog of  Ceres SEQ ID NO 12625713 as cited in SEQ ID NO 64160
atcatcatcacccacagcacagagacacacacaaaaaacccataaaaaaatatggcaaatatctccagtattcacattctcttcctcgtgttcatcacaagcggcattgctgttatggccacagacttcactctaaggaacaattgccctaccaccgtctgggccggaactctcgccggtcaaggacccaagctcggcgatggaggatttgaattgactccaggtgcttcccgacagctcacggctcctgcaggatggtcaggccggttctgggctcgtacaggctgcaactttgacgcctccggaaacggtagatgtgtaaccggagactgtggcggtctaagatgtaacggcggcggagttcctcccgtcactctggctgaattcactctagtaggcgatggcggcaaagatttctacgatgtgagcctcgtagatggttacaatgtcaagctggggataagaccatccggaggatcgggagattgcaaatacgcaggctgtgtctctgacctcaacgcggcttgccccgacatgcttaaggtcatggatcagaacaatgtcgtggcctgcaagagtgcctgtgagaggtttaatacggatcaatattgctgccgtggagctaacgataagccggaaacttgtcctcccacggactactcgaggattttcaagaacgcttgccctgacgcctatagctacgcttatgacgacgaaacgagcaccttcacttgtaccggagctaactacgaaatcactttctgcccttaaaaaccgaagcttcgagttagatacagtcgggtttaattatctctcacgtttcttttgcttattatgtacggaaagataaataaggaaagctgatgactatgaatcatcgtcttccacttttaagcttttttagtgagtattagtcagttgttacactcagctgatttgtttac

SEQ ID NO: 43814 - protein, 239 aa, Arabidopsis thaliana
  peptide (1)..(239): Ceres Seq. ID no. 13575245
MANISSIHILFLVFITSGIAVMATDFTLRNNCPTTVWAGTLAGQGPKLGDGGFELTPGASRQLTAPAGWSGRFWARTGCNFDASGNGRCVTGDCGGLRCNGGGVPPVTLAEFTLVGDGGKDFYDVSLVDGYNVKLGIRPSGGSGDCKYAGCVSDLNAACPDMLKVMDQNNVVACKSACERFNTDQYCCRGANDKPETCPPTDYSRIFKNACPDAYSYAYDDETSTFTCTGANYEITFCP

SEQ ID NO: 43815 - protein, 218 aa, Arabidopsis thaliana
  peptide (1)..(218): Ceres Seq. ID no. 13575246
MATDFTLRNNCPTTVWAGTLAGQGPKLGDGGFELTPGASRQLTAPAGWSGRFWARTGCNFDASGNGRCVTGDCGGLRCNGGGVPPVTLAEFTLVGDGGKDFYDVSLVDGYNVKLGIRPSGGSGDCKYAGCVSDLNAACPDMLKVMDQNNVVACKSACERFNTDQYCCRGANDKPETCPPTDYSRIFKNACPDAYSYAYDDETSTFTCTGANYEITFCP

SEQ ID NO: 43816 - DNA, 1211 bp, Arabidopsis thaliana
  misc_feature (1)..(1211): Ceres Seq. ID no. 13576059
  misc_feature (1)..(1211): Ortholog of  Ceres SEQ ID NO 15168549 as cited in SEQ ID NO 56976
  misc_feature (1)..(1211): Ortholog of  Ceres SEQ ID NO 14314335 as cited in SEQ ID NO 57305
acccacatcttctaacagtctctcactttctctcttctctctctctctttcttttttgagtccgtgaaggctaagtctgaaagaatgacgaaggatgagttgacggaggaagagtcgctctccggcaaggactacttagacccaccgcctgtgaagacgttcgaggtgagagagctcaagaagtggtccttctacagagctgtcatcgctgagttcatagctactttgctctttctatacgtgactgttttgacagtcatcggctttaagagccagactgatatcaacgccggcggcggagcttgtgccagtgtcggcctcctaggcatctcttgggcctttggtggcatgatattcatcctcgtctactgcactgccggcatctctggtggacacatcaatcccgcggtgacgtttgggctattcctagctagcaaggtatcattggttagagctgtgtcgtacatggtggctcagtgtctcggagccacttgtggagttggtttggtgaaagtcttccagtcgacttattacaaccgctacggtggtggagccaacatgctctccgacggatacaatgttggcgttggggttggtgctgagattatcggcacttttgtcctcgtctacaccgtcttctccgctaccgaccctaagcgaaatgcccgtgactctcacattcctgtattagcaccattgccaattggattttccgtgttcatggttcatttagccacaattccaattactggcaccggaataaacccggctaggagttttggagctgccgtcatctacaacaatcaaaaggcttgggatgatcagtggatcttctgggtcggtccatttgtgggtgcagccattgcagcattttaccatcagtttgtgttgagagctggtgcaatgaaggcctatgggtcagtcaggagccagcttcatgagctccatgcttaaatttgttatttcgaactagcgaagaggtgaagaattctttgggccaggaagggaggaaggaaaaaaaaaagggacccaaatcatataaaagaaaaaacgaatattatttaagatggtcggtgagtgacatttactgtgtcttatttgtggctttgtgggggaggtttgtgtgtaacaatttgtaacgtacaagcaatgtatgtgttatttgatgcatatgatatttatatatctacttattgatgattctatctttg

SEQ ID NO: 43817 - protein, 289 aa, Arabidopsis thaliana
  peptide (1)..(289): Ceres Seq. ID no. 13576060
MTKDELTEEESLSGKDYLDPPPVKTFEVRELKKWSFYRAVIAEFIATLLFLYVTVLTVIGFKSQTDINAGGGACASVGLLGISWAFGGMIFILVYCTAGISGGHINPAVTFGLFLASKVSLVRAVSYMVAQCLGATCGVGLVKVFQSTYYNRYGGGANMLSDGYNVGVGVGAEIIGTFVLVYTVFSATDPKRNARDSHIPVLAPLPIGFSVFMVHLATIPITGTGINPARSFGAAVIYNNQKAWDDQWIFWVGPFVGAAIAAFYHQFVLRAGAMKAYGSVRSQLHELHA

SEQ ID NO: 43818 - protein, 201 aa, Arabidopsis thaliana
  peptide (1)..(201): Ceres Seq. ID no. 13576061
MIFILVYCTAGISGGHINPAVTFGLFLASKVSLVRAVSYMVAQCLGATCGVGLVKVFQSTYYNRYGGGANMLSDGYNVGVGVGAEIIGTFVLVYTVFSATDPKRNARDSHIPVLAPLPIGFSVFMVHLATIPITGTGINPARSFGAAVIYNNQKAWDDQWIFWVGPFVGAAIAAFYHQFVLRAGAMKAYGSVRSQLHELHA

SEQ ID NO: 43819 - protein, 162 aa, Arabidopsis thaliana
  peptide (1)..(162): Ceres Seq. ID no. 13576062
MVAQCLGATCGVGLVKVFQSTYYNRYGGGANMLSDGYNVGVGVGAEIIGTFVLVYTVFSATDPKRNARDSHIPVLAPLPIGFSVFMVHLATIPITGTGINPARSFGAAVIYNNQKAWDDQWIFWVGPFVGAAIAAFYHQFVLRAGAMKAYGSVRSQLHELHA

SEQ ID NO: 43820 - DNA, 800 bp, Arabidopsis thaliana
  misc_feature (1)..(800): Ceres Seq. ID no. 12559583
  misc_feature (1)..(800): Ortholog of  Ceres SEQ ID NO 15173567 as cited in SEQ ID NO 57612
  misc_feature (1)..(800): Ortholog of  Ceres SEQ ID NO 12611396 as cited in SEQ ID NO 59809
  misc_feature (1)..(800): Ortholog of  Ceres SEQ ID NO 15178140 as cited in SEQ ID NO 0
tcgtcgctgcgtctctctcccgcaaccttcgattttcgtttattcgcatccatcggagagagaaaacaatcaataagcgaccatgttggtgtaccaagatcttctcaccggtgatgagcttctgtctgactctttcccttacaaggagattgagaatggaatcctctgggaagtagaaggaaagtgggttactgtgggagctgtagatgttaacattggtgccaatccatctgctgaagaaggtggtgaggatgaaggtgttaatgactctgctcaaaaggttgttgacattgtcaacaccttcagacttcaggagcaaccaacttatgacaagaagggattcatcgcttacattaagaaatacattaagcttttgacacccaagctcagcgaagaagatcaagctgtcttcaagaagggtattgagggagctaccaagtttttgctccccagctcagtgacttccaattctttgttggggagggtatgcatgatgacagcactttggtctttgcttactacaaggagggttcaactaacccaacatttttgtacttcgctcatggtttgaaggaggtcaagtgctganananaagctctcgttgggttactgtggtcggtcgcagcgactctctaagtttatgtttctttatattgtcctgtgtttcgtcgtcgtcccctattaaaattacctgccagtttacttttctctcttcttgttttctgtgttggaagattctcaagttatttattccgcaaaaaacggtttatcatttacaattagttgaattttggtcgtt

SEQ ID NO: 43821 - protein, 162 aa, Arabidopsis thaliana
  peptide (1)..(162): Ceres Seq. ID no. 12559584
MLVYQDLLTGDELLSDSFPYKEIENGILWEVEGKWVTVGAVDVNIGANPSAEEGGEDEGVNDSAQKVVDIVNTFRLQEQPTYDKKGFIAYIKKYIKLLTPKLSEEDQAVFKKGIEGATKFLLPSSVTSNSLLGRVCMMTALWSLLTTRRVQLTQHFCTSLMV

SEQ ID NO: 43822 - DNA, 1681 bp, Arabidopsis thaliana
  misc_feature (1)..(1681): Ceres Seq. ID no. 13591915
  misc_feature (1)..(1681): Ortholog of  Ceres SEQ ID NO 15176911 as cited in SEQ ID NO 54868
  misc_feature (1)..(1681): Ortholog of  Ceres SEQ ID NO 13596433 as cited in SEQ ID NO 68721
  misc_feature (1)..(1681): Ortholog of  Ceres SEQ ID NO 13599169 as cited in SEQ ID NO 0
aactaactacttttgcattcaccatcgctcttacgtttgaatctatccagatccaaagctcttcttcttcccggcatttctgagatctcattttcaccggcgacgagctttaatcggagaacgatgaagcagcttcacaagcaaatgagctcgaagcgtgatgaagaaaccattcccatgagccaatccagtccttactctcccaaaactttaaagcatcccagatctcttcccagatcgcttcactatctctttcgtgaacaacgactcctctttatcctcgtcgggatcttgatcggatccactttcttcatcctccagccttctctctctcgtttaggcgccgctgagtccacctcgttaatcaccagatctgtttcctacgccgtcaccgattccccgccttccaggtcgacttttaattccggaggcggcggaggtagaaccggtcgtgttcccgtcggtatcggacggaagagactgaggattgttgtcaccggtggagctggtttcgtcggtagtcatcttgttgataagcttatcggtaggggagatgaagtgatcgtgattgataacttcttcactggtaggaaggagaatttggttcatctattctcgaatcctaggtttgagctaattcgacacgatgttgttgagccaatcctccttgaggtcgatcagatttaccatttagcttgtccagcttcacctgttcattacaagtataatccagtcaagactatcaagacaaatgtaatgggcactctcaatatgttgggtcttgcaaagagagttggggcaaggtttctgctcaccagcacaagtgaagtctatggagatccccttgagcatccacagaaagagacttactggggaaacgtgaatccaatcggtgagaggagttgctatgatgaaggaaagcgtactgcagaaaccctggccatggattatcaccgaggtgcaggtgtggaggttagaattgctcgtattttcaacacatatgggcccagaatgtgccttgatgatgggcgtgttgttagtaactttgttgcccagaccattcgcaaacacccaatgactgtttatggtgatggaaaacagactcgtagctttcaatatgtttctgacttggtggagggacttgtagctttaatggaaaacgatcatgtaggacccttcaaccttggtaaccctggagaattcacaatgcttgaacttgcagaggtggttaaggaggtgatcgacccaagcgcgaccatagagttcaaaccaaacacagcagacgatcctcacaagaggaaaccagacataagcaaagcaaaggaacagttgaactgggaaccaaagatatctctgagggagggactgcctcgcatggttagtgacttccgtaaccgaatcttaaacgaagacgaaggtaaaggtctctaagtcagtcacacagagatatagagtataatccttcttctgctttgatttgatatatgtatagtctctttttcaagagctctgctaagtctttttgttctctctgttttttctttttggttctatctccaagacacagattactacttatattagctaatgtttttgacttgggattttgtcattgggccattcaccactaggctcaatattagtggaaaggtattgatataaaatttcgctcggttcatac

SEQ ID NO: 43823 - protein, 435 aa, Arabidopsis thaliana
  peptide (1)..(435): Ceres Seq. ID no. 13591916
MKQLHKQMSSKRDEETIPMSQSSPYSPKTLKHPRSLPRSLHYLFREQRLLFILVGILIGSTFFILQPSLSRLGAAESTSLITRSVSYAVTDSPPSRSTFNSGGGGGRTGRVPVGIGRKRLRIVVTGGAGFVGSHLVDKLIGRGDEVIVIDNFFTGRKENLVHLFSNPRFELIRHDVVEPILLEVDQIYHLACPASPVHYKYNPVKTIKTNVMGTLNMLGLAKRVGARFLLTSTSEVYGDPLEHPQKETYWGNVNPIGERSCYDEGKRTAETLAMDYHRGAGVEVRIARIFNTYGPRMCLDDGRVVSNFVAQTIRKHPMTVYGDGKQTRSFQYVSDLVEGLVALMENDHVGPFNLGNPGEFTMLELAEVVKEVIDPSATIEFKPNTADDPHKRKPDISKAKEQLNWEPKISLREGLPRMVSDFRNRILNEDEGKGL

SEQ ID NO: 43824 - protein, 428 aa, Arabidopsis thaliana
  peptide (1)..(428): Ceres Seq. ID no. 13591917
MSSKRDEETIPMSQSSPYSPKTLKHPRSLPRSLHYLFREQRLLFILVGILIGSTFFILQPSLSRLGAAESTSLITRSVSYAVTDSPPSRSTFNSGGGGGRTGRVPVGIGRKRLRIVVTGGAGFVGSHLVDKLIGRGDEVIVIDNFFTGRKENLVHLFSNPRFELIRHDVVEPILLEVDQIYHLACPASPVHYKYNPVKTIKTNVMGTLNMLGLAKRVGARFLLTSTSEVYGDPLEHPQKETYWGNVNPIGERSCYDEGKRTAETLAMDYHRGAGVEVRIARIFNTYGPRMCLDDGRVVSNFVAQTIRKHPMTVYGDGKQTRSFQYVSDLVEGLVALMENDHVGPFNLGNPGEFTMLELAEVVKEVIDPSATIEFKPNTADDPHKRKPDISKAKEQLNWEPKISLREGLPRMVSDFRNRILNEDEGKGL

SEQ ID NO: 43825 - protein, 417 aa, Arabidopsis thaliana
  peptide (1)..(417): Ceres Seq. ID no. 13591918
MSQSSPYSPKTLKHPRSLPRSLHYLFREQRLLFILVGILIGSTFFILQPSLSRLGAAESTSLITRSVSYAVTDSPPSRSTFNSGGGGGRTGRVPVGIGRKRLRIVVTGGAGFVGSHLVDKLIGRGDEVIVIDNFFTGRKENLVHLFSNPRFELIRHDVVEPILLEVDQIYHLACPASPVHYKYNPVKTIKTNVMGTLNMLGLAKRVGARFLLTSTSEVYGDPLEHPQKETYWGNVNPIGERSCYDEGKRTAETLAMDYHRGAGVEVRIARIFNTYGPRMCLDDGRVVSNFVAQTIRKHPMTVYGDGKQTRSFQYVSDLVEGLVALMENDHVGPFNLGNPGEFTMLELAEVVKEVIDPSATIEFKPNTADDPHKRKPDISKAKEQLNWEPKISLREGLPRMVSDFRNRILNEDEGKGL

SEQ ID NO: 43826 - DNA, 2262 bp, Arabidopsis thaliana
  misc_feature (1)..(2262): Ceres Seq. ID no. 12558781
  misc_feature (1)..(2262): Ortholog of  Ceres SEQ ID NO 14303043 as cited in SEQ ID NO 67110
aactgtggatgagtctctctaaaaccttggcttccttcgacttcttctgttttctccggcaatgtcgttaaaactcaacactccttttccaattttcgcgccatctctatttcctaatcataacccaagagcacccagcgagatccgattctctagatggggcaacgctaatgccgaacggttcgagcagcgtcgccggagccaagaagaactcgaggctgagatccgtcgggaccgccgattcgacgccgctactaaaatcgtccatacccatgattccgaagcagcagctgctgagcctaaaacgtcaccgtttagatcaagaggcactccttcacttccctctgctcgttcgattccgggtcgaagatccaaatactccaaacccgattcaggacccaatagacccaagaacaaacctagagtacccgattcgccgccgcaactagacgctaagcctgaggttaagctaagcgaagatggattaacttacgtcatcaatggagctcctttcgaattcaagtacagttacacggagacgccaaaggttaagcctttgaagcttcgtgagcctgcttacgcgccttttggacctacgactatgggaaggccatggactggtcgtgctccgcttcctcagtcgcagaagacgccgagagaattcgattcttttcgattgcctcctgtggggaagaaagggctgaagccggtgcagaaaccgggtccttttcgacccggggtaggtccaaggtatgtttactccaaggaggagattttaggagagccattgacaaaggaagaggtcagagagctggttacttcttgcttgaagacaacaaggcaattgaatatgggcagagatggtttgacgcataacatgttgaacaacatacatgatctatggaagcggcgaagggtttgtaagattaaatgcaaaggagtttgtacagtcgatatggataatgtttgcgagcagttagaggagaaaattggtgggaaggtgatatatagaagaggaggtgtgcttttcctattccgtggcagaaactataaccacaggacaagaccgcggttccctcttatgttgtggaagcctgtagcacctgtttatccaaggctaattcaacaagtgcctgagggtttaactcgtcaggaagctaccaatatgcggaggaaaggacgagagctcatgcccatttgcaagctagggaagaatggtgtgtattgtgatcttgtgaaaaatgttaaagaagcatttgaagtttgtgaattggttcggatcgattgtcaagggatgaaaggcagtgattttaggaaaatcggtgccaaactcaaggatcttgttccatgtgtgctcgtatcttttgaaaacgagcagattcttatctggagaggacgagaatggaaatcgtctctcacaactccagataaaaagggtgatatccttgaagatatcgaagttgatactgccttgccagaagatgacgaaccatcggtgtcaccaaatcagagtcaaactatgacccagaaccctcctctggattctatggaactgcaaaatgatccagatggtcacgatttgagcccttcaactgtagattcctcggaaatggaaggcacaatcaattctttacagagctggtctacaaaagatgtaactgagccaacggtagatagttttcttcgagaccttgaagaacctgaagacgaaccagaaacatcggaagagatcagcaaacaaagcatagagagagttctgattttgatgaaacaagctgtggagagcgggactgcacttgtgttagatgctgctgatctggacgcagacacagtcttttcaaaagctgttgccttttcgagtgtagcttcaccaggaccagttttccagcatggcttgagaaaacaaccaacggttaagaagcaggaaagccaagaattcgggtacggagacttggaggcaaaatcaagtaatgtagtggtttctaggaatgcttccaaatcaagtaatgttgtggtttttgggaaaagagaagttgcagagaggggggaaagagaggagaaggaggagggatcgaagaagaaaatggacgagtttgctgaagattacagagaagtgatgccgcatggaacattgaaggtagatgaactagctaaactacttgcataatgaaattttgtgtatgtatttgttgactagtgtataatgtagtctaatcatcattgtcaaaagtgtaatagctttttagaaattggaaaagttat

SEQ ID NO: 43827 - protein, 701 aa, Arabidopsis thaliana
  peptide (1)..(701): Ceres Seq. ID no. 12558782
MSLKLNTPFPIFAPSLFPNHNPRAPSEIRFSRWGNANAERFEQRRRSQEELEAEIRRDRRFDAATKIVHTHDSEAAAAEPKTSPFRSRGTPSLPSARSIPGRRSKYSKPDSGPNRPKNKPRVPDSPPQLDAKPEVKLSEDGLTYVINGAPFEFKYSYTETPKVKPLKLREPAYAPFGPTTMGRPWTGRAPLPQSQKTPREFDSFRLPPVGKKGLKPVQKPGPFRPGVGPRYVYSKEEILGEPLTKEEVRELVTSCLKTTRQLNMGRDGLTHNMLNNIHDLWKRRRVCKIKCKGVCTVDMDNVCEQLEEKIGGKVIYRRGGVLFLFRGRNYNHRTRPRFPLMLWKPVAPVYPRLIQQVPEGLTRQEATNMRRKGRELMPICKLGKNGVYCDLVKNVKEAFEVCELVRIDCQGMKGSDFRKIGAKLKDLVPCVLVSFENEQILIWRGREWKSSLTTPDKKGDILEDIEVDTALPEDDEPSVSPNQSQTMTQNPPLDSMELQNDPDGHDLSPSTVDSSEMEGTINSLQSWSTKDVTEPTVDSFLRDLEEPEDEPETSEEISKQSIERVLILMKQAVESGTALVLDAADLDADTVFSKAVAFSSVASPGPVFQHGLRKQPTVKKQESQEFGYGDLEAKSSNVVVSRNASKSSNVVVFGKREVAERGEREEKEEGSKKKMDEFAEDYREVMPHGTLKVDELAKLLA

SEQ ID NO: 43828 - protein, 521 aa, Arabidopsis thaliana
  peptide (1)..(521): Ceres Seq. ID no. 12558783
MGRPWTGRAPLPQSQKTPREFDSFRLPPVGKKGLKPVQKPGPFRPGVGPRYVYSKEEILGEPLTKEEVRELVTSCLKTTRQLNMGRDGLTHNMLNNIHDLWKRRRVCKIKCKGVCTVDMDNVCEQLEEKIGGKVIYRRGGVLFLFRGRNYNHRTRPRFPLMLWKPVAPVYPRLIQQVPEGLTRQEATNMRRKGRELMPICKLGKNGVYCDLVKNVKEAFEVCELVRIDCQGMKGSDFRKIGAKLKDLVPCVLVSFENEQILIWRGREWKSSLTTPDKKGDILEDIEVDTALPEDDEPSVSPNQSQTMTQNPPLDSMELQNDPDGHDLSPSTVDSSEMEGTINSLQSWSTKDVTEPTVDSFLRDLEEPEDEPETSEEISKQSIERVLILMKQAVESGTALVLDAADLDADTVFSKAVAFSSVASPGPVFQHGLRKQPTVKKQESQEFGYGDLEAKSSNVVVSRNASKSSNVVVFGKREVAERGEREEKEEGSKKKMDEFAEDYREVMPHGTLKVDELAKLLA

SEQ ID NO: 43829 - protein, 438 aa, Arabidopsis thaliana
  peptide (1)..(438): Ceres Seq. ID no. 12558784
MGRDGLTHNMLNNIHDLWKRRRVCKIKCKGVCTVDMDNVCEQLEEKIGGKVIYRRGGVLFLFRGRNYNHRTRPRFPLMLWKPVAPVYPRLIQQVPEGLTRQEATNMRRKGRELMPICKLGKNGVYCDLVKNVKEAFEVCELVRIDCQGMKGSDFRKIGAKLKDLVPCVLVSFENEQILIWRGREWKSSLTTPDKKGDILEDIEVDTALPEDDEPSVSPNQSQTMTQNPPLDSMELQNDPDGHDLSPSTVDSSEMEGTINSLQSWSTKDVTEPTVDSFLRDLEEPEDEPETSEEISKQSIERVLILMKQAVESGTALVLDAADLDADTVFSKAVAFSSVASPGPVFQHGLRKQPTVKKQESQEFGYGDLEAKSSNVVVSRNASKSSNVVVFGKREVAERGEREEKEEGSKKKMDEFAEDYREVMPHGTLKVDELAKLLA

SEQ ID NO: 43830 - DNA, 1776 bp, Arabidopsis thaliana
  misc_feature (1)..(1776): Ceres Seq. ID no. 13576533
  misc_feature (1)..(1776): Ortholog of  Ceres SEQ ID NO 14308370 as cited in SEQ ID NO 55399
gaagactttggttcctccctaatctctctctctctctctctttttcacttcactctcttcttccccatcgaaggctcgtcttcttctgcttcaatggccgaatttccagaaccgggcactgtaaaccctgactcggatctatcgaatggtcgagctgagaagcctgagatagacacttcggctccgttcgagtcagtgagagaagcagccactcgttttggcggttttggtttctggagaccttctctcaataaactcccagatgcttctcaggaaaatatccaagaacctgatatcatgggactcaaagcacaagctttcgagctacaaagagaactaattgttaaagaacgcgaaacgctagaggtgttgaaggagcttgaggcgactaaagccacagtcttaaagctgcagcagaggaatgaagcttatgaggaggacacgttgagagaagaagttgacagtcatatcaagccagcgggtgtggttctaaaggatttaagccaggcgaagatgaatttgtgcaagattgcaagtatacgcgaatctgtggagcagttgaagaataaactgaatgaggaaagagctgcacttgagaagacacgcgagagacttatggagaaatctctcaaggtgttttctttagaggaagaagaagtgagagtaagatttgccaaggagggtcaaaccggcgagaaagatcttggaatgttgaatgaggttcaaagattgagccgtcaagctcaagaggtgaagaaaaccggagagaatgcagagttggaagttgtgaaagcaatggctgagactgaaagcacaagagataagattagaacagctaagataaggttggtggctgctagaaagatgaaggaagcggccagagaggctgaggcggttgcaatcgcagagattgaggctgttactggaagtatgaatgttggtaaggccgaggctgtgactatctctgctgaagagtattctgtgcttgctcgtagtgctagagacgcagaggaagaggcgagaaagcgagtggaagatgcaatgtcgagagttgaagaagctaatgtttcaaagaaggatgttctgaagaaagttgacgaagcggctcaagaaattgaaaccagcaagagagtattggaggaagctgtggagagagttgacgctgcaaatgcttcgaagatcgaagcagaagaggcgctgcgaaaatggcggtcagagaatggacagaggagaagattatcttcttcggtgaacaacacttccaagttcaagagcagaagagagacaacaacacgtctgatggatgtaaacggtctgcatctgacatacgatgttgttgacgggtcatcatcttcttcaacggtcccagtcttgaaaccaacaatgtcaataggacaaatactgagcaagaagctacttcttgcagaggattcagatatgaatgttgctaatgagtgaagaaaaatgtcgttgggtcagatgcttgcaaagaatagcagtagtgataaaactgtaagcaagagaagtgaagggaaagagaatgagaaaaggacgaagactcgaaagagaaagagtttcggatttgctaagatctctgtgttgttgaacaaagagagcaagaacaagaagaagaagaaaaagatagctttgaacttaaggtgatattttgaatctgttgatgacttctttctgttttgtacgtgaaccagtagtttaagaaaacaaagtgtatcatcaagtgctttattataatgctaatctaggctaattaatccc

SEQ ID NO: 43831 - protein, 485 aa, Arabidopsis thaliana
  peptide (1)..(485): Ceres Seq. ID no. 13576534
EDFGSSLISLSLSLFHFTLFFPIEGSSSSASMAEFPEPGTVNPDSDLSNGRAEKPEIDTSAPFESVREAATRFGGFGFWRPSLNKLPDASQENIQEPDIMGLKAQAFELQRELIVKERETLEVLKELEATKATVLKLQQRNEAYEEDTLREEVDSHIKPAGVVLKDLSQAKMNLCKIASIRESVEQLKNKLNEERAALEKTRERLMEKSLKVFSLEEEEVRVRFAKEGQTGEKDLGMLNEVQRLSRQAQEVKKTGENAELEVVKAMAETESTRDKIRTAKIRLVAARKMKEAAREAEAVAIAEIEAVTGSMNVGKAEAVTISAEEYSVLARSARDAEEEARKRVEDAMSRVEEANVSKKDVLKKVDEAAQEIETSKRVLEEAVERVDAANASKIEAEEALRKWRSENGQRRRLSSSVNNTSKFKSRRETTTRLMDVNGLHLTYDVVDGSSSSSTVPVLKPTMSIGQILSKKLLLAEDSDMNVANE

SEQ ID NO: 43832 - protein, 454 aa, Arabidopsis thaliana
  peptide (1)..(454): Ceres Seq. ID no. 13576535
MAEFPEPGTVNPDSDLSNGRAEKPEIDTSAPFESVREAATRFGGFGFWRPSLNKLPDASQENIQEPDIMGLKAQAFELQRELIVKERETLEVLKELEATKATVLKLQQRNEAYEEDTLREEVDSHIKPAGVVLKDLSQAKMNLCKIASIRESVEQLKNKLNEERAALEKTRERLMEKSLKVFSLEEEEVRVRFAKEGQTGEKDLGMLNEVQRLSRQAQEVKKTGENAELEVVKAMAETESTRDKIRTAKIRLVAARKMKEAAREAEAVAIAEIEAVTGSMNVGKAEAVTISAEEYSVLARSARDAEEEARKRVEDAMSRVEEANVSKKDVLKKVDEAAQEIETSKRVLEEAVERVDAANASKIEAEEALRKWRSENGQRRRLSSSVNNTSKFKSRRETTTRLMDVNGLHLTYDVVDGSSSSSTVPVLKPTMSIGQILSKKLLLAEDSDMNVANE

SEQ ID NO: 43833 - protein, 386 aa, Arabidopsis thaliana
  peptide (1)..(386): Ceres Seq. ID no. 13576536
MGLKAQAFELQRELIVKERETLEVLKELEATKATVLKLQQRNEAYEEDTLREEVDSHIKPAGVVLKDLSQAKMNLCKIASIRESVEQLKNKLNEERAALEKTRERLMEKSLKVFSLEEEEVRVRFAKEGQTGEKDLGMLNEVQRLSRQAQEVKKTGENAELEVVKAMAETESTRDKIRTAKIRLVAARKMKEAAREAEAVAIAEIEAVTGSMNVGKAEAVTISAEEYSVLARSARDAEEEARKRVEDAMSRVEEANVSKKDVLKKVDEAAQEIETSKRVLEEAVERVDAANASKIEAEEALRKWRSENGQRRRLSSSVNNTSKFKSRRETTTRLMDVNGLHLTYDVVDGSSSSSTVPVLKPTMSIGQILSKKLLLAEDSDMNVANE

SEQ ID NO: 43834 - DNA, 1707 bp, Arabidopsis thaliana; identical to SEQ ID NO: 26975
  misc_feature (1)..(1707): Ceres Seq. ID no. 13489655
  misc_feature (1)..(1707): Ortholog of  Ceres SEQ ID NO 13581273 as cited in SEQ ID NO 54551
  misc_feature (1)..(1707): Ortholog of  Ceres SEQ ID NO 13594209 as cited in SEQ ID NO 59089
  misc_feature (1)..(1707): Ortholog of  Ceres SEQ ID NO 14306857 as cited in SEQ ID NO 60035
  misc_feature (1)..(1707): Ortholog of  Ceres SEQ ID NO 13502874 as cited in SEQ ID NO 66298
  misc_feature (1)..(1707): Ortholog of  Ceres SEQ ID NO 12614124 as cited in SEQ ID NO 68392

SEQ ID NO: 43835 - protein, 514 aa, Arabidopsis thaliana; identical to SEQ ID NO: 26976
  peptide (1)..(514): Ceres Seq. ID no. 13489656

SEQ ID NO: 43836 - protein, 492 aa, Arabidopsis thaliana; identical to SEQ ID NO: 26977
  peptide (1)..(492): Ceres Seq. ID no. 13489657

SEQ ID NO: 43837 - protein, 319 aa, Arabidopsis thaliana; identical to SEQ ID NO: 26978
  peptide (1)..(319): Ceres Seq. ID no. 13489658

SEQ ID NO: 43838 - DNA, 776 bp, Arabidopsis thaliana; identical to SEQ ID NO: 36257
  misc_feature (1)..(776): Ceres Seq. ID no. 12602631
  misc_feature (1)..(776): Ortholog of  Ceres SEQ ID NO 15225657 as cited in SEQ ID NO 329

SEQ ID NO: 43839 - protein, 103 aa, Arabidopsis thaliana; identical to SEQ ID NO: 36258
  peptide (1)..(103): Ceres Seq. ID no. 12602632

SEQ ID NO: 43840 - protein, 89 aa, Arabidopsis thaliana; identical to SEQ ID NO: 36259
  peptide (1)..(89): Ceres Seq. ID no. 12602633

SEQ ID NO: 43841 - protein, 87 aa, Arabidopsis thaliana; identical to SEQ ID NO: 36260
  peptide (1)..(87): Ceres Seq. ID no. 12602634

SEQ ID NO: 43842 - DNA, 1335 bp, Arabidopsis thaliana; identical to SEQ ID NO: 35578
  misc_feature (1)..(1335): Ceres Seq. ID no. 13490506
  misc_feature (1)..(1335): Ortholog of  Ceres SEQ ID NO 12636774 as cited in SEQ ID NO 372
  misc_feature (1)..(1335): Ortholog of  Ceres SEQ ID NO 13582350 as cited in SEQ ID NO 56734
  misc_feature (1)..(1335): Ortholog of  Ceres SEQ ID NO 12476493 as cited in SEQ ID NO 58163
  misc_feature (1)..(1335): Ortholog of  Ceres SEQ ID NO 12615466 as cited in SEQ ID NO 62761
  misc_feature (1)..(1335): Ortholog of  Ceres SEQ ID NO 13597295 as cited in SEQ ID NO 63743
  misc_feature (1)..(1335): Ortholog of  Ceres SEQ ID NO 12617090 as cited in SEQ ID NO 64005
  misc_feature (1)..(1335): Ortholog of  Ceres SEQ ID NO 15226458 as cited in SEQ ID NO 64042
  misc_feature (1)..(1335): Ortholog of  Ceres SEQ ID NO 13597439 as cited in SEQ ID NO 64081
  misc_feature (1)..(1335): Ortholog of  Ceres SEQ ID NO 13597233 as cited in SEQ ID NO 64370
  misc_feature (1)..(1335): Ortholog of  Ceres SEQ ID NO 13598327 as cited in SEQ ID NO 68040
  misc_feature (1)..(1335): Ortholog of  Ceres SEQ ID NO 13599438 as cited in SEQ ID NO 0

SEQ ID NO: 43843 - protein, 353 aa, Arabidopsis thaliana; identical to SEQ ID NO: 35579
  peptide (1)..(353): Ceres Seq. ID no. 13490507

SEQ ID NO: 43844 - protein, 336 aa, Arabidopsis thaliana; identical to SEQ ID NO: 35580
  peptide (1)..(336): Ceres Seq. ID no. 13490508

SEQ ID NO: 43845 - DNA, 946 bp, Arabidopsis thaliana
  misc_feature (1)..(946): Ceres Seq. ID no. 12562112
  misc_feature (1)..(946): Ortholog of  Ceres SEQ ID NO 15175441 as cited in SEQ ID NO 62550
gctcttctccttcacggcgaagtgactcacttccatggattcctctctgctctcggcggctacggccgataccttcaacggcaatgcggcggatcaaattcctcctccgttacagcctccgggaacggatatgactggaatttccttcagggatcagctctggatcaattcataccctcttgatcgtaactacatcttcgattacttcgctttgtctcctttctacgatacaacttgcaacaatgagattcttcggagaagatccattcaccctctcgatctctctcacctctcgaagatgacaggtctagaatatatgttaactgatgctactgaaccaaacctgttcgtctttcgtaagcaaaagagagatggtcctgagaaagtcacaccgatgctaacatattatatcttggatggttctatttaccaagctcctcagctttgtagtgtcttcgcagctcgagttagtcggactatttataatatatccaaggctttcactgatgctgcatcgaaattggagaccattagacaagttgatactgaaaaccagaacgaacctgctgagtcgaagcctgctagtgagacagttgatctaaaggaaatgaagcgagtcgatgtcattcttacctcattatatcgcaagttagcgccaccacctccacccccaccctttcctgaaggttatgttagccaagaagcattaggagaaaaggaagagcttggaacacagggaggagagtcacaaccgcctcaagttgatccaattatcgatcaaggtcctgctaaaagaatgaagttctaagctcatcaaaattgtttcttcatctatgcatgtatagaatttttaggtactagcaaaggctcttctactttttcgcattgtttaatctgaactccttacacaattgttgacatgattacttctcataaagtttcgcat

SEQ ID NO: 43846 - protein, 257 aa, Arabidopsis thaliana
  peptide (1)..(257): Ceres Seq. ID no. 12562113
MDSSLLSAATADTFNGNAADQIPPPLQPPGTDMTGISFRDQLWINSYPLDRNYIFDYFALSPFYDTTCNNEILRRRSIHPLDLSHLSKMTGLEYMLTDATEPNLFVFRKQKRDGPEKVTPMLTYYILDGSIYQAPQLCSVFAARVSRTIYNISKAFTDAASKLETIRQVDTENQNEPAESKPASETVDLKEMKRVDVILTSLYRKLAPPPPPPPFPEGYVSQEALGEKEELGTQGGESQPPQVDPIIDQGPAKRMKF

SEQ ID NO: 43847 - protein, 225 aa, Arabidopsis thaliana
  peptide (1)..(225): Ceres Seq. ID no. 12562114
MTGISFRDQLWINSYPLDRNYIFDYFALSPFYDTTCNNEILRRRSIHPLDLSHLSKMTGLEYMLTDATEPNLFVFRKQKRDGPEKVTPMLTYYILDGSIYQAPQLCSVFAARVSRTIYNISKAFTDAASKLETIRQVDTENQNEPAESKPASETVDLKEMKRVDVILTSLYRKLAPPPPPPPFPEGYVSQEALGEKEELGTQGGESQPPQVDPIIDQGPAKRMKF

SEQ ID NO: 43848 - protein, 169 aa, Arabidopsis thaliana
  peptide (1)..(169): Ceres Seq. ID no. 12562115
MTGLEYMLTDATEPNLFVFRKQKRDGPEKVTPMLTYYILDGSIYQAPQLCSVFAARVSRTIYNISKAFTDAASKLETIRQVDTENQNEPAESKPASETVDLKEMKRVDVILTSLYRKLAPPPPPPPFPEGYVSQEALGEKEELGTQGGESQPPQVDPIIDQGPAKRMKF

SEQ ID NO: 43849 - DNA, 1018 bp, Arabidopsis thaliana; identical to SEQ ID NO: 21544
  misc_feature (1)..(1018): Ceres Seq. ID no. 12602461
  misc_feature (1)..(1018): Ortholog of  Ceres SEQ ID NO 14304626 as cited in SEQ ID NO 52955

SEQ ID NO: 43850 - protein, 185 aa, Arabidopsis thaliana [sequence omitted]

SEQ ID NO: 43851 - DNA, 920 bp, Arabidopsis thaliana; identical to SEQ ID NO: 42580
  misc_feature (1)..(920): Ceres Seq. ID no. 12339008
  misc_feature (1)..(920): Ortholog of  Ceres SEQ ID NO 14311659 as cited in SEQ ID NO 51212
  misc_feature (1)..(920): Ortholog of  Ceres SEQ ID NO 12635180 as cited in SEQ ID NO 0

SEQ ID NO: 43852 - protein, 266 aa, Arabidopsis thaliana; identical to SEQ ID NO: 42581
  peptide (1)..(266): Ceres Seq. ID no. 12339009

SEQ ID NO: 43853 - protein, 255 aa, Arabidopsis thaliana; identical to SEQ ID NO: 42582
  peptide (1)..(255): Ceres Seq. ID no. 12339010

SEQ ID NO: 43854 - DNA, 867 bp, Arabidopsis thaliana
  misc_feature (1)..(867): Ceres Seq. ID no. 12559066
  misc_feature (1)..(867): Ortholog of  Ceres SEQ ID NO 15173284 as cited in SEQ ID NO 61828
  misc_feature (1)..(867): Ortholog of  Ceres SEQ ID NO 15178906 as cited in SEQ ID NO 0
tcttctcctgaatctctttacctttttacgttgacattgatcctcgcagtgtctgattttgatcgaagaagaagaagagatcgggattttttcgcggttgtatatcgcctatggacgaggtgatgacagcggcggacgttggttcgttaggtggcggcaatagggcgttgtacggatctcctccgtcgcataatctgtttcctcacaatctcccaatcttctccgcttttcttgccttcgctcttgctcagttcctcaaagtcttcactaattggtacaaagaaaagaggtgggactctaaacgtatgattagttctggtggaatgccttcttctcattctgctactgtcactgccttagctgttgccattggctttgaagaaggagctggagcaccagcttttgctattgcagttgtcttggcttgcgttgttatgtatgatgcctctggtgtcaggcttcatgctggtcgtcaagccgagctgctgaatcaaattgtttgtgagtttcctccggagcatccattatcaacagttagaccattgcgtgaactgcttggccacactcctatccaggttgcagcaggtgggattttaggatgcgtggtagcttacttaatgaggagctcaagctagtcagtctctctacacaagaacaaatcccgaattcttttgaaatcatagacccttcaggtactaagatagattcagcgatatcaagtgacgctagattattggagtaaatggaaattgttaaatctgtgtaatatatagatgatcttagttagacttgtcattgtttaagcttacgccttctcaacattctctctctctctatatatatatatataatctctctatttcctct

SEQ ID NO: 43855 - protein, 174 aa, Arabidopsis thaliana
  peptide (1)..(174): Ceres Seq. ID no. 12559067
MDEVMTAADVGSLGGGNRALYGSPPSHNLFPHNLPIFSAFLAFALAQFLKVFTNWYKEKRWDSKRMISSGGMPSSHSATVTALAVAIGFEEGAGAPAFAIAVVLACVVMYDASGVRLHAGRQAELLNQIVCEFPPEHPLSTVRPLRELLGHTPIQVAAGGILGCVVAYLMRSSS

SEQ ID NO: 43856 - protein, 170 aa, Arabidopsis thaliana
  peptide (1)..(170): Ceres Seq. ID no. 12559068
MTAADVGSLGGGNRALYGSPPSHNLFPHNLPIFSAFLAFALAQFLKVFTNWYKEKRWDSKRMISSGGMPSSHSATVTALAVAIGFEEGAGAPAFAIAVVLACVVMYDASGVRLHAGRQAELLNQIVCEFPPEHPLSTVRPLRELLGHTPIQVAAGGILGCVVAYLMRSSS

SEQ ID NO: 43857 - protein, 109 aa, Arabidopsis thaliana
  peptide (1)..(109): Ceres Seq. ID no. 12559069
MISSGGMPSSHSATVTALAVAIGFEEGAGAPAFAIAVVLACVVMYDASGVRLHAGRQAELLNQIVCEFPPEHPLSTVRPLRELLGHTPIQVAAGGILGCVVAYLMRSSS

SEQ ID NO: 43858 - DNA, 1035 bp, Arabidopsis thaliana
  misc_feature (1)..(1035): Ceres Seq. ID no. 13592062
  misc_feature (1)..(1035): Ortholog of  Ceres SEQ ID NO 13598589 as cited in SEQ ID NO 65254
aagccagttctcggagcaatcaaatctataagaaaagaatcgtcgccggtgaagagaaaaaaccatagaagcgatggatccgcagctaactgaagtttcacagcagttcgagagattcaaggcggcgtttgcgaggaaggattacaatacctgtagcgatctgttgtctcagcttaaggttcttcttaccaaattcacaagtcttcctccattgttcgagaattcacctaatgcagccaaggaattgactattgcaagggacatttatgagcatgctgttgttctaagcgtcaaaaccgaggatcaagatgcttttgagagagatttcttccagctgaaaccttactatgtggatgccaggaaccgtattcctcagtctccacaggagaatcttatcctgggtcttaaccttctgaggctgctggtacaaaatagaattgctgaattccacaccgagcttgaattactttcatcagctacactagaggatccttgcatcaagcatgcagtagagcttgagcaatccttcatggagggtgcctataaccgtgtgttgagtgctagacagaccgcgcctgatgcaacttacgtctatttcatggatctcttggcaaagaccataagagatgaaatagctggatgcagcgagaaagcttatgattatgtctctatcagcgatgcccggcagatgttgttgttctcttctgatcaagaactcttaacctatgtcacagatgagcatcctgagtgggaagtgaaggaagggtttgttgtcttccagaaagccaaagaaactgcaccgtgcaaagagattccgtctctgcaactcatcaaccagactctaagctacgccagagagctggagcgtatcgtgtaagattcgacttttctcactgcttgtctcttctcttctgttatgttcctggaaatctctgggtcagaaaactttgttatcatgtaatgaccgatattgagcgactcagtattttctccgggtcaatgagactttgttgtgatatcaatctgtttttccat

SEQ ID NO: 43859 - protein, 267 aa, Arabidopsis thaliana [sequence omitted]

SEQ ID NO: 43860 - DNA, 1762 bp, Arabidopsis thaliana
  misc_feature (1)..(1762): Ceres Seq. ID no. 12576067
  misc_feature (1)..(1762): Ortholog of  Ceres SEQ ID NO 13597574 as cited in SEQ ID NO 64677
  misc_feature (1)..(1762): Ortholog of  Ceres SEQ ID NO 13597843 as cited in SEQ ID NO 64850
  misc_feature (1)..(1762): Ortholog of  Ceres SEQ ID NO 13597678 as cited in SEQ ID NO 65375
  misc_feature (1)..(1762): Ortholog of  Ceres SEQ ID NO 13596180 as cited in SEQ ID NO 67941
  misc_feature (1)..(1762): Ortholog of  Ceres SEQ ID NO 13591190 as cited in SEQ ID NO 68044
  misc_feature (1)..(1762): Ortholog of  Ceres SEQ ID NO 13595961 as cited in SEQ ID NO 68223
agtatagaaacgtttaaaaacatacaacaaacttttatcatctctttttgtgacaggcccacactatcaattcgaaaagtctaaacaaaagtcgccgtcatgaaagtagaacttgtgttcataccatcgccgggcgttggccatatccgagcaacaacggcgttagcaaagcttctcgttgccagcgacaaccgcctctccgtcactctcatcgtcattccttcacgagtctccgacgacgcttcttcctccgtctacacgaactccgaagaccgtctccgctacatcctcctccccgcccgagatcaaactactgatctcgtatcttacatcgacagccagaaaccacaagtaagagccgtcgtgtccaaggtcgctggagatgtttcaacacgttcagactcacggctagctgggattgtcgtagacatgttctgcacgtccatgatagacatcgccgatgagtttaacctctcggcttatatcttctacacgtccaacgcttcttatctcgggctacagttccacgttcaatctctttacgacgagaaagaactcgacgtaagtgagttcaaagatacggagatgaagtttgacgttccaactctgactcagccttttccggcaaaatgtttgccttcagtgatgctaaacaagaaatggtttccttacgttttgggtcgagctagaagttttagagcaacgaagggtattttggtaaattcggtggctgacatggaacctcaggcgttgagtttcttttccggtggaaatgggaatacaaatatccctccggtgtacgcggttgggcccattatggacttagaatctagcggcgatgaagagaagagaaaggagattttacattggctaaaagagcaaccgacgaaatctgtagtgtttctctgttttgggagcatgggaggtttcagtgaggaacaagcaagagaaatagctgtggcgctcgagcgaagcggacacaggtttctctggtcgcttcgccgcgcttctcctgttggaaacaagtctaatcctcctcccggagaattcacgaacttagaggagattcttccaaaagggtttttagatcggacggtggagatagggaagatcataagctgggcaccacaagtagatgtgttgaatagtcctgctataggagcgttcgtgacacattgtggatggaactcaattctcgagagtctttggttcggtgttccgatggcggcgtggcctatctatgctgagcaacagtttaacgcgtttcatatggtggatgagcttggtttagcggcggaggtaaagaaggagtaccgtagagattttctggtggaggagccggagattgtgacggctgatgagatagagagagggatcaagtgtgcgatggagcaggatagcaagatgaggaagagggtgatggagatgaaggataagctccacgtggcgttggtggacggtggatcttcgaactgtgctctaaagaagtttgttcaagacgtggtcgataatgttccataatccataggaacgtgctcgataatgtaccataggaacatggttgggtgttttgtgatagaataatgggaatcttttaaaaggactatgatgacatgattgaaaacaaccagtctgaaagtataataatagttacgtgtacttttgtctattaagcaaaataatgcaatttacgtttcggtaagattgtaagaaaagaaatgcagtttatgtctaaacaatctatttatattttgttatctgc

SEQ ID NO: 43861 - protein, 473 aa, Arabidopsis thaliana
  peptide (1)..(473): Ceres Seq. ID no. 12576068
MKVELVFIPSPGVGHIRATTALAKLLVASDNRLSVTLIVIPSRVSDDASSSVYTNSEDRLRYILLPARDQTTDLVSYIDSQKPQVRAVVSKVAGDVSTRSDSRLAGIVVDMFCTSMIDIADEFNLSAYIFYTSNASYLGLQFHVQSLYDEKELDVSEFKDTEMKFDVPTLTQPFPAKCLPSVMLNKKWFPYVLGRARSFRATKGILVNSVADMEPQALSFFSGGNGNTNIPPVYAVGPIMDLESSGDEEKRKEILHWLKEQPTKSVVFLCFGSMGGFSEEQAREIAVALERSGHRFLWSLRRASPVGNKSNPPPGEFTNLEEILPKGFLDRTVEIGKIISWAPQVDVLNSPAIGAFVTHCGWNSILESLWFGVPMAAWPIYAEQQFNAFHMVDELGLAAEVKKEYRRDFLVEEPEIVTADEIERGIKCAMEQDSKMRKRVMEMKDKLHVALVDGGSSNCALKKFVQDVVDNVP

SEQ ID NO: 43862 - protein, 363 aa, Arabidopsis thaliana
  peptide (1)..(363): Ceres Seq. ID no. 12576069
MFCTSMIDIADEFNLSAYIFYTSNASYLGLQFHVQSLYDEKELDVSEFKDTEMKFDVPTLTQPFPAKCLPSVMLNKKWFPYVLGRARSFRATKGILVNSVADMEPQALSFFSGGNGNTNIPPVYAVGPIMDLESSGDEEKRKEILHWLKEQPTKSVVFLCFGSMGGFSEEQAREIAVALERSGHRFLWSLRRASPVGNKSNPPPGEFTNLEEILPKGFLDRTVEIGKIISWAPQVDVLNSPAIGAFVTHCGWNSILESLWFGVPMAAWPIYAEQQFNAFHMVDELGLAAEVKKEYRRDFLVEEPEIVTADEIERGIKCAMEQDSKMRKRVMEMKDKLHVALVDGGSSNCALKKFVQDVVDNVP

SEQ ID NO: 43863 - protein, 358 aa, Arabidopsis thaliana
  peptide (1)..(358): Ceres Seq. ID no. 12576070
MIDIADEFNLSAYIFYTSNASYLGLQFHVQSLYDEKELDVSEFKDTEMKFDVPTLTQPFPAKCLPSVMLNKKWFPYVLGRARSFRATKGILVNSVADMEPQALSFFSGGNGNTNIPPVYAVGPIMDLESSGDEEKRKEILHWLKEQPTKSVVFLCFGSMGGFSEEQAREIAVALERSGHRFLWSLRRASPVGNKSNPPPGEFTNLEEILPKGFLDRTVEIGKIISWAPQVDVLNSPAIGAFVTHCGWNSILESLWFGVPMAAWPIYAEQQFNAFHMVDELGLAAEVKKEYRRDFLVEEPEIVTADEIERGIKCAMEQDSKMRKRVMEMKDKLHVALVDGGSSNCALKKFVQDVVDNVP

SEQ ID NO: 43864 - DNA, 1009 bp, Arabidopsis thaliana; identical to SEQ ID NO: 25129
  misc_feature (1)..(1009): Ceres Seq. ID no. 13488493
  misc_feature (1)..(1009): Ortholog of  Ceres SEQ ID NO 13591776 as cited in SEQ ID NO 20695

SEQ ID NO: 43865 - protein, 265 aa, Arabidopsis thaliana; identical to SEQ ID NO: 25130
  peptide (1)..(265): Ceres Seq. ID no. 15218578

SEQ ID NO: 43866 - protein, 229 aa, Arabidopsis thaliana; identical to SEQ ID NO: 25131
  peptide (1)..(229): Ceres Seq. ID no. 15218579

SEQ ID NO: 43867 - protein, 160 aa, Arabidopsis thaliana; identical to SEQ ID NO: 25132
  peptide (1)..(160): Ceres Seq. ID no. 15218580

SEQ ID NO: 43868 - DNA, 1338 bp, Arabidopsis thaliana
  misc_feature (1)..(1338): Ceres Seq. ID no. 12462175
  misc_feature (1)..(1338): Ortholog of  Ceres SEQ ID NO 15169316 as cited in SEQ ID NO 54821
  misc_feature (1)..(1338): Ortholog of  Ceres SEQ ID NO 13598294 as cited in SEQ ID NO 61982
atgaaccaaagtaaaaaacaaagactcgagttgatatgtctagtactaaagatatgtcaactgtccaaaacgcaactccttttaacggcgttgccccatccaccaccgtgcgagttacaatcgtccaatcctccaccgtctataacgatactcctgccactatagacaaagcggagaagtatattgtggaggcggcaagcaagggagcagagctagtgttgttcccggaggggtttatcggtggctatcctcgaggttttaggttcggtttagcggttggcgttcataacgaagaagggcgtgatgagtttcggaagtaccatgcttctgctattcatgttcctggccctgaagtagcaagattggctgacgtggctaggaaaaaccatgtgtacttggtaatgggagccatagagaaggaagggtataccctctattgcacagttcttttctttagtccacagggtcagttcttgggcaagcaccgtaaactcatgcccacaagtttggaacgttgcatttggggccaaggggacggatcaaccatccccgtttacgacactcccattggaaaactcggtgctgctatttgctgggagaataggatgcccctctacagaactgcattgtacgccaaaggcattgagctttattgtgcacctactgctgatggttcgaaagaatggcaatcgtcgatgcttcacattgcgatcgaaggtggatgtttcgtcttgtcggcttgccaattctgccagcgtaaacatttccctgatcatcctgactacttgtttaccgattggtacgacgacaaagaacatgattctattgtctcccaaggtggaagtgtcattatttcacctttgggacaagttctcgccggaccaaactttgaatcagagggtctcgtcacagctgatattgatcttggtgatatagcaagagccaagttatacttcgattcggttggacattactcgagaccagatgttttacacttgaccgtaaatgagcacccgaggaaatcggttacattcgtgacgaaggtggagaaagctgaggatgactcaaacaaatagtaagagacttgaagttcgtatctgctggagttatgtcaatcgtatggagtcaagtccaaaatgttctgttgcgttttcattttatgttcaagtttatttatctttctcttcaatggtaagatctatggagtcaagtaataatggtaagacttatgttgttgaataaaacgaattggttctctcctcttgtattttaaaactgtgccattatgtttatctaatttgggcgttgggcgttgaatctcaattgttgttcagccgt

SEQ ID NO: 43869 - protein, 346 aa, Arabidopsis thaliana
  peptide (1)..(346): Ceres Seq. ID no. 12462176
MSSTKDMSTVQNATPFNGVAPSTTVRVTIVQSSTVYNDTPATIDKAEKYIVEAASKGAELVLFPEGFIGGYPRGFRFGLAVGVHNEEGRDEFRKYHASAIHVPGPEVARLADVARKNHVYLVMGAIEKEGYTLYCTVLFFSPQGQFLGKHRKLMPTSLERCIWGQGDGSTIPVYDTPIGKLGAAICWENRMPLYRTALYAKGIELYCAPTADGSKEWQSSMLHIAIEGGCFVLSACQFCQRKHFPDHPDYLFTDWYDDKEHDSIVSQGGSVIISPLGQVLAGPNFESEGLVTADIDLGDIARAKLYFDSVGHYSRPDVLHLTVNEHPRKSVTFVTKVEKAEDDSNK

SEQ ID NO: 43870 - protein, 340 aa, Arabidopsis thaliana
  peptide (1)..(340): Ceres Seq. ID no. 12462177
MSTVQNATPFNGVAPSTTVRVTIVQSSTVYNDTPATIDKAEKYIVEAASKGAELVLFPEGFIGGYPRGFRFGLAVGVHNEEGRDEFRKYHASAIHVPGPEVARLADVARKNHVYLVMGAIEKEGYTLYCTVLFFSPQGQFLGKHRKLMPTSLERCIWGQGDGSTIPVYDTPIGKLGAAICWENRMPLYRTALYAKGIELYCAPTADGSKEWQSSMLHIAIEGGCFVLSACQFCQRKHFPDHPDYLFTDWYDDKEHDSIVSQGGSVIISPLGQVLAGPNFESEGLVTADIDLGDIARAKLYFDSVGHYSRPDVLHLTVNEHPRKSVTFVTKVEKAEDDSNK

SEQ ID NO: 43871 - protein, 224 aa, Arabidopsis thaliana
  peptide (1)..(224): Ceres Seq. ID no. 12462178
MGAIEKEGYTLYCTVLFFSPQGQFLGKHRKLMPTSLERCIWGQGDGSTIPVYDTPIGKLGAAICWENRMPLYRTALYAKGIELYCAPTADGSKEWQSSMLHIAIEGGCFVLSACQFCQRKHFPDHPDYLFTDWYDDKEHDSIVSQGGSVIISPLGQVLAGPNFESEGLVTADIDLGDIARAKLYFDSVGHYSRPDVLHLTVNEHPRKSVTFVTKVEKAEDDSNK

SEQ ID NO: 43872 - DNA, 822 bp, Arabidopsis thaliana; identical to SEQ ID NO: 34900
  misc_feature (1)..(822): Ceres Seq. ID no. 13504913
  misc_feature (1)..(822): Ortholog of  Ceres SEQ ID NO 13495070 as cited in SEQ ID NO 53216
  misc_feature (1)..(822): Ortholog of  Ceres SEQ ID NO 12598241 as cited in SEQ ID NO 61025
  misc_feature (1)..(822): Ortholog of  Ceres SEQ ID NO 13661333 as cited in SEQ ID NO 61620
  misc_feature (1)..(822): Ortholog of  Ceres SEQ ID NO 15173749 as cited in SEQ ID NO 61775
  misc_feature (1)..(822): Ortholog of  Ceres SEQ ID NO 13596812 as cited in SEQ ID NO 62283
  misc_feature (1)..(822): Ortholog of  Ceres SEQ ID NO 13623021 as cited in SEQ ID NO 0
  misc_feature (1)..(822): Ortholog of  Ceres SEQ ID NO 14302179 as cited in SEQ ID NO 0

SEQ ID NO: 43873 - protein, 189 aa, Arabidopsis thaliana; identical to SEQ ID NO: 34901
  peptide (1)..(189): Ceres Seq. ID no. 13504914

SEQ ID NO: 43874 - protein, 139 aa, Arabidopsis thaliana; identical to SEQ ID NO: 34902
  peptide (1)..(139): Ceres Seq. ID no. 13504915

SEQ ID NO: 43875 - protein, 132 aa, Arabidopsis thaliana; identical to SEQ ID NO: 34903
  peptide (1)..(132): Ceres Seq. ID no. 13504916

SEQ ID NO: 43876 - DNA, 1756 bp, Arabidopsis thaliana
  misc_feature (1)..(1756): Ceres Seq. ID no. 12559094
  misc_feature (1)..(1756): Ortholog of  Ceres SEQ ID NO 15172174 as cited in SEQ ID NO 60481
  misc_feature (1)..(1756): Ortholog of  Ceres SEQ ID NO 13660287 as cited in SEQ ID NO 67316
cgtacatctcttatttaattcctcaccttgccaaatcacaattctcctcttcaagtcttaaccaaacccaaagtccttcaacaagaaaatccaatggctgatccggcaacgagttctccgttgttggatgaccatgtaggtggagaagatgaaagaggaaggagatcaagatcatcaactttggttcaaaaagtgatcgacgtggaagaagcaaaagctcaaatgatttactctttgccaatgatactcaccaatgttttctactactgtattcctataacttctgtgatgtttgcttctcacctcggtcaactcgagctcgccggtgccacccttgccaattcttgggccaccgtctccggttttgccttcatggtagggttaagtggatcacttgagacattatgtggacaaggctttggtgcaaaaagatacaggatgttgggagttcatctacaatcatcttgcatcgtttcattagttttcagcatcctcatcaccatcttctggttcttcacagaatcgatttttggacttctcagacaagatcctagcatttcaaaacaagctgcactctatatgaagtaccaagctcccggtttactagcttacgggtttttacaaaatattttgagattttgccaaacacaatcgatcattgctccactagtcatcttctcgtttgttcccttggtgataaacattgctaccgcatatgttcttgtttatgtagctgggcttggattcattggtgctccaatagctacatctatttcattgtggatagctttcctttcgcttggaacttatgtgatgtgttcagaaaagtttaaggaaacatggactggattttcgttggaatcattccgttatatcgtaataaacttgacattaagcctcccttctgctgctatggtatgtttggaatattgggcattcgagattcttgtgttcttggcaggagtgatgccaaacccggaaatcaatacttctttggtcgctatatgcgtcaacacggaggcgattagctacatgttaacatacggacttagtgcagctgcaagtacgcgtgtgtccaatgaacttggagcaggaaatgtaaaaggcgcaaagaaggcgacctctgtgtccgtaaagttgtctttagttcttgctctcggcgttgtaattgttttactcgtaggtcatgatggttgggttgggttatttagcgatagctatgtgattaaagaggagtttgcatcattgaggttttttcttgctgcctctataactcttgattcaatccaaggagttttatcaggagttgcaagaggatgcggatggcagcgtttagtcacggttataaatttggcgacattctacttaattggaatgccgattgccgccttttgtggtttcaagttgaagttttatgccaagggtttgtggattggtttgatatgtggaatattttgccaatcatcatctcttttgcttatgacaatattccggaagtggacaaagctgaatgttgctacggtctgaaaactctagttacgttccatttttctacggaggcacatttattttcttaagcagatatggaatcagttatcaagatatatatttggaactcatgatcattttccaaacgcttagttaagatttatctttcttagttttctttttattcttttggagtgtaagggaaataatctggttcacaaagttggtcatggcttgaatattacagcatcattctaagctatctttg

SEQ ID NO: 43877 - protein, 477 aa, Arabidopsis thaliana
  peptide (1)..(477): Ceres Seq. ID no. 12559095
MADPATSSPLLDDHVGGEDERGRRSRSSTLVQKVIDVEEAKAQMIYSLPMILTNVFYYCIPITSVMFASHLGQLELAGATLANSWATVSGFAFMVGLSGSLETLCGQGFGAKRYRMLGVHLQSSCIVSLVFSILITIFWFFTESIFGLLRQDPSISKQAALYMKYQAPGLLAYGFLQNILRFCQTQSIIAPLVIFSFVPLVINIATAYVLVYVAGLGFIGAPIATSISLWIAFLSLGTYVMCSEKFKETWTGFSLESFRYIVINLTLSLPSAAMVCLEYWAFEILVFLAGVMPNPEINTSLVAICVNTEAISYMLTYGLSAAASTRVSNELGAGNVKGAKKATSVSVKLSLVLALGVVIVLLVGHDGWVGLFSDSYVIKEEFASLRFFLAASITLDSIQGVLSGVARGCGWQRLVTVINLATFYLIGMPIAAFCGFKLKFYAKGLWIGLICGIFCQSSSLLLMTIFRKWTKLNVATV

SEQ ID NO: 43878 - protein, 434 aa, Arabidopsis thaliana
  peptide (1)..(434): Ceres Seq. ID no. 12559096
MIYSLPMILTNVFYYCIPITSVMFASHLGQLELAGATLANSWATVSGFAFMVGLSGSLETLCGQGFGAKRYRMLGVHLQSSCIVSLVFSILITIFWFFTESIFGLLRQDPSISKQAALYMKYQAPGLLAYGFLQNILRFCQTQSIIAPLVIFSFVPLVINIATAYVLVYVAGLGFIGAPIATSISLWIAFLSLGTYVMCSEKFKETWTGFSLESFRYIVINLTLSLPSAAMVCLEYWAFEILVFLAGVMPNPEINTSLVAICVNTEAISYMLTYGLSAAASTRVSNELGAGNVKGAKKATSVSVKLSLVLALGVVIVLLVGHDGWVGLFSDSYVIKEEFASLRFFLAASITLDSIQGVLSGVARGCGWQRLVTVINLATFYLIGMPIAAFCGFKLKFYAKGLWIGLICGIFCQSSSLLLMTIFRKWTKLNVATV

SEQ ID NO: 43879 - protein, 428 aa, Arabidopsis thaliana
  peptide (1)..(428): Ceres Seq. ID no. 12559097
MILTNVFYYCIPITSVMFASHLGQLELAGATLANSWATVSGFAFMVGLSGSLETLCGQGFGAKRYRMLGVHLQSSCIVSLVFSILITIFWFFTESIFGLLRQDPSISKQAALYMKYQAPGLLAYGFLQNILRFCQTQSIIAPLVIFSFVPLVINIATAYVLVYVAGLGFIGAPIATSISLWIAFLSLGTYVMCSEKFKETWTGFSLESFRYIVINLTLSLPSAAMVCLEYWAFEILVFLAGVMPNPEINTSLVAICVNTEAISYMLTYGLSAAASTRVSNELGAGNVKGAKKATSVSVKLSLVLALGVVIVLLVGHDGWVGLFSDSYVIKEEFASLRFFLAASITLDSIQGVLSGVARGCGWQRLVTVINLATFYLIGMPIAAFCGFKLKFYAKGLWIGLICGIFCQSSSLLLMTIFRKWTKLNVATV

SEQ ID NO: 43880 - DNA, 636 bp, Arabidopsis thaliana
  misc_feature (1)..(636): Ceres Seq. ID no. 13575604
  misc_feature (1)..(636): Ortholog of  Ceres SEQ ID NO 15173986 as cited in SEQ ID NO 1074
  misc_feature (1)..(636): Ortholog of  Ceres SEQ ID NO 13586102 as cited in SEQ ID NO 0
gaaacactatcgaacctcaaaatctctgttgccggaaattttcttcaccgaaactgaaagaagtcnaaagagagaagagaagaaattgaagcaatggagggagcagaggaagctggggctgagatagcggttgattcaaaggacttgcagcaacaaagcaaagctttcgacaagctcaccgatcgtgtcgaggatcgccagctcgattcctctcgtgttcaatcggctatggcttcgattgctgcttctagggaggctgatctgaatgctaagaggttgagggagaaagaactggcctctgtgaagatcaatcctgcagatgttgagtttattgtaaacgaacttgagatagaaaagaatgtggcggaaagaactctaagggagcacaaaggtgatgcggttgctgcgactaggcaattgctttcacgatatcctctatgatggagcaggaccattctttacttccaaggttttttgtatgtttgagaggttgagagcaagtctcctaatatttaaccgagttaaaattgtctattggtgaaccgatctctttgagaagccctgaatccagttacaatcgattttggggtggtgttttgtggttctatctgaagtttgaagttcaatcttattatc

SEQ ID NO: 43881 - protein, 115 aa, Arabidopsis thaliana; identical to SEQ ID NO: 26995
  peptide (1)..(115): Ceres Seq. ID no. 13575605

SEQ ID NO: 43882 - protein, 70 aa, Arabidopsis thaliana; identical to SEQ ID NO: 26996
  peptide (1)..(70): Ceres Seq. ID no. 13575606

SEQ ID NO: 43883 - DNA, 1830 bp, Arabidopsis thaliana; identical to SEQ ID NO: 37266
  misc_feature (1)..(1830): Ceres Seq. ID no. 13592216
  misc_feature (1)..(1830): Ortholog of  Ceres SEQ ID NO 13599324 as cited in SEQ ID NO 0

SEQ ID NO: 43884 - protein, 508 aa, Arabidopsis thaliana; identical to SEQ ID NO: 37267
  peptide (1)..(508): Ceres Seq. ID no. 13592217

SEQ ID NO: 43885 - protein, 433 aa, Arabidopsis thaliana; identical to SEQ ID NO: 37268
  peptide (1)..(433): Ceres Seq. ID no. 13592218

SEQ ID NO: 43886 - protein, 295 aa, Arabidopsis thaliana; identical to SEQ ID NO: 37269
  peptide (1)..(295): Ceres Seq. ID no. 13592219

SEQ ID NO: 43887 - DNA, 1932 bp, Arabidopsis thaliana
  misc_feature (1)..(1932): Ceres Seq. ID no. 13593583
  misc_feature (1)..(1932): Ortholog of  Ceres SEQ ID NO 13660912 as cited in SEQ ID NO 67504
tctacctcctcctcattttctcctcttgattcactaattcttcttcttcttcttcttttcagacatgactcttccttatcgtttctcttccgttagaaaccactcacttctacttaagacttctcatctctgcacacccagatcagctcttggttgttgtttctctcccaaggaatcccctttcttcaggaagaacactgcccaattcctttctcctcagaaacacacttctcttcctctgaaacttgtctgccctttagctagtttctcttcttatgcggattctgagggagaagagcaacaccatgctgatcaaccgatacagaaccctcacgaatcttctaccgtttcaaacgaatcagatgggaaaggtaatgcagaagctactggagacttttctggaatggctcaagcctttcacatttcttccacaacagcaagggcaatctctatagtcatcgccttctctgctctcacccttccaatcttcatgaagtccctgggacaaggactggctctcaagaccaagcttctctcttacgcaacactactctttggtttctacatggcctggaacatcggagctaatgatgtcgcaaatgccatggggacttctgttggatctggagccttgacaatccggcaagctgtgatgacagctgcagttctcgaattctcaggtgctcttttgatgggaactcacgtgactagcacgatgcagaaaggaattctcatggctaatgtgttccaagggaaagatatgttgctctttgctggtctcctctcttccttagctgcagctggaacttggttacaggtagcttcttactatggatggccagtatcaacaactcactgtatcgtcggatcaatggttgggtttgggcttgtatatggaggagctggtgccgttttctggagttccctagctaaagtagcttcatcttgggtcatctctcctatactgggagctcttgtctccttcctagtctacaaatgcatcaggagatttgtttacagtgcaccaaacccaggacaagcagcggctgctgccgctcccgtcgctgtatttgtaggtgtggccagtatctcctcagccgcattgcctctaagtaagatctttccaatagctctatcacaagccttagcctgtggagtagcaggagccatagtattcgacagaatcatccgcaaacagctcggtcacctcctagctaaaacaaaatcaccagaaacatctcaaaaccaacccaaaaccattggtttcctctccgatatcgcaggaccaacaggtacacaactcgaaatagtctacggaatctttggctatatgcaagtcctctccgcttgcttcatgtcattcgctcacggaggcaacgacgtctccaacgcaatcggaccattagccgccgcattaagcattctccaaaacggagcagctgcaggaggagccgagatcgttatcccaatggatgttctcgcttggggaggattcggaatcgttgctggtctcacaatgtggggatacagagtcatcgcaacgatagggaagaagatcactgagctaacaccaacaagaggattcgctgcggaattcgccgccgcgtcggttgttttgtttgcttcgaaattagggcttccgatttctgcgactcatacacttgttggtgctgtgatgggtgttggtttcgctagagggcttaatagtgtgagagctgagactgtgagagagatcgttgcttcgtggcttgtcaccattcccgttggtgctacactcgccgttatctacacttggattttcaccaagatcttatcttttgtattgtgagtttctgtttcttttggttttgttatacgaagaacatgaaattgatcttcttcttctatgttcgtttgaatgattcgagtttgaaaaaaccctaaagttatcat

SEQ ID NO: 43888 - protein, 587 aa, Arabidopsis thaliana
  peptide (1)..(587): Ceres Seq. ID no. 13593584
MTLPYRFSSVRNHSLLLKTSHLCTPRSALGCCFSPKESPFFRKNTAQFLSPQKHTSLPLKLVCPLASFSSYADSEGEEQHHADQPIQNPHESSTVSNESDGKGNAEATGDFSGMAQAFHISSTTARAISIVIAFSALTLPIFMKSLGQGLALKTKLLSYATLLFGFYMAWNIGANDVANAMGTSVGSGALTIRQAVMTAAVLEFSGALLMGTHVTSTMQKGILMANVFQGKDMLLFAGLLSSLAAAGTWLQVASYYGWPVSTTHCIVGSMVGFGLVYGGAGAVFWSSLAKVASSWVISPILGALVSFLVYKCIRRFVYSAPNPGQAAAAAAPVAVFVGVASISSAALPLSKIFPIALSQALACGVAGAIVFDRIIRKQLGHLLAKTKSPETSQNQPKTIGFLSDIAGPTGTQLEIVYGIFGYMQVLSACFMSFAHGGNDVSNAIGPLAAALSILQNGAAAGGAEIVIPMDVLAWGGFGIVAGLTMWGYRVIATIGKKITELTPTRGFAAEFAAASVVLFASKLGLPISATHTLVGAVMGVGFARGLNSVRAETVREIVASWLVTIPVGATLAVIYTWIFTKILSFVL

SEQ ID NO: 43889 - protein, 474 aa, Arabidopsis thaliana
  peptide (1)..(474): Ceres Seq. ID no. 13593585
MAQAFHISSTTARAISIVIAFSALTLPIFMKSLGQGLALKTKLLSYATLLFGFYMAWNIGANDVANAMGTSVGSGALTIRQAVMTAAVLEFSGALLMGTHVTSTMQKGILMANVFQGKDMLLFAGLLSSLAAAGTWLQVASYYGWPVSTTHCIVGSMVGFGLVYGGAGAVFWSSLAKVASSWVISPILGALVSFLVYKCIRRFVYSAPNPGQAAAAAAPVAVFVGVASISSAALPLSKIFPIALSQALACGVAGAIVFDRIIRKQLGHLLAKTKSPETSQNQPKTIGFLSDIAGPTGTQLEIVYGIFGYMQVLSACFMSFAHGGNDVSNAIGPLAAALSILQNGAAAGGAEIVIPMDVLAWGGFGIVAGLTMWGYRVIATIGKKITELTPTRGFAAEFAAASVVLFASKLGLPISATHTLVGAVMGVGFARGLNSVRAETVREIVASWLVTIPVGATLAVIYTWIFTKILSFVL

SEQ ID NO: 43890 - protein, 445 aa, Arabidopsis thaliana
  peptide (1)..(445): Ceres Seq. ID no. 13593586
MKSLGQGLALKTKLLSYATLLFGFYMAWNIGANDVANAMGTSVGSGALTIRQAVMTAAVLEFSGALLMGTHVTSTMQKGILMANVFQGKDMLLFAGLLSSLAAAGTWLQVASYYGWPVSTTHCIVGSMVGFGLVYGGAGAVFWSSLAKVASSWVISPILGALVSFLVYKCIRRFVYSAPNPGQAAAAAAPVAVFVGVASISSAALPLSKIFPIALSQALACGVAGAIVFDRIIRKQLGHLLAKTKSPETSQNQPKTIGFLSDIAGPTGTQLEIVYGIFGYMQVLSACFMSFAHGGNDVSNAIGPLAAALSILQNGAAAGGAEIVIPMDVLAWGGFGIVAGLTMWGYRVIATIGKKITELTPTRGFAAEFAAASVVLFASKLGLPISATHTLVGAVMGVGFARGLNSVRAETVREIVASWLVTIPVGATLAVIYTWIFTKILSFVL

SEQ ID NO: 43891 - DNA, 2093 bp, Arabidopsis thaliana
  misc_feature (1)..(2093): Ceres Seq. ID no. 12639093
  misc_feature (1)..(2093): Ortholog of  Ceres SEQ ID NO 15180350 as cited in SEQ ID NO 0
gaattacacacacacaactttattatctgtacacgtatatgtgtgtgtgtatatatatacatactcatccacaaaaactcgactgattgatttctccatgaacaacgtcctcctttgatttcacctttttttgttgtcttcttctttcgaaatcaatcatgagattcagatctctcatctctctcctcttccttctcttcttcacttcatctgcttacgctcgattcgtctccctaaacccatcttcaacgagtctaatctccgatggaatcgacggtggttcaaatctcgccggttccggatcggttatcaagtcggttgtttcggctccggctgaggaaaaggaggaagcttgtgagcagacatacgggtttatgccgtgtactaagaccgctcttggaaacgtgtttctgattttggtttatggatttctcatgtttacggctgcgacgtatctctctgctggaagtgagcttcttcttgagatccttggacctggaattgtcggtggtttgtttcttccgatgcttggtgctcttcctgacgctatgcttatcatggtgtctggactatctggagatgcagcaactgctcaaagccaagtctctgtgggaatgggtttgcttgctggttccactgttatgcttctcactgttatctggggaacttgtactgtggttggcaagtgtgatcttcgtgattcaattgctgtaaacaaccaagacaccaaaggctttcacctaaaagattctggtgtaactgttgatatttggaccagctatgctgcaagaataatggctatatcagttattccgttcgtcattgtccagcttccgcagatgttgggctcaacctctggaagacaattgtccgtgttgattgctctaatcctttcagttcttatgttgatctcttactgtgtatatcaggtattccaaccatggatccaaaggagacggcttgcttttgcaaaacacaagcatgttatatcaggaatactaaggcacttgaaacaacatgctctgggaaggcttcttgatgatgaaggtcagcctgatgaacatgtcattcgaaagttgtttttgacaattgatgcaaacaatgacggacacttgtcagcggctgaactaaaggcgcttatcattgggatcagctttgaggatatagattttgacaaggatgatgctgtgggaaaagttctccaagattttgataagactcttgatgagcaagttgatcaagaagagtttgtccgtggaattaagcaatggcttatccaggcaatgggaggtgctccatctggtcctgaagctggccctcgaacaatgaaattccttgacaatttccatgtgcaaacaaagagagagcatgctttgttgggagataacgagaatggtgagaatgatgaggaaggcggtgaggttgcagacccaaaatggatcaccattaaagcagctctgctgctactgttaggagctgccattgcagctgcatttgctgatcctttagtcgacactgttaacaacttctccgcagccacagggattccgtctttcttcatttccttcatcgctttgcctttggccaccaattcaagtgaagccgtgtctgccatcatcttcgcatcccgcaaaaagatcagaaccgcctctttaactttctccgagctatgtggtggagtgacaatgaacaacattctgtgtctctcggtgttcttagcaatcgtctacgttcgaggactgacatggaacttctcatcagaagtgttggtgattctcatcgtttgtctggtgatgggcggtttcgcgagtttccgcacaacttatcctctttggacatgtttcatagcttacttgctttacccattctccttgggtctggtctatattcttgattactggtttggctggtcgtagatatcactctctgttcaaagagtttgttctaatgagtgagtgtcttcgcgcgtggtttcgtttcttctctacatatatatatatatatggattctcgagtgtaaaaacttaaattctgagatttgtgtattggaaacagagtcttattgaagctaatacagtaatatctttcttgtt

SEQ ID NO: 43892 - protein, 585 aa, Arabidopsis thaliana
  peptide (1)..(585): Ceres Seq. ID no. 12639094
MRFRSLISLLFLLFFTSSAYARFVSLNPSSTSLISDGIDGGSNLAGSGSVIKSVVSAPAEEKEEACEQTYGFMPCTKTALGNVFLILVYGFLMFTAATYLSAGSELLLEILGPGIVGGLFLPMLGALPDAMLIMVSGLSGDAATAQSQVSVGMGLLAGSTVMLLTVIWGTCTVVGKCDLRDSIAVNNQDTKGFHLKDSGVTVDIWTSYAARIMAISVIPFVIVQLPQMLGSTSGRQLSVLIALILSVLMLISYCVYQVFQPWIQRRRLAFAKHKHVISGILRHLKQHALGRLLDDEGQPDEHVIRKLFLTIDANNDGHLSAAELKALIIGISFEDIDFDKDDAVGKVLQDFDKTLDEQVDQEEFVRGIKQWLIQAMGGAPSGPEAGPRTMKFLDNFHVQTKREHALLGDNENGENDEEGGEVADPKWITIKAALLLLLGAAIAAAFADPLVDTVNNFSAATGIPSFFISFIALPLATNSSEAVSAIIFASRKKIRTASLTFSELCGGVTMNNILCLSVFLAIVYVRGLTWNFSSEVLVILIVCLVMGGFASFRTTYPLWTCFIAYLLYPFSLGLVYILDYWFGWS

SEQ ID NO: 43893 - protein, 513 aa, Arabidopsis thaliana
  peptide (1)..(513): Ceres Seq. ID no. 12639095
MPCTKTALGNVFLILVYGFLMFTAATYLSAGSELLLEILGPGIVGGLFLPMLGALPDAMLIMVSGLSGDAATAQSQVSVGMGLLAGSTVMLLTVIWGTCTVVGKCDLRDSIAVNNQDTKGFHLKDSGVTVDIWTSYAARIMAISVIPFVIVQLPQMLGSTSGRQLSVLIALILSVLMLISYCVYQVFQPWIQRRRLAFAKHKHVISGILRHLKQHALGRLLDDEGQPDEHVIRKLFLTIDANNDGHLSAAELKALIIGISFEDIDFDKDDAVGKVLQDFDKTLDEQVDQEEFVRGIKQWLIQAMGGAPSGPEAGPRTMKFLDNFHVQTKREHALLGDNENGENDEEGGEVADPKWITIKAALLLLLGAAIAAAFADPLVDTVNNFSAATGIPSFFISFIALPLATNSSEAVSAIIFASRKKIRTASLTFSELCGGVTMNNILCLSVFLAIVYVRGLTWNFSSEVLVILIVCLVMGGFASFRTTYPLWTCFIAYLLYPFSLGLVYILDYWFGWS

SEQ ID NO: 43894 - protein, 493 aa, Arabidopsis thaliana
  peptide (1)..(493): Ceres Seq. ID no. 12639096
MFTAATYLSAGSELLLEILGPGIVGGLFLPMLGALPDAMLIMVSGLSGDAATAQSQVSVGMGLLAGSTVMLLTVIWGTCTVVGKCDLRDSIAVNNQDTKGFHLKDSGVTVDIWTSYAARIMAISVIPFVIVQLPQMLGSTSGRQLSVLIALILSVLMLISYCVYQVFQPWIQRRRLAFAKHKHVISGILRHLKQHALGRLLDDEGQPDEHVIRKLFLTIDANNDGHLSAAELKALIIGISFEDIDFDKDDAVGKVLQDFDKTLDEQVDQEEFVRGIKQWLIQAMGGAPSGPEAGPRTMKFLDNFHVQTKREHALLGDNENGENDEEGGEVADPKWITIKAALLLLLGAAIAAAFADPLVDTVNNFSAATGIPSFFISFIALPLATNSSEAVSAIIFASRKKIRTASLTFSELCGGVTMNNILCLSVFLAIVYVRGLTWNFSSEVLVILIVCLVMGGFASFRTTYPLWTCFIAYLLYPFSLGLVYILDYWFGWS

SEQ ID NO: 43895 - DNA, 2709 bp, Arabidopsis thaliana
  misc_feature (1)..(2709): Ceres Seq. ID no. 12559100
  misc_feature (1)..(2709): Ortholog of  Ceres SEQ ID NO 13647621 as cited in SEQ ID NO 159
  misc_feature (1)..(2709): Ortholog of  Ceres SEQ ID NO 14306279 as cited in SEQ ID NO 56860
aggctaaaaacgttatcgtaatctttaatcttcaggcttcttttctaaaattccgactggttaccgagggctagaaaatccggtcaccgtcgccggagacaacctcggtttctaaacgaaaccatcgtgaaggacggaaaaaaggagcttgaagacaaaacaatgacgagcgttttcgacgaacataaaccctccgatgactctcacgagtccaagatcgtcatcaatggagaagaagaggtgttggaggaggagaatgataatccgattgaagaagtccggttaacggtaccgataaccgacgatccaacactaccggtgctaacgtttcgaacatggactcttggacttttctcttgcatattgcttgccttcgtgaaccagttctttggtttccggtcgaaccagctttgggtatcttcagttgcggcacagatcgtgacccttccgctagggaaactcatggcaaagacgctaccgacaaagaaatttgggtttcccgggacgaattggtcgtggtcttttaaccctggtccgttcaatatgaaggaacatgttcttattacaatatttgctaacaccggagctggtggagtttacgccaccagtattattaccattgttaaagcgttttataatcgtcaacttaatgtcgccgccgccatgttgctcactcaaaccactcagttgttgggatatggatgggctggaatcttcaggaagttccttgtggattcaccgtatatgtggtggccgtcaaatttggttcaagtctcactctttagagctttacatgagaaggaggatctacaaaaagggcaacaaacaaggtttagattcttcatcattgtcttctgtgtgagctttgcttactacataatccccggctaccttttcccttccatttccgcaatttcatttgtttgctggatttggaaaagctcagtgaccgctcagattgtcggttctgggctcaagggtttaggtattggttcgttcggtcttgactggtccacagttgctggtttcttaggcagtccgttggctgtaccattcttcgccattgccaatttctttggaggattcttcatctttttatacattgttctacctatcttctactggactaatgcttatgatgctcagaagtttccgttctatacttcacacacctttgatcagactggacacacctataacattacccgtatcctcaatgagaagaatttcgatatcaatctagacgcttacaacggttacagcaagctctatttgagtgtgatgttcgcgttgctctatggactcagctttggttctctttgcgctaccatctctcatgttgccctctatgatggaaagtttatatggggaatgtggaagaaggcaaagacagcaacaaaggacaagtacggtgacgtgcattcgagattgatgaagaagaattatcaatcagtacctcaatggtggttcatcgcagttctagttatttcctttgctttcgcactctatgcttgcgagggctttgacaaacagcttcagctcccatggtggggacttatactcgcttgcgccatcgctttgttcttcacattacctatcggagttatccaagcaactactaaccagcaaatgggtcttaacgttataacagaactgatcatcgggtacttatacccaggaaagccactagccaatgtcgctttcaagacatacggatacatcagtatgtctcaagccttgtactttgtaggagacttcaagcttggtcactacatgaagattcctccaagatcaatgttcatcgtccagcttgttgcaactgtggttgcatcaactgtctgcttcggaacaacctggtggctcattacatccgtcgagaacatatgtaatgtcgatttgctcccggtgggtagtccatggacttgtcctggagatgaagtgttctacaatgcatcaatcatatggggagtgattggtccagggagaatgtttaccaaagaaggtatctatcccgggatgaactggttcttccttatcggtctcctcgctccagttcccttctggtacctatcgaagaagttcccagagaagaaatggctaaaacagatccatgttcccttgatcttctctgcagtaagcgccatgccacaagctaaggctgtgcattactggtcctgggccatcgttggggttgtgttcaactactacatcttcaggaggttcaaaacttggtgggcgaggcacaattacatcctctctgcggcgcttgatgcaggtactgcgattatgggagtgttgatattcttcgcattccagaacaatgatataagcttacctgattggtgggggcttgagaattcagaccattgccctctagcgcattgccctctagccaaaggtgttgttgttgaaggttgtcccgtgttttaagaattgaagtagatgcaacgttgtcctgaaaggggtaactgttgatggcttcggtaaccttatatctgtgtaaaaccctccaagttaagggactcaaacaatgtaaagcactagatttggtttcatgttcttcagtatttaactattccctttgtaagtataagaacagtagccaaataaagtagagctttcttcattccaactatataatcaaaatgtaacaagctccaaaagatatcattcaaatgatataactaaggtttaagatgtgtaccaatt

SEQ ID NO: 43896 - protein, 755 aa, Arabidopsis thaliana
  peptide (1)..(755): Ceres Seq. ID no. 12559101
MTSVFDEHKPSDDSHESKIVINGEEEVLEEENDNPIEEVRLTVPITDDPTLPVLTFRTWTLGLFSCILLAFVNQFFGFRSNQLWVSSVAAQIVTLPLGKLMAKTLPTKKFGFPGTNWSWSFNPGPFNMKEHVLITIFANTGAGGVYATSIITIVKAFYNRQLNVAAAMLLTQTTQLLGYGWAGIFRKFLVDSPYMWWPSNLVQVSLFRALHEKEDLQKGQQTRFRFFIIVFCVSFAYYIIPGYLFPSISAISFVCWIWKSSVTAQIVGSGLKGLGIGSFGLDWSTVAGFLGSPLAVPFFAIANFFGGFFIFLYIVLPIFYWTNAYDAQKFPFYTSHTFDQTGHTYNITRILNEKNFDINLDAYNGYSKLYLSVMFALLYGLSFGSLCATISHVALYDGKFIWGMWKKAKTATKDKYGDVHSRLMKKNYQSVPQWWFIAVLVISFAFALYACEGFDKQLQLPWWGLILACAIALFFTLPIGVIQATTNQQMGLNVITELIIGYLYPGKPLANVAFKTYGYISMSQALYFVGDFKLGHYMKIPPRSMFIVQLVATVVASTVCFGTTWWLITSVENICNVDLLPVGSPWTCPGDEVFYNASIIWGVIGPGRMFTKEGIYPGMNWFFLIGLLAPVPFWYLSKKFPEKKWLKQIHVPLIFSAVSAMPQAKAVHYWSWAIVGVVFNYYIFRRFKTWWARHNYILSAALDAGTAIMGVLIFFAFQNNDISLPDWWGLENSDHCPLAHCPLAKGVVVEGCPVF

SEQ ID NO: 43897 - protein, 655 aa, Arabidopsis thaliana
  peptide (1)..(655): Ceres Seq. ID no. 12559102
MAKTLPTKKFGFPGTNWSWSFNPGPFNMKEHVLITIFANTGAGGVYATSIITIVKAFYNRQLNVAAAMLLTQTTQLLGYGWAGIFRKFLVDSPYMWWPSNLVQVSLFRALHEKEDLQKGQQTRFRFFIIVFCVSFAYYIIPGYLFPSISAISFVCWIWKSSVTAQIVGSGLKGLGIGSFGLDWSTVAGFLGSPLAVPFFAIANFFGGFFIFLYIVLPIFYWTNAYDAQKFPFYTSHTFDQTGHTYNITRILNEKNFDINLDAYNGYSKLYLSVMFALLYGLSFGSLCATISHVALYDGKFIWGMWKKAKTATKDKYGDVHSRLMKKNYQSVPQWWFIAVLVISFAFALYACEGFDKQLQLPWWGLILACAIALFFTLPIGVIQATTNQQMGLNVITELIIGYLYPGKPLANVAFKTYGYISMSQALYFVGDFKLGHYMKIPPRSMFIVQLVATVVASTVCFGTTWWLITSVENICNVDLLPVGSPWTCPGDEVFYNASIIWGVIGPGRMFTKEGIYPGMNWFFLIGLLAPVPFWYLSKKFPEKKWLKQIHVPLIFSAVSAMPQAKAVHYWSWAIVGVVFNYYIFRRFKTWWARHNYILSAALDAGTAIMGVLIFFAFQNNDISLPDWWGLENSDHCPLAHCPLAKGVVVEGCPVF

SEQ ID NO: 43898 - protein, 628 aa, Arabidopsis thaliana
  peptide (1)..(628): Ceres Seq. ID no. 12559103
MKEHVLITIFANTGAGGVYATSIITIVKAFYNRQLNVAAAMLLTQTTQLLGYGWAGIFRKFLVDSPYMWWPSNLVQVSLFRALHEKEDLQKGQQTRFRFFIIVFCVSFAYYIIPGYLFPSISAISFVCWIWKSSVTAQIVGSGLKGLGIGSFGLDWSTVAGFLGSPLAVPFFAIANFFGGFFIFLYIVLPIFYWTNAYDAQKFPFYTSHTFDQTGHTYNITRILNEKNFDINLDAYNGYSKLYLSVMFALLYGLSFGSLCATISHVALYDGKFIWGMWKKAKTATKDKYGDVHSRLMKKNYQSVPQWWFIAVLVISFAFALYACEGFDKQLQLPWWGLILACAIALFFTLPIGVIQATTNQQMGLNVITELIIGYLYPGKPLANVAFKTYGYISMSQALYFVGDFKLGHYMKIPPRSMFIVQLVATVVASTVCFGTTWWLITSVENICNVDLLPVGSPWTCPGDEVFYNASIIWGVIGPGRMFTKEGIYPGMNWFFLIGLLAPVPFWYLSKKFPEKKWLKQIHVPLIFSAVSAMPQAKAVHYWSWAIVGVVFNYYIFRRFKTWWARHNYILSAALDAGTAIMGVLIFFAFQNNDISLPDWWGLENSDHCPLAHCPLAKGVVVEGCPVF

SEQ ID NO: 43899 - DNA, 1813 bp, Arabidopsis thaliana
  misc_feature (1)..(1813): Ceres Seq. ID no. 12559124
  misc_feature (1)..(1813): Ortholog of  Ceres SEQ ID NO 13654290 as cited in SEQ ID NO 62197
  misc_feature (1)..(1813): Ortholog of  Ceres SEQ ID NO 14301924 as cited in SEQ ID NO 67731
atgggcaccaatcagactcagatctccgatgaatatgttaccggtaacagttccggtgtaggtgggggaatctctgatgtatacggtgaagatagtgccacgttggatcaacttgtcactccttgggttacctctgtcgcaagtgggtatacattgatgcgtgatccacgttacaataaaggacttgcttttactgataaagagagagatgctcattacataactggtcttcttcctcctgtagttttatctcaagatgttcaggagaggaaagtgatgcataatcttcgtcagtatacggttcctttgcaacgttacatggctctcatggatcttcaggaaaggaatgagagattgttttataagcttttgattgataatgtggaggagttgcttccggttgtgtatacaccgacggttggtgaggcttgccaaaagtatgggagcatttataggaggccacaaggtctttacatcagcttgaaagagaagggaaagattcttgaagtattgaagaattggccacagagagggattcaagttattgttgttaccgatggtgagcggattctcggtcttggagatcttggttgccagggaatgggaatccctgttgggaagctttctctttacacagctttgggaggaatccgtccatcggcttgccttccaataaccattgatgtgggtacaaacaatgagaagctgttgaataatgagttttacattggccttaaacagaagagggcaaatggcgaggaatatgcagagtttttgcaggagtttatgtgtgctgttaaacaaaactatggagagaaagtgttggtgcagtttgaagattttgcaaaccaccatgcgtttgagcttctctctaagtactgctcaagtcatctcgttttcaatgatgatatccaaggaactgcatctgtggtgcttgccgggcttattgcggctcagaaagtacttggtaaaagcctagctgaccatacctttttgttcttgggtgctggagaggctggaaccggaatcgctgagctaattgctcttaaaatttcgaaagagactggaaaaccaatcgatgagacccggaagaagatttggcttgtggactccaagggactgattgttagcgaacgcaaagaatcgcttcaacatttcaagcagccatgggcgcatgaccacaagcctgtcaaggagctcttggcagctgttaatgcaatcaagccaactgttcttattggaacctctggtgtgggtaagactttcacaaaggaagtagtggaggccatggctaccttgaacgagaaaccattgattcttgcactctcaaacccaacttctcaagccgagtgcacggcggaagaagcttacacatggaccaagggtcgtgcaatctttgcaagtggaagcccgtttgaccctgttcagtatgatggcaaaaaattcacgcctggccaggcaaacaactgttacattttccctggtctcggtcttggtttgatcatgtccggtgccattcgtgtccgtgatgacatgcttctagcagcttcggaagcgctggcctcccaagtgacggaagagaattttgcgaacggactgatctatccgccttttgcaaacatcagaaagatctctgctaacattgcagccagtgtgggagccaaaacctacgaactcggactggcatcgaatctgcctcgtcctaaggacctcgtaaagatggcagagagctgcatgtacagtcctgtctacagaaacttccgttaaaacattctttttaacattttgggctcagcttttactttttgctttt

SEQ ID NO: 43900 - protein, 588 aa, Arabidopsis thaliana
  peptide (1)..(588): Ceres Seq. ID no. 12559125
MGTNQTQISDEYVTGNSSGVGGGISDVYGEDSATLDQLVTPWVTSVASGYTLMRDPRYNKGLAFTDKERDAHYITGLLPPVVLSQDVQERKVMHNLRQYTVPLQRYMALMDLQERNERLFYKLLIDNVEELLPVVYTPTVGEACQKYGSIYRRPQGLYISLKEKGKILEVLKNWPQRGIQVIVVTDGERILGLGDLGCQGMGIPVGKLSLYTALGGIRPSACLPITIDVGTNNEKLLNNEFYIGLKQKRANGEEYAEFLQEFMCAVKQNYGEKVLVQFEDFANHHAFELLSKYCSSHLVFNDDIQGTASVVLAGLIAAQKVLGKSLADHTFLFLGAGEAGTGIAELIALKISKETGKPIDETRKKIWLVDSKGLIVSERKESLQHFKQPWAHDHKPVKELLAAVNAIKPTVLIGTSGVGKTFTKEVVEAMATLNEKPLILALSNPTSQAECTAEEAYTWTKGRAIFASGSPFDPVQYDGKKFTPGQANNCYIFPGLGLGLIMSGAIRVRDDMLLAASEALASQVTEENFANGLIYPPFANIRKISANIAASVGAKTYELGLASNLPRPKDLVKMAESCMYSPVYRNFR

SEQ ID NO: 43901 - protein, 536 aa, Arabidopsis thaliana
  peptide (1)..(536): Ceres Seq. ID no. 12559126
MRDPRYNKGLAFTDKERDAHYITGLLPPVVLSQDVQERKVMHNLRQYTVPLQRYMALMDLQERNERLFYKLLIDNVEELLPVVYTPTVGEACQKYGSIYRRPQGLYISLKEKGKILEVLKNWPQRGIQVIVVTDGERILGLGDLGCQGMGIPVGKLSLYTALGGIRPSACLPITIDVGTNNEKLLNNEFYIGLKQKRANGEEYAEFLQEFMCAVKQNYGEKVLVQFEDFANHHAFELLSKYCSSHLVFNDDIQGTASVVLAGLIAAQKVLGKSLADHTFLFLGAGEAGTGIAELIALKISKETGKPIDETRKKIWLVDSKGLIVSERKESLQHFKQPWAHDHKPVKELLAAVNAIKPTVLIGTSGVGKTFTKEVVEAMATLNEKPLILALSNPTSQAECTAEEAYTWTKGRAIFASGSPFDPVQYDGKKFTPGQANNCYIFPGLGLGLIMSGAIRVRDDMLLAASEALASQVTEENFANGLIYPPFANIRKISANIAASVGAKTYELGLASNLPRPKDLVKMAESCMYSPVYRNFR

SEQ ID NO: 43902 - protein, 496 aa, Arabidopsis thaliana
  peptide (1)..(496): Ceres Seq. ID no. 12559127
MHNLRQYTVPLQRYMALMDLQERNERLFYKLLIDNVEELLPVVYTPTVGEACQKYGSIYRRPQGLYISLKEKGKILEVLKNWPQRGIQVIVVTDGERILGLGDLGCQGMGIPVGKLSLYTALGGIRPSACLPITIDVGTNNEKLLNNEFYIGLKQKRANGEEYAEFLQEFMCAVKQNYGEKVLVQFEDFANHHAFELLSKYCSSHLVFNDDIQGTASVVLAGLIAAQKVLGKSLADHTFLFLGAGEAGTGIAELIALKISKETGKPIDETRKKIWLVDSKGLIVSERKESLQHFKQPWAHDHKPVKELLAAVNAIKPTVLIGTSGVGKTFTKEVVEAMATLNEKPLILALSNPTSQAECTAEEAYTWTKGRAIFASGSPFDPVQYDGKKFTPGQANNCYIFPGLGLGLIMSGAIRVRDDMLLAASEALASQVTEENFANGLIYPPFANIRKISANIAASVGAKTYELGLASNLPRPKDLVKMAESCMYSPVYRNFR

SEQ ID NO: 43903 - DNA, 964 bp, Arabidopsis thaliana; identical to SEQ ID NO: 36070
  misc_feature (1)..(964): Ceres Seq. ID no. 13647095
  misc_feature (1)..(964): Ortholog of  Ceres SEQ ID NO 13591776 as cited in SEQ ID NO 20695
  misc_feature (1)..(964): Ortholog of  Ceres SEQ ID NO 13595072 as cited in SEQ ID NO 55971

SEQ ID NO: 43904 - protein, 171 aa, Arabidopsis thaliana; identical to SEQ ID NO: 36071
  peptide (1)..(171): Ceres Seq. ID no. 15218720

SEQ ID NO: 43905 - protein, 135 aa, Arabidopsis thaliana; identical to SEQ ID NO: 36072
  peptide (1)..(135): Ceres Seq. ID no. 15218721

SEQ ID NO: 43906 - protein, 98 aa, Arabidopsis thaliana; identical to SEQ ID NO: 36073
  peptide (1)..(98): Ceres Seq. ID no. 15218722
  misc_feature (22)..(22): Xaa is any aa, unknown or other
  misc_feature (70)..(70): Xaa is any aa, unknown or other
  misc_feature (75)..(75): Xaa is any aa, unknown or other
  misc_feature (89)..(89): Xaa is any aa, unknown or other

SEQ ID NO: 43907 - DNA, 1035 bp, Arabidopsis thaliana
  misc_feature (1)..(1035): Ceres Seq. ID no. 12488601
  misc_feature (1)..(1035): Ortholog of  Ceres SEQ ID NO 13596762 as cited in SEQ ID NO 63019
aacacaaatatcataatttctccacgaactgactaagagaggtaccaagaagaaaaccagagaagaatcttctttagagagatgggtgtggtagaagaagctcacaacgtgaaggtgattggttcaggagaagccacgatcgtgttaggtcacgggttcggcacggaccagtcagtatggaaacacttggttccacatctggtcgacgattaccgcgtcgtcctctacgacaacatgggagccggtacgaccaaccctgactatttcgacttcgatcgttactcaaatctcgaaggctactctttcgatttgattgcaatcttggaagatctcaagattgagtcttgtatctttgttggccactctgtttctgccatgattggtgtcttggcttctcttaaccgtcctgatctcttctccaaaatcgtcatgatctctgcttctccgagatacgtaaacgatgttgattaccaaggtggattcgaacaagaagacttaaaccaactattcgaagccatccgaagcaactacaaagcgtggtgcttaggtttcgctccactcgccgtcggtggcgacatggactccatcgccgttcaagaattcagcagaacactcttcaatatgcgtcccgacatagctctctccgtcggccagaccattttccaaagtgacatgagacagatcttaccttttgtcactgttccgtgtcacattctccaaagtgttaaggacttagctgtaccagtcgttgtctccgagtatcttcacgccaatcttggctgtgaatccgtcgtcgaggttattccttctgatggtcatcttcctcagcttagctcaccagattctgttattcctgtcatcctccgtcacattcgtaatgacattgctatgtgattgtaagagatttaattagttaattattaaacgatgtaagaaaagttgaaaaaaaatatctgatgtgatatgtctgtctagtctattgagaacattatttcgttgtcgtttggttctgattcgtttatcttgagtatcttg

SEQ ID NO: 43908 - protein, 270 aa, Arabidopsis thaliana
  peptide (1)..(270): Ceres Seq. ID no. 12488602
MGVVEEAHNVKVIGSGEATIVLGHGFGTDQSVWKHLVPHLVDDYRVVLYDNMGAGTTNPDYFDFDRYSNLEGYSFDLIAILEDLKIESCIFVGHSVSAMIGVLASLNRPDLFSKIVMISASPRYVNDVDYQGGFEQEDLNQLFEAIRSNYKAWCLGFAPLAVGGDMDSIAVQEFSRTLFNMRPDIALSVGQTIFQSDMRQILPFVTVPCHILQSVKDLAVPVVVSEYLHANLGCESVVEVIPSDGHLPQLSSPDSVIPVILRHIRNDIAM

SEQ ID NO: 43909 - protein, 219 aa, Arabidopsis thaliana
  peptide (1)..(219): Ceres Seq. ID no. 12488603
MGAGTTNPDYFDFDRYSNLEGYSFDLIAILEDLKIESCIFVGHSVSAMIGVLASLNRPDLFSKIVMISASPRYVNDVDYQGGFEQEDLNQLFEAIRSNYKAWCLGFAPLAVGGDMDSIAVQEFSRTLFNMRPDIALSVGQTIFQSDMRQILPFVTVPCHILQSVKDLAVPVVVSEYLHANLGCESVVEVIPSDGHLPQLSSPDSVIPVILRHIRNDIAM

SEQ ID NO: 43910 - protein, 172 aa, Arabidopsis thaliana
  peptide (1)..(172): Ceres Seq. ID no. 12488604
MIGVLASLNRPDLFSKIVMISASPRYVNDVDYQGGFEQEDLNQLFEAIRSNYKAWCLGFAPLAVGGDMDSIAVQEFSRTLFNMRPDIALSVGQTIFQSDMRQILPFVTVPCHILQSVKDLAVPVVVSEYLHANLGCESVVEVIPSDGHLPQLSSPDSVIPVILRHIRNDIAM

SEQ ID NO: 43911 - DNA, 1086 bp, Arabidopsis thaliana
  misc_feature (1)..(1086): Ceres Seq. ID no. 13575398
  misc_feature (1)..(1086): Ortholog of  Ceres SEQ ID NO 15175048 as cited in SEQ ID NO 59975
  misc_feature (1)..(1086): Ortholog of  Ceres SEQ ID NO 13597333 as cited in SEQ ID NO 63974
  misc_feature (1)..(1086): Ortholog of  Ceres SEQ ID NO 12407937 as cited in SEQ ID NO 0
  misc_feature (1)..(1086): Ortholog of  Ceres SEQ ID NO 13599307 as cited in SEQ ID NO 0
gagttttcatttctcgagcaatttcactcttccgagaacaaccctagattccgatgatgaggggtctcgtttccggcgccaagatgctatcatcaaccccatcgtcgatggcgacaagcatcgccactggtagaagaagctacagtctgattccgatggttattgagcactcatcgcgaggagagagagcttacgacatcttctctcgtttgctcaaggagcgtattatctgcatcaacggtcccattaatgacgacacatctcacgtcgtcgtcgctcagcttctttacctcgagtctgagaatccttcgaagccgatccatatgtatctcaattcccctggcggccatgtcaccgccggtcttgcaatttatgatactatgcagtacattcgttctcctattagcacaatttgtttgggtcaggctgcatcaatggcttctcttctgttggcagcgggtgccaaggggcaaaggcggtcacttccaaatgcaactgttatgattcatcagccttcaggaggatatagtggacaggctaaagatataacgattcatacaaaacagattgttcgtgtgtgggatgcgttaaatgaattgtatgtcaaacacacgggtcaacctcttgacgtggttgcgaataacatggatagggatcatttcatgactcctgaagaggctaaggcgtttggaataatcgatgaagtgattgatgaaagaccgttggagttggtgaaagatgcagttggaaatgaaagcaaagataagagttcaagttaggaagtaactggtaatcaaagtaataaattttcttcttttcctcttaccagttttgctttgatcctgttagattacttttttctatggatgaagttatgctctgagggcatgatctctcaaactgtttttattcattcataaatcaatcatgactatatttctgaaatcttttcctcgcatgtttagtgtttacagtctcatatctgattcagtaaaatgaatattggattaacgcttggctttgggtcttaattttatgtgcagtttgatgcattgcaaatctttgatttatgcatcattttatact

SEQ ID NO: 43912 - protein, 241 aa, Arabidopsis thaliana
  peptide (1)..(241): Ceres Seq. ID no. 13575399
MMRGLVSGAKMLSSTPSSMATSIATGRRSYSLIPMVIEHSSRGERAYDIFSRLLKERIICINGPINDDTSHVVVAQLLYLESENPSKPIHMYLNSPGGHVTAGLAIYDTMQYIRSPISTICLGQAASMASLLLAAGAKGQRRSLPNATVMIHQPSGGYSGQAKDITIHTKQIVRVWDALNELYVKHTGQPLDVVANNMDRDHFMTPEEAKAFGIIDEVIDERPLELVKDAVGNESKDKSSS

SEQ ID NO: 43913 - protein, 240 aa, Arabidopsis thaliana
  peptide (1)..(240): Ceres Seq. ID no. 13575400
MRGLVSGAKMLSSTPSSMATSIATGRRSYSLIPMVIEHSSRGERAYDIFSRLLKERIICINGPINDDTSHVVVAQLLYLESENPSKPIHMYLNSPGGHVTAGLAIYDTMQYIRSPISTICLGQAASMASLLLAAGAKGQRRSLPNATVMIHQPSGGYSGQAKDITIHTKQIVRVWDALNELYVKHTGQPLDVVANNMDRDHFMTPEEAKAFGIIDEVIDERPLELVKDAVGNESKDKSSS

SEQ ID NO: 43914 - protein, 231 aa, Arabidopsis thaliana
  peptide (1)..(231): Ceres Seq. ID no. 13575401
MLSSTPSSMATSIATGRRSYSLIPMVIEHSSRGERAYDIFSRLLKERIICINGPINDDTSHVVVAQLLYLESENPSKPIHMYLNSPGGHVTAGLAIYDTMQYIRSPISTICLGQAASMASLLLAAGAKGQRRSLPNATVMIHQPSGGYSGQAKDITIHTKQIVRVWDALNELYVKHTGQPLDVVANNMDRDHFMTPEEAKAFGIIDEVIDERPLELVKDAVGNESKDKSSS

SEQ ID NO: 43915 - DNA, 824 bp, Arabidopsis thaliana
  misc_feature (1)..(824): Ceres Seq. ID no. 12559168
  misc_feature (1)..(824): Ortholog of  Ceres SEQ ID NO 12597207 as cited in SEQ ID NO 62146
gaagaagaagaagaagaagatggtgtctgggtcagggatatgcgcgaagcgcgttgtcgtcgacgggcgacaccacatgcttggtcgtctagcttccaacactgcgaaggagttacttaacggacaggaagtggttgttgtccgatgtgaagagatttgtctctcgggaggtttggttcgacaaaagatgaagtacatgagattccttaggaaacgtatgaacactaagccttctcatggtcctattcactttcgtgctccttccaagatcttctggcgcactgttcgcgggatgattccacacaagaccaagcgtggtgctgctgcacttgctcgcttgaaggtttttgagggaatcccacctccttacgacaagattaagagaatggttattcctgatgctcttaaggttttgagacttcagagtggtcacaagtactgcttattgggacgtttatcttctgaggttggctggaaccattatgataccattaaagaacttgagacaaagagaaaggaaagatcacaagtgatgtatgagcgtaagaagcaactcaacaagctcaggaccaaggcagagaaggttgcggaagagaggctcggatcacagctagatgttcttgccccggtcaagtattgaagaaaaccgacgtctatcacctcagagttttacacccgtttggttgaagcttgttttgattttgattttgcatctgaaatttggttttgttagtgtcaaagtgagaattctctcttctcatttactcattgttctgctatatacaacttatgttggttattatttcaatcaaaacaattttatt

SEQ ID NO: 43916 - protein, 212 aa, Arabidopsis thaliana
  peptide (1)..(212): Ceres Seq. ID no. 12559169
KKKKKKMVSGSGICAKRVVVDGRHHMLGRLASNTAKELLNGQEVVVVRCEEICLSGGLVRQKMKYMRFLRKRMNTKPSHGPIHFRAPSKIFWRTVRGMIPHKTKRGAAALARLKVFEGIPPPYDKIKRMVIPDALKVLRLQSGHKYCLLGRLSSEVGWNHYDTIKELETKRKERSQVMYERKKQLNKLRTKAEKVAEERLGSQLDVLAPVKY

SEQ ID NO: 43917 - protein, 206 aa, Arabidopsis thaliana
  peptide (1)..(206): Ceres Seq. ID no. 12559170
MVSGSGICAKRVVVDGRHHMLGRLASNTAKELLNGQEVVVVRCEEICLSGGLVRQKMKYMRFLRKRMNTKPSHGPIHFRAPSKIFWRTVRGMIPHKTKRGAAALARLKVFEGIPPPYDKIKRMVIPDALKVLRLQSGHKYCLLGRLSSEVGWNHYDTIKELETKRKERSQVMYERKKQLNKLRTKAEKVAEERLGSQLDVLAPVKY

SEQ ID NO: 43918 - protein, 187 aa, Arabidopsis thaliana
  peptide (1)..(187): Ceres Seq. ID no. 12559171
MLGRLASNTAKELLNGQEVVVVRCEEICLSGGLVRQKMKYMRFLRKRMNTKPSHGPIHFRAPSKIFWRTVRGMIPHKTKRGAAALARLKVFEGIPPPYDKIKRMVIPDALKVLRLQSGHKYCLLGRLSSEVGWNHYDTIKELETKRKERSQVMYERKKQLNKLRTKAEKVAEERLGSQLDVLAPVKY

SEQ ID NO: 43919 - DNA, 583 bp, Arabidopsis thaliana
  misc_feature (1)..(583): Ceres Seq. ID no. 4802563
  misc_feature (1)..(583): Ortholog of  Ceres SEQ ID NO 13595226 as cited in SEQ ID NO 56331
  misc_feature (1)..(583): Ortholog of  Ceres SEQ ID NO 13661903 as cited in SEQ ID NO 61722
  misc_feature (1)..(583): Ortholog of  Ceres SEQ ID NO 15173940 as cited in SEQ ID NO 61934
actctttcgtgtcgcaataacaataagaaagaaagaaaaagaaaaccagagatggcgatgacgacagcatctacggtatttgttctaccggccaatgtcacctcggtcgccggcgcttcgtcgtccaggagctccgtgtctttcttgccgatgagaaacgccggttctaggctcgtagtcagggcagccgaagatcctgctccggcttcctcttcttcaaaagattctccggcagctgccgctgctccggatggagctactgccaccaaacccaagccaccaccgattggtcctaagagagggtctaaggtcaagattctaaggagagaatcctattggttcaagaacgttggatcagttgttgccgttgatcaggaccctaagactcgatacccggttgtggtccggttcgcaaaagtcaattacgccaacatatcgaccaacaactatgcattggatgaggtcgaagaagttgcagcttaaatgggagaattcaaaaactctgtgtattctataccggttatccgttggaacttgcccaaaccgatgtacccnaaaagttacaatattctctattgatttg

SEQ ID NO: 43920 - protein, 160 aa, Arabidopsis thaliana
  peptide (1)..(160): Ceres Seq. ID no. 4802564
TLSCRNNNKKERKRKPEMAMTTASTVFVLPANVTSVAGASSSRSSVSFLPMRNAGSRLVVRAAEDPAPASSSSKDSPAAAAAPDGATATKPKPPPIGPKRGSKVKILRRESYWFKNVGSVVAVDQDPKTRYPVVVRFAKVNYANISTNNYALDEVEEVAA

SEQ ID NO: 43921 - protein, 143 aa, Arabidopsis thaliana; identical to SEQ ID NO: 43773
  peptide (1)..(143): Ceres Seq. ID no. 4802565

SEQ ID NO: 43922 - protein, 141 aa, Arabidopsis thaliana; identical to SEQ ID NO: 43774
  peptide (1)..(141): Ceres Seq. ID no. 4802566

SEQ ID NO: 43923 - DNA, 1094 bp, Arabidopsis thaliana
  misc_feature (1)..(1094): Ceres Seq. ID no. 13614578
  misc_feature (1)..(1094): Ortholog of  Ceres SEQ ID NO 13654728 as cited in SEQ ID NO 62302
  misc_feature (1)..(1094): Ortholog of  Ceres SEQ ID NO 13597134 as cited in SEQ ID NO 64501
  misc_feature (1)..(1094): Ortholog of  Ceres SEQ ID NO 15174333 as cited in SEQ ID NO 0
  misc_feature (1)..(1094): Ortholog of  Ceres SEQ ID NO 15179047 as cited in SEQ ID NO 0
atctatctacgcatcatcgatctcgaagtacgtttcggttttcaggccaatctctgaatctgcgtgacaaaagcaacaaattacatatctctctctctgcgcgacttcgaagatcaacatccatggcgtcacaggtaaggtcagtaaaagttggcaatctctcttcaggagcaactgagcatgatattaaagagtttttctctttctctggtgaagttgaaagcatcgatatccaaagtaacgagcatagtgcttatgtcacatttaaagaaactcaaggagcagagactgctgtgctcttatctggagcgagtattgccgatcaatcagtcatcattgagttggctcccaactacagtccaccagcagcccctcatgctgaaacacagagcagcggtgcagaatctgttgtccagaaggcagaagatgttgtgagcagcatgttagcaaagggtttcattcttgggaaagatgctgtcggcaaagcaaaagcttttgatgagaaacatggtttcacctcaaccgccaccgcaggagttgcttcactagaccaaaaaatcggtcttagccagaaacttacagctggaacaagcttggtgaacgaaaaaatcaaggcggtggaccaaaactttcaggtaacagagaggaccaagtctgtgtatgcagctgcggagcagactgtgagcagtgcaggaagcgctgtgatgaagaaccgttacgtgttaactggtgtgagctgggccgcaggagcattcaatagagtggctcaagcagctggagaggttggacagaaaacaaaagagaaggttgaagctgagcaaccatcgcaaccagcacagtcgcagcagcaactgccagaagggtattctccgattcattcgtccgaatactcgaagaactaatatcatcaagttaaacagtttcctttgtttctccttgttggtttctttgacatggaagttggaaatctggtttggtctttgggatgtaccatataagctatgcctggattttccctaccactattagactatagtttgggttttttccaatatacatatttaataagttgacatttaaatctttctttaccc

SEQ ID NO: 43924 - protein, 299 aa, Arabidopsis thaliana
  peptide (1)..(299): Ceres Seq. ID no. 13614579
LSTHHRSRSTFRFSGQSLNLRDKSNKLHISLSARLRRSTSMASQVRSVKVGNLSSGATEHDIKEFFSFSGEVESIDIQSNEHSAYVTFKETQGAETAVLLSGASIADQSVIIELAPNYSPPAAPHAETQSSGAESVVQKAEDVVSSMLAKGFILGKDAVGKAKAFDEKHGFTSTATAGVASLDQKIGLSQKLTAGTSLVNEKIKAVDQNFQVTERTKSVYAAAEQTVSSAGSAVMKNRYVLTGVSWAAGAFNRVAQAAGEVGQKTKEKVEAEQPSQPAQSQQQLPEGYSPIHSSEYSKN

SEQ ID NO: 43925 - protein, 259 aa, Arabidopsis thaliana
  peptide (1)..(259): Ceres Seq. ID no. 13614580
MASQVRSVKVGNLSSGATEHDIKEFFSFSGEVESIDIQSNEHSAYVTFKETQGAETAVLLSGASIADQSVIIELAPNYSPPAAPHAETQSSGAESVVQKAEDVVSSMLAKGFILGKDAVGKAKAFDEKHGFTSTATAGVASLDQKIGLSQKLTAGTSLVNEKIKAVDQNFQVTERTKSVYAAAEQTVSSAGSAVMKNRYVLTGVSWAAGAFNRVAQAAGEVGQKTKEKVEAEQPSQPAQSQQQLPEGYSPIHSSEYSKN

SEQ ID NO: 43926 - protein, 153 aa, Arabidopsis thaliana; identical to SEQ ID NO: 22947
  peptide (1)..(153): Ceres Seq. ID no. 13614581

SEQ ID NO: 43927 - DNA, 551 bp, Arabidopsis thaliana
  misc_feature (1)..(551): Ceres Seq. ID no. 7108885
  misc_feature (1)..(551): Ortholog of  Ceres SEQ ID NO 12556889 as cited in SEQ ID NO 125
  misc_feature (1)..(551): Ortholog of  Ceres SEQ ID NO 15172982 as cited in SEQ ID NO 51725
  misc_feature (1)..(551): Ortholog of  Ceres SEQ ID NO 13598188 as cited in SEQ ID NO 61498
aaaaaaaataaaggagatcagtttgggagaaagcagcaaagaagaaaaatggcagcaacatttgcaacaccatcgacggtgataggcctcggaggatcatccatcaccaccaaacccttctcttcatcctttttaaaaccaacattaagcgccaagaaccctttgagactcgccggtgcatcgggaggaagagtcacttgctttgagaggaactggttgaggagagatttgaacgtggtaggatttgggctgatcggatggctagctccgtcgagcattccagcgataaatgggaagagcctgacgggtctcttcttcgatagcatcggaactgagctcgctcacttcccgactcctccagctctcacttcacagttcttggttgtggttggttacgtggcacttaggcctcttcctctgcctcactttcggacaaatcggattcaagggcaggactgaggatacttctaagatactattcttggtttccgttggactatatgctctctcttggtattgggaatatatcaatcaaacaaactttctttgtt

SEQ ID NO: 43928 - protein, 152 aa, Arabidopsis thaliana
  peptide (1)..(152): Ceres Seq. ID no. 7108886
KKNKGDQFGRKQQRRKMAATFATPSTVIGLGGSSITTKPFSSSFLKPTLSAKNPLRLAGASGGRVTCFERNWLRRDLNVVGFGLIGWLAPSSIPAINGKSLTGLFFDSIGTELAHFPTPPALTSQFLVVVGYVALRPLPLPHFRTNRIQGQD

SEQ ID NO: 43929 - protein, 136 aa, Arabidopsis thaliana
  peptide (1)..(136): Ceres Seq. ID no. 7108887
MAATFATPSTVIGLGGSSITTKPFSSSFLKPTLSAKNPLRLAGASGGRVTCFERNWLRRDLNVVGFGLIGWLAPSSIPAINGKSLTGLFFDSIGTELAHFPTPPALTSQFLVVVGYVALRPLPLPHFRTNRIQGQD

SEQ ID NO: 43930 - DNA, 573 bp, Arabidopsis thaliana
  misc_feature (1)..(573): Ceres Seq. ID no. 6428453
  misc_feature (1)..(573): Ortholog of  Ceres SEQ ID NO 14308991 as cited in SEQ ID NO 0
ggtgagaagagatcgagagaagaatagtttgatcatcttgtgagaaaaataatggctgcttcagtgatgctatcttcggtgacattgaaaccagctggtttcacggtggagaagacggcggctagaggattaccgtcgctcacaagagctcgtccctccttcaaaattgtcgccagtggcgtcaagaagatcaagaccgacaagcccttcggaattaacggcagcatggacttgagggacggcgtcgacgcttccggcagaaagggcaagggatacggtgtttacaagtacgtcgacaagtatggagctaacgtcgatggatacagtcctatttacaacgagaacgagtggtcagcgagtgggtgacgtgtacaagggaggagtcaccggattggcaattttggcggaactctcgccggaattcttgcccgaaggtgctcttcttgttaccacacaagtgctttggcttaataaatcttaaaagtggtaacccnttggtaatcatggttctataaaaggttctggggtggtctctttctctctaatgtggaaactcaacctactttgaattat

SEQ ID NO: 43931 - protein, 104 aa, Arabidopsis thaliana
  peptide (1)..(104): Ceres Seq. ID no. 6428454
MAASVMLSSVTLKPAGFTVEKTAARGLPSLTRARPSFKIVASGVKKIKTDKPFGINGSMDLRDGVDASGRKGKGYGVYKYVDKYGANVDGYSPIYNENEWSASG

SEQ ID NO: 43932 - protein, 99 aa, Arabidopsis thaliana
  peptide (1)..(99): Ceres Seq. ID no. 6428455
MLSSVTLKPAGFTVEKTAARGLPSLTRARPSFKIVASGVKKIKTDKPFGINGSMDLRDGVDASGRKGKGYGVYKYVDKYGANVDGYSPIYNENEWSASG

SEQ ID NO: 43933 - protein, 59 aa, Arabidopsis thaliana
  peptide (1)..(59): Ceres Seq. ID no. 6428456
MELTSMDTVLFTTRTSGQRVGDVYKGGVTGLAILAELSPEFLPEGALLVTTQVLWLNKS

SEQ ID NO: 43934 - DNA, 1057 bp, Arabidopsis thaliana; identical to SEQ ID NO: 37042
  misc_feature (1)..(1057): Ceres Seq. ID no. 12558683
  misc_feature (1)..(1057): Ortholog of  Ceres SEQ ID NO 13595752 as cited in SEQ ID NO 57735

SEQ ID NO: 43935 - protein, 171 aa, Arabidopsis thaliana; identical to SEQ ID NO: 37043
  peptide (1)..(171): Ceres Seq. ID no. 12558684

SEQ ID NO: 43936 - protein, 168 aa, Arabidopsis thaliana; identical to SEQ ID NO: 37044
  peptide (1)..(168): Ceres Seq. ID no. 12558685

SEQ ID NO: 43937 - protein, 143 aa, Arabidopsis thaliana; identical to SEQ ID NO: 37045
  peptide (1)..(143): Ceres Seq. ID no. 12558686

SEQ ID NO: 43938 - DNA, 1608 bp, Arabidopsis thaliana
  misc_feature (1)..(1608): Ceres Seq. ID no. 12466379
  misc_feature (1)..(1608): Ortholog of  Ceres SEQ ID NO 14316532 as cited in SEQ ID NO 57093
gttcccttttcagtgtcctttcaatttctttcgacgaaacttcatttctcaatttcttttgattttgatcgcttcgaagaacgaatcaatttaagcctgccacaaacaaaccctagaatacgacaacgcacgacgacgaagaagtcgaagaagactactactataaacgacgaagatcattacttcaatcttcaatcgagcttttaaattttcagatcgtagaagaaaatcgaacttttgattccaaaagcgatgagaccgattcaatcgcctccaggagtttccgttccggtgaaaagccgtccccgtcgccgtcctgatcttaccttaccgcttcctcaacgcgatgtttctctcgctgtacctcttcctctcccacctacttccggtggttccggtggctctagtggatctgcgccgtcttctggtggttcggcgtcttcaacgaacactaacagctccatagaagcgaagaactattcggatttagtgagaggtaaccgtatcggaagcggagcaggtggaacggtatacaaagtgattcaccgtccgagttctcgtctatatgcacttaaggtgatatacggtaaccacgaggagactgtgagacgtcagatctgtagagagatcgagattttacgagatgtgaatcatccaaacgttgtgaaatgtcacgagatgtttgatcagaacggtgagatccaggttttgcttgagtttatggataaaggttctttagaaggtgctcatgtgtggaaagagcaacaattagctgatctatctcgtcagattcttagtggtttagcttatctccatagccgtcacatagttcatcgtgatatcaaaccatcgaatcttttgataaactctgctaaaaacgttaagattgctgattttggagttagtaggatcttggctcagactatggatccgtgtaattcatctgttggaaccattgcttatatgagtcctgagaggattaacactgatttgaatcagggaaagtatgatggttatgctggagatatttggagcttaggtgttagcattttggagttttacttggggaggtttcctttccctgtgagtagacaaggtgattgggctagtcttatgtgtgccatttgtatgtctcagcctccagaagctccagcgactgcgtcgccggagtttcggcattttatctcgtgttgcttgcagagagaaccggggaaaaggaggagtgctatgcagctattgcagcatcctttcatattaagagcaagtccgagccagaacaggtctcctcagaatctacatcaactcttgcctcctcctcgtcctctgtcctcgtcttcttctccaaccacatagcgttttctctcttcttcccttcatcaactcatattttttgtgttactactgttcttgagtctgttgtccaattttttgctaatcatggagggtctctgaattttacatttattagggagtaaaaaactcgagagagggtttttgggattattgttttctagaaaggtaaaagagaacaatgataatattcttatgcttatgatggtgcatgtatccccaatgtagctttgttgaattttcataaaagtttttgcc

SEQ ID NO: 43939 - protein, 366 aa, Arabidopsis thaliana
  peptide (1)..(366): Ceres Seq. ID no. 12466380
MRPIQSPPGVSVPVKSRPRRRPDLTLPLPQRDVSLAVPLPLPPTSGGSGGSSGSAPSSGGSASSTNTNSSIEAKNYSDLVRGNRIGSGAGGTVYKVIHRPSSRLYALKVIYGNHEETVRRQICREIEILRDVNHPNVVKCHEMFDQNGEIQVLLEFMDKGSLEGAHVWKEQQLADLSRQILSGLAYLHSRHIVHRDIKPSNLLINSAKNVKIADFGVSRILAQTMDPCNSSVGTIAYMSPERINTDLNQGKYDGYAGDIWSLGVSILEFYLGRFPFPVSRQGDWASLMCAICMSQPPEAPATASPEFRHFISCCLQREPGKRRSAMQLLQHPFILRASPSQNRSPQNLHQLLPPPRPLSSSSSPTT

SEQ ID NO: 43940 - protein, 224 aa, Arabidopsis thaliana
  peptide (1)..(224): Ceres Seq. ID no. 12466381
MFDQNGEIQVLLEFMDKGSLEGAHVWKEQQLADLSRQILSGLAYLHSRHIVHRDIKPSNLLINSAKNVKIADFGVSRILAQTMDPCNSSVGTIAYMSPERINTDLNQGKYDGYAGDIWSLGVSILEFYLGRFPFPVSRQGDWASLMCAICMSQPPEAPATASPEFRHFISCCLQREPGKRRSAMQLLQHPFILRASPSQNRSPQNLHQLLPPPRPLSSSSSPTT

SEQ ID NO: 43941 - protein, 210 aa, Arabidopsis thaliana
  peptide (1)..(210): Ceres Seq. ID no. 12466382
MDKGSLEGAHVWKEQQLADLSRQILSGLAYLHSRHIVHRDIKPSNLLINSAKNVKIADFGVSRILAQTMDPCNSSVGTIAYMSPERINTDLNQGKYDGYAGDIWSLGVSILEFYLGRFPFPVSRQGDWASLMCAICMSQPPEAPATASPEFRHFISCCLQREPGKRRSAMQLLQHPFILRASPSQNRSPQNLHQLLPPPRPLSSSSSPTT

SEQ ID NO: 43942 - DNA, 867 bp, Arabidopsis thaliana
  misc_feature (1)..(867): Ceres Seq. ID no. 12455436
  misc_feature (1)..(867): Ortholog of  Ceres SEQ ID NO 13504237 as cited in SEQ ID NO 100
  misc_feature (1)..(867): Ortholog of  Ceres SEQ ID NO 15176643 as cited in SEQ ID NO 57825
  misc_feature (1)..(867): Ortholog of  Ceres SEQ ID NO 12598265 as cited in SEQ ID NO 65873
  misc_feature (1)..(867): Ortholog of  Ceres SEQ ID NO 15180736 as cited in SEQ ID NO 0
agggtttattcttcattgcttgagcttccttctcttcttcttcttcaagccgcggctgaagatccctacttctctcgacacttatagagtttcaggtccattctctgattcctgttttttcattttctaatttcctatttacgggtttttactaatcttctagtgatcctccagtcatggccgcctccgcagaaatcgacgctgagattcaacagcagcttaccaatgaggttaagctcttcaaccgttggagctttgatgacgtttcggttacggatattagtcttgtggactacattggtgttcagccatcgaagcacgcaacttttgttccccatactgctggacgatactctgtgaagaggttcagaaaggcgcagtgcccaattgttgagaggctcactaactctctcatgatgcacggaagaaacaatggtaagaagttgatggctgtcaggatcgtcaagcatgccatggagattatccacctcttgtctgacttgaacccgattcaagttatcattgatgccattgttaacagtggtccacgtgaagatgctaccaggattggatctgctggtgtggttaggaggcaggctgttgatatctctcctctaagacgtgtgaaccaagcgatcttcttgcttacaactggtgcacgtgaagctgcctttagaaacatcaagacaatcgctgagtgccttgctgatgaactcatcaatgctgcaaagggatcttccaacagctatgccatcaagaagaaagatgagattgagagagttgctaaggccaatcgttaagggatctccctttcctctaagtttgcattatatcaaagagtttttgtgttgtttccattagctttgg

SEQ ID NO: 43943 - protein, 207 aa, Arabidopsis thaliana [sequence omitted]

SEQ ID NO: 43944 - protein, 128 aa, Arabidopsis thaliana
  peptide (1)..(128): Ceres Seq. ID no. 12455438
MMHGRNNGKKLMAVRIVKHAMEIIHLLSDLNPIQVIIDAIVNSGPREDATRIGSAGVVRRQAVDISPLRRVNQAIFLLTTGAREAAFRNIKTIAECLADELINAAKGSSNSYAIKKKDEIERVAKANR

SEQ ID NO: 43945 - protein, 127 aa, Arabidopsis thaliana
  peptide (1)..(127): Ceres Seq. ID no. 12455439
MHGRNNGKKLMAVRIVKHAMEIIHLLSDLNPIQVIIDAIVNSGPREDATRIGSAGVVRRQAVDISPLRRVNQAIFLLTTGAREAAFRNIKTIAECLADELINAAKGSSNSYAIKKKDEIERVAKANR

SEQ ID NO: 43946 - DNA, 1420 bp, Arabidopsis thaliana; identical to SEQ ID NO: 36272
  misc_feature (1)..(1420): Ceres Seq. ID no. 12580277
  misc_feature (1)..(1420): Ortholog of  Ceres SEQ ID NO 13592768 as cited in SEQ ID NO 20317
  misc_feature (1)..(1420): Ortholog of  Ceres SEQ ID NO 14303656 as cited in SEQ ID NO 61363

SEQ ID NO: 43947 - protein, 351 aa, Arabidopsis thaliana; identical to SEQ ID NO: 36273
  peptide (1)..(351): Ceres Seq. ID no. 12580278

SEQ ID NO: 43948 - protein, 315 aa, Arabidopsis thaliana; identical to SEQ ID NO: 36274
  peptide (1)..(315): Ceres Seq. ID no. 12580279

SEQ ID NO: 43949 - protein, 308 aa, Arabidopsis thaliana; identical to SEQ ID NO: 36275
  peptide (1)..(308): Ceres Seq. ID no. 12580280

SEQ ID NO: 43950 - DNA, 930 bp, Arabidopsis thaliana; identical to SEQ ID NO: 27097
  misc_feature (1)..(930): Ceres Seq. ID no. 12647740
  misc_feature (1)..(930): Ortholog of  Ceres SEQ ID NO 14314442 as cited in SEQ ID NO 52358
  misc_feature (1)..(930): Ortholog of  Ceres SEQ ID NO 12610442 as cited in SEQ ID NO 56281
  misc_feature (1)..(930): Ortholog of  Ceres SEQ ID NO 12610713 as cited in SEQ ID NO 56591
  misc_feature (1)..(930): Ortholog of  Ceres SEQ ID NO 12587345 as cited in SEQ ID NO 62844
  misc_feature (1)..(930): Ortholog of  Ceres SEQ ID NO 13597357 as cited in SEQ ID NO 68961
  misc_feature (1)..(930): Ortholog of  Ceres SEQ ID NO 13587656 as cited in SEQ ID NO 0
  misc_feature (1)..(930): Ortholog of  Ceres SEQ ID NO 14309353 as cited in SEQ ID NO 0
  misc_feature (1)..(930): Ortholog of  Ceres SEQ ID NO 15177686 as cited in SEQ ID NO 0

SEQ ID NO: 43951 - protein, 253 aa, Arabidopsis thaliana; identical to SEQ ID NO: 27098
  peptide (1)..(253): Ceres Seq. ID no. 12647741

SEQ ID NO: 43952 - protein, 205 aa, Arabidopsis thaliana; identical to SEQ ID NO: 27099
  peptide (1)..(205): Ceres Seq. ID no. 12647742

SEQ ID NO: 43953 - protein, 174 aa, Arabidopsis thaliana; identical to SEQ ID NO: 27100
  peptide (1)..(174): Ceres Seq. ID no. 12647743

SEQ ID NO: 43954 - DNA, 889 bp, Arabidopsis thaliana
  misc_feature (1)..(889): Ceres Seq. ID no. 12466326
  misc_feature (1)..(889): Ortholog of  Ceres SEQ ID NO 13661801 as cited in SEQ ID NO 61655
  misc_feature (1)..(889): Ortholog of  Ceres SEQ ID NO 13596450 as cited in SEQ ID NO 68838
acttttcagcgtttctgaccaaattctctccgtgtttccttctgcttcaggtgatattttaacaaagttcttagtacaatgggatctgttgatgctgctaatggaagtgggaagaaacctacagttatatttgttcttggtggtccaggaagtggaaaaggtacccagtgtgcttatattgttgaacattatggttacacacatctgagtgctggagatcttcttagagctgagattaaatcaggttctgaaaatggaactatgatccagaatatgattaaagaggggaagattgtaccttctgaggttactatcaagcttctacagaaagctattcaggaaaacgggaatgacaagttcctcattgatggtttccctcgtaatgaggaaaaccgagcagcatttgaaaaagttactgagattgaaccaaagtttgtcttattcttcgattgtcctgaggaagagatggagaagcgcctgttgggccgaaaccaggggagagaggatgacaatattgagactataaggaagcgctttaaggtgtttcttgaatctagcttaccagtgattcattactacgaagctaaggggaaagttaggaagattaatgctgcaaagcccattgaagctgtcttcgaggaggtgaaggcaattttttctcctgaagctgagaaggttgaagcctaggctgcagcatcgtaaaaagataccgaaaacccgataaattgatcaggtagagttgggtgtgttgcatctttcttacaggaagtctctgcttggccgtatttgtttttttgcttattaaccatatgattgattactgttattattatacacaatttacctattatataatttttgttttgtttcaatttttgtatttgatggg

SEQ ID NO: 43955 - protein, 202 aa, Arabidopsis thaliana [sequence omitted]

SEQ ID NO: 43956 - protein, 141 aa, Arabidopsis thaliana
  peptide (1)..(141): Ceres Seq. ID no. 12466328
MIQNMIKEGKIVPSEVTIKLLQKAIQENGNDKFLIDGFPRNEENRAAFEKVTEIEPKFVLFFDCPEEEMEKRLLGRNQGREDDNIETIRKRFKVFLESSLPVIHYYEAKGKVRKINAAKPIEAVFEEVKAIFSPEAEKVEA

SEQ ID NO: 43957 - protein, 137 aa, Arabidopsis thaliana
  peptide (1)..(137): Ceres Seq. ID no. 12466329
MIKEGKIVPSEVTIKLLQKAIQENGNDKFLIDGFPRNEENRAAFEKVTEIEPKFVLFFDCPEEEMEKRLLGRNQGREDDNIETIRKRFKVFLESSLPVIHYYEAKGKVRKINAAKPIEAVFEEVKAIFSPEAEKVEA

SEQ ID NO: 43958 - DNA, 1650 bp, Arabidopsis thaliana
  misc_feature (1)..(1650): Ceres Seq. ID no. 12580285
  misc_feature (1)..(1650): Ortholog of  Ceres SEQ ID NO 13663060 as cited in SEQ ID NO 60964
  misc_feature (1)..(1650): Ortholog of  Ceres SEQ ID NO 13655298 as cited in SEQ ID NO 68914
  misc_feature (1)..(1650): Ortholog of  Ceres SEQ ID NO 13656501 as cited in SEQ ID NO 69206
cacaaaataatataaagtaaaaatatttcataattcgtctctcaccggaaaaataaataaagttagagagagagattcataatcatcaaacccacaaatccttttttttttttttgttaaaacccacaaatccttactcgtacggatctctctctctttaatatcctaattcttctcttcatcgatctgagatttttacgttttcatcggcttgaaagtttgaagagttttgtagcctgaaaaatggcgtcagtgggtatagctcctaatcctggagcaagagactctactggtgttgataaattgcctgaagaaatgaatgacatgaaaattcgtgacgataaagaaatggaagcgacagtggtagatggaaatggaacagagactggacatatcattgtgactactattggtggtagaaatggccaaccaaaacagacaattagctacatggctgagcgtgttgttggtcacggatcttttggtgttgtgttccaagcgaaatgtcttgagacaggagaaactgttgcgataaagaaagttttacaagataggaggtacaagaaccgtgagcttcaaaccatgaggctacttgaccatcctaatgttgtgtctctgaaacattgtttcttctcaaccactgaaaaagatgagctttacctcaatcttgttcttgagtacgttccagaaactgttcatcgtgttatcaaacactacaacaaactgaatcagagaatgcctcttatatacgtcaaactttacacttatcagatttttagagccttatcttacattcaccgatgcattggtgtgtgtcatcgtgacataaaacctcaaaacttgttggtaaatccgcacactcatcaagtaaagctatgtgattttggaagtgcaaaagtattggtaaaaggagaaccaaacatttcctacatctgctcgaggtattacagagcacctgaacttatttttggagcaaccgagtatacgacagccattgatgtctggtctgcaggatgtgttctagctgaactattgcttggacagcccttgttccctggtgagagcggtgttgatcaacttgtagagattatcaaggtcttgggaacgcctactagagaagaaatcaagtgcatgaacccaaactacacggaattcaaattccctcagattaaagctcatccatggcacaagattttccacaaacgcatgcctccagaagctgttgatttggtctcaagacttcttcaatactctcctaatctacgaagtgccgctctcgacacattagtccacccattctttgatgagttaagagacccaaacgcacgtctacctaatggacgtttccttccaccgcttttcaacttcaagcctcacgagctgaaaggtgtaccattggagatggtagctaagttagtacctgagcatgcaaggaagcagtgtccttggctcggtttgtgatttcctcttaatgtagcatgaacacaacaaacacttcttataaattacctctctatgtatcaatatgtcacaaactgatatgcaccctttgtttgttgtatgagtagagaaaaaaagagttattactatggttggttggttcataatgtaaaagcccaccaagattttttatctagataaagagtttgc

SEQ ID NO: 43959 - protein, 405 aa, Arabidopsis thaliana
  peptide (1)..(405): Ceres Seq. ID no. 12580286
MASVGIAPNPGARDSTGVDKLPEEMNDMKIRDDKEMEATVVDGNGTETGHIIVTTIGGRNGQPKQTISYMAERVVGHGSFGVVFQAKCLETGETVAIKKVLQDRRYKNRELQTMRLLDHPNVVSLKHCFFSTTEKDELYLNLVLEYVPETVHRVIKHYNKLNQRMPLIYVKLYTYQIFRALSYIHRCIGVCHRDIKPQNLLVNPHTHQVKLCDFGSAKVLVKGEPNISYICSRYYRAPELIFGATEYTTAIDVWSAGCVLAELLLGQPLFPGESGVDQLVEIIKVLGTPTREEIKCMNPNYTEFKFPQIKAHPWHKIFHKRMPPEAVDLVSRLLQYSPNLRSAALDTLVHPFFDELRDPNARLPNGRFLPPLFNFKPHELKGVPLEMVAKLVPEHARKQCPWLGL

SEQ ID NO: 43960 - protein, 381 aa, Arabidopsis thaliana
  peptide (1)..(381): Ceres Seq. ID no. 12580287
MNDMKIRDDKEMEATVVDGNGTETGHIIVTTIGGRNGQPKQTISYMAERVVGHGSFGVVFQAKCLETGETVAIKKVLQDRRYKNRELQTMRLLDHPNVVSLKHCFFSTTEKDELYLNLVLEYVPETVHRVIKHYNKLNQRMPLIYVKLYTYQIFRALSYIHRCIGVCHRDIKPQNLLVNPHTHQVKLCDFGSAKVLVKGEPNISYICSRYYRAPELIFGATEYTTAIDVWSAGCVLAELLLGQPLFPGESGVDQLVEIIKVLGTPTREEIKCMNPNYTEFKFPQIKAHPWHKIFHKRMPPEAVDLVSRLLQYSPNLRSAALDTLVHPFFDELRDPNARLPNGRFLPPLFNFKPHELKGVPLEMVAKLVPEHARKQCPWLGL

SEQ ID NO: 43961 - protein, 378 aa, Arabidopsis thaliana
  peptide (1)..(378): Ceres Seq. ID no. 12580288
MKIRDDKEMEATVVDGNGTETGHIIVTTIGGRNGQPKQTISYMAERVVGHGSFGVVFQAKCLETGETVAIKKVLQDRRYKNRELQTMRLLDHPNVVSLKHCFFSTTEKDELYLNLVLEYVPETVHRVIKHYNKLNQRMPLIYVKLYTYQIFRALSYIHRCIGVCHRDIKPQNLLVNPHTHQVKLCDFGSAKVLVKGEPNISYICSRYYRAPELIFGATEYTTAIDVWSAGCVLAELLLGQPLFPGESGVDQLVEIIKVLGTPTREEIKCMNPNYTEFKFPQIKAHPWHKIFHKRMPPEAVDLVSRLLQYSPNLRSAALDTLVHPFFDELRDPNARLPNGRFLPPLFNFKPHELKGVPLEMVAKLVPEHARKQCPWLGL

SEQ ID NO: 43962 - DNA, 1527 bp, Arabidopsis thaliana
  misc_feature (1)..(1527): Ceres Seq. ID no. 12466320
  misc_feature (1)..(1527): Ortholog of  Ceres SEQ ID NO 14314382 as cited in SEQ ID NO 57346
  misc_feature (1)..(1527): Ortholog of  Ceres SEQ ID NO 13654517 as cited in SEQ ID NO 68060
gaacctttaaaactcagattttatctctcttcagtctccacgctgcttgaaactgaagcagagaagcaaagagatgtcttttgaggagtttacgccgttaaacgagaagtctcttgtagactacatcaagtcaacacctgctctctcttccaagatcggagccgacaagtccgatgatgatttggttatcaaagaagttggagatggcaatctcaatttcgttttcatcgttgttggatcctctggttctcttgtcatcaaacaggctcttccatatattcgctgtatcggtgaatcatggccaatgacgaaagaaagagcttattttgaagcaacaactttgagaaagcatggaaatttatcacctgatcatgttcctgaagtctaccattttgacagaacaatggcgttgattggaatgagataccttgagcctcctcatatcattctccgcaaaggactcattgctgggattgagtatcctttcctcgcagaccacatgtctgattacatggcgaagactctcttcttcacttctctcctctatcacgataccacagagcacagaagagcagtaaccgaattttgtggtaatgtggagttatgccgattaacggagcaagttgtgttttcggacccatatagagtttccacatttaatcgttggacttcaccttatcttgatgatgatgctaaggctgtgcgcgaagacagtgccttgaagctcgaaatcgcagagctaaaatcgatgttctgtgaaagagctcaagctttaatacatggtgatcttcatactggttctgtcatggttactcaagattcaacgcaagttatagatccagagttttcgttctatggaccgatgggtttcgatattggcgcttatcttggtaacttgatactagctttctttgcacaagatggacacgccactcaggaaaatgatcgaaaagaatacaagcagtggatcttgagaaccattgagcaaacttggaatttgtttaacaaaaggttcattgcgctatgggatcaaaacaaagatggaccaggcgaagcataccttgcagatatctataacaataccgaggttttgaagtttgttcaagaaaactacatgaggaatttgttgcatgactcactcggattcggcgctgcaaagatgattaggagaattgtgggagtggcacatgttgaggactttgaatcaatcgaagaagataagcgaagagctatttgcgagagaagtgcactcgagtttgcgaagatgcttctcaaggaaaggagaaagtttaagagtatcggtgaagttgtttcagcaattcaacaacaaagctaagacaatttataatgttcttctgctgaagttcttgaaagtcttgttttgatcttgggagttaattggcaagaaaagtatcacaatgctgcttatcacatggatttgtaatttagtggtttgtggtggtgatgatggtattcaaatgcattttgttacaataataataataaaagtttagaaatattttcact

SEQ ID NO: 43963 - protein, 420 aa, Arabidopsis thaliana
  peptide (1)..(420): Ceres Seq. ID no. 12466321
MSFEEFTPLNEKSLVDYIKSTPALSSKIGADKSDDDLVIKEVGDGNLNFVFIVVGSSGSLVIKQALPYIRCIGESWPMTKERAYFEATTLRKHGNLSPDHVPEVYHFDRTMALIGMRYLEPPHIILRKGLIAGIEYPFLADHMSDYMAKTLFFTSLLYHDTTEHRRAVTEFCGNVELCRLTEQVVFSDPYRVSTFNRWTSPYLDDDAKAVREDSALKLEIAELKSMFCERAQALIHGDLHTGSVMVTQDSTQVIDPEFSFYGPMGFDIGAYLGNLILAFFAQDGHATQENDRKEYKQWILRTIEQTWNLFNKRFIALWDQNKDGPGEAYLADIYNNTEVLKFVQENYMRNLLHDSLGFGAAKMIRRIVGVAHVEDFESIEEDKRRAICERSALEFAKMLLKERRKFKSIGEVVSAIQQQS

SEQ ID NO: 43964 - protein, 343 aa, Arabidopsis thaliana
  peptide (1)..(343): Ceres Seq. ID no. 12466322
MTKERAYFEATTLRKHGNLSPDHVPEVYHFDRTMALIGMRYLEPPHIILRKGLIAGIEYPFLADHMSDYMAKTLFFTSLLYHDTTEHRRAVTEFCGNVELCRLTEQVVFSDPYRVSTFNRWTSPYLDDDAKAVREDSALKLEIAELKSMFCERAQALIHGDLHTGSVMVTQDSTQVIDPEFSFYGPMGFDIGAYLGNLILAFFAQDGHATQENDRKEYKQWILRTIEQTWNLFNKRFIALWDQNKDGPGEAYLADIYNNTEVLKFVQENYMRNLLHDSLGFGAAKMIRRIVGVAHVEDFESIEEDKRRAICERSALEFAKMLLKERRKFKSIGEVVSAIQQQS

SEQ ID NO: 43965 - protein, 310 aa, Arabidopsis thaliana
  peptide (1)..(310): Ceres Seq. ID no. 12466323
MALIGMRYLEPPHIILRKGLIAGIEYPFLADHMSDYMAKTLFFTSLLYHDTTEHRRAVTEFCGNVELCRLTEQVVFSDPYRVSTFNRWTSPYLDDDAKAVREDSALKLEIAELKSMFCERAQALIHGDLHTGSVMVTQDSTQVIDPEFSFYGPMGFDIGAYLGNLILAFFAQDGHATQENDRKEYKQWILRTIEQTWNLFNKRFIALWDQNKDGPGEAYLADIYNNTEVLKFVQENYMRNLLHDSLGFGAAKMIRRIVGVAHVEDFESIEEDKRRAICERSALEFAKMLLKERRKFKSIGEVVSAIQQQS

SEQ ID NO: 43966 - DNA, 970 bp, Arabidopsis thaliana
  misc_feature (1)..(970): Ceres Seq. ID no. 13503867
  misc_feature (1)..(970): Ortholog of  Ceres SEQ ID NO 13574766 as cited in SEQ ID NO 33
accattgcataattatcggatgttgagggattcgtatcttggagccgaagtgttgttttcttatagaaggattttgatttcttctgcaaaattcgatcgatagtgacgagaaagatcctaagatggcgaccgcaagcgagagttcttcatctaagagatggcttccacttgaatctaacccagatgttatgaatcagtatctctggggacttggtcttgcccctgatgaagcagagtgcaatgatgtgtatgggttagacgatgaacttctagagatggttccaaagcctgttcttgctgttctcttcctttacccaatcaccaaaaagagtgaagaagagagaatcgagcaagacaaggaaattaaggaaaaggtgcatagcgataaagtttactttatgaaacaaactgttggtaatgcttgtggaaccattggtcttcttcatgctattgggaatattacctctgaaatcaaactctccgacggatcgttcttggatagattcttcaaatccactgccaacatgactcctatggagcgtgccaagtttctcgagaatgacagtcaaatagaagatgctcattctgtagctgttatagctggtgatacacctgcttcagaagacgcagacacgcatttcatttgtttagcttgtgtagaaggtgagctctatgaacttgatggaagaaaggcaggaccgatttcacacggtgcttcctctccagctaccctcctgaaggacgcaacaaaagtgataaagaagatgatcgagaagaatccgggctctctcaacttcaacctgatagccatctctaagagaacctgagggtcttttaaataaccgaaactcctaagtcttgtttttgagtttgtgactattttatatcttcggattctgtttttcaatgttctgaacaaattacagttgatgatcatggtttagagaatgcattcctagatcagtaacac

SEQ ID NO: 43967 - protein, 234 aa, Arabidopsis thaliana
  peptide (1)..(234): Ceres Seq. ID no. 13503868
MATASESSSSKRWLPLESNPDVMNQYLWGLGLAPDEAECNDVYGLDDELLEMVPKPVLAVLFLYPITKKSEEERIEQDKEIKEKVHSDKVYFMKQTVGNACGTIGLLHAIGNITSEIKLSDGSFLDRFFKSTANMTPMERAKFLENDSQIEDAHSVAVIAGDTPASEDADTHFICLACVEGELYELDGRKAGPISHGASSPATLLKDATKVIKKMIEKNPGSLNFNLIAISKRT

SEQ ID NO: 43968 - protein, 212 aa, Arabidopsis thaliana
  peptide (1)..(212): Ceres Seq. ID no. 13503869
MNQYLWGLGLAPDEAECNDVYGLDDELLEMVPKPVLAVLFLYPITKKSEEERIEQDKEIKEKVHSDKVYFMKQTVGNACGTIGLLHAIGNITSEIKLSDGSFLDRFFKSTANMTPMERAKFLENDSQIEDAHSVAVIAGDTPASEDADTHFICLACVEGELYELDGRKAGPISHGASSPATLLKDATKVIKKMIEKNPGSLNFNLIAISKRT

SEQ ID NO: 43969 - protein, 183 aa, Arabidopsis thaliana
  peptide (1)..(183): Ceres Seq. ID no. 13503870
MVPKPVLAVLFLYPITKKSEEERIEQDKEIKEKVHSDKVYFMKQTVGNACGTIGLLHAIGNITSEIKLSDGSFLDRFFKSTANMTPMERAKFLENDSQIEDAHSVAVIAGDTPASEDADTHFICLACVEGELYELDGRKAGPISHGASSPATLLKDATKVIKKMIEKNPGSLNFNLIAISKRT

SEQ ID NO: 43970 - DNA, 765 bp, Arabidopsis thaliana
  misc_feature (1)..(765): Ceres Seq. ID no. 13503857
  misc_feature (1)..(765): Ortholog of  Ceres SEQ ID NO 12556910 as cited in SEQ ID NO 39
  misc_feature (1)..(765): Ortholog of  Ceres SEQ ID NO 13594970 as cited in SEQ ID NO 56328
  misc_feature (1)..(765): Ortholog of  Ceres SEQ ID NO 12585079 as cited in SEQ ID NO 63137
tccggaggagcgaccaataagagcgcgaggagcttccacgtgttactacacgaatcttgtttagtaaaaagcgcagctgcaaaaaaaatcgagtagagaagaagtaggcagacaaagaagaagaagaagaagttctcggcgtgcttcaatggcgatatcagtagcagcttcgtcctctatggccgtgatggttccacgtgttcccgccgtatccacccgttgctccgccgtcccttatcttcctcctcgctcctttggccgatcctctttcaccgttccgttgaagcttgtttcagggaatggattgcaaaaagttgaattgttgaagacaagagcttcttcagaagagacctcgtccattgataccaacgaactcatcacagatttgaaggaaaagtgggatggtcttgagaacaaatctactgtacttatatatggaggaggagccattgttgctgtttggttatcttccattgttgttggtgccatcaactctgttcctctgcttccgaaagttatggaacttgtcggtctcgggtacactggatggtttgtctacagataccttctcttcaagtcaagcagaaaggaattggctgaggatattgaatccttgaagaagaagatcgcaggaagcgaatagattcattttcaaataaaaccagctttctctctgtatgttttcctgtaatatcgtgttatattatacaatgtctctgtttcaacattgtatctgttgcatctgaaactattatcttggatccg

SEQ ID NO: 43971 - protein, 164 aa, Arabidopsis thaliana
  peptide (1)..(164): Ceres Seq. ID no. 13503858
MAISVAASSSMAVMVPRVPAVSTRCSAVPYLPPRSFGRSSFTVPLKLVSGNGLQKVELLKTRASSEETSSIDTNELITDLKEKWDGLENKSTVLIYGGGAIVAVWLSSIVVGAINSVPLLPKVMELVGLGYTGWFVYRYLLFKSSRKELAEDIESLKKKIAGSE

SEQ ID NO: 43972 - protein, 154 aa, Arabidopsis thaliana
  peptide (1)..(154): Ceres Seq. ID no. 13503859
MAVMVPRVPAVSTRCSAVPYLPPRSFGRSSFTVPLKLVSGNGLQKVELLKTRASSEETSSIDTNELITDLKEKWDGLENKSTVLIYGGGAIVAVWLSSIVVGAINSVPLLPKVMELVGLGYTGWFVYRYLLFKSSRKELAEDIESLKKKIAGSE

SEQ ID NO: 43973 - protein, 151 aa, Arabidopsis thaliana
  peptide (1)..(151): Ceres Seq. ID no. 13503860
MVPRVPAVSTRCSAVPYLPPRSFGRSSFTVPLKLVSGNGLQKVELLKTRASSEETSSIDTNELITDLKEKWDGLENKSTVLIYGGGAIVAVWLSSIVVGAINSVPLLPKVMELVGLGYTGWFVYRYLLFKSSRKELAEDIESLKKKIAGSE

SEQ ID NO: 43974 - DNA, 1983 bp, Arabidopsis thaliana
  misc_feature (1)..(1983): Ceres Seq. ID no. 12488619
  misc_feature (1)..(1983): Ortholog of  Ceres SEQ ID NO 13595660 as cited in SEQ ID NO 56750
  misc_feature (1)..(1983): Ortholog of  Ceres SEQ ID NO 12608154 as cited in SEQ ID NO 57350
gcattgattgatccaaggaaggagcaaagtagaggatttaacaatggcgtctctttctctcagttctgctcatttctcttcaacttcttcttcatctcgctcctctatatccacttcatcgctttctccgtcgtcaacttctctccctctcttacaatcaccgatccgccgccgttaccgctccctccgccgccgtctctccttctccgtcattccccgtcggacttctcgctccttctccacttccaattctcagattaggtgttcgataaatgagccgttgaaggtgatgatttcgggtgcaccggcttcaggaaaaggcactcaatgtgagctcattgttcacaagtttggtttggtgcacatatcaacaggggatctattgagagcagaggtgtcatctgggacagatattggaaagagagcaaaagagttcatgaactcgggtagtttggttcctgatgagattgttatagcgatggtggctggaagattatcacgtgaagatgctaaagagcatggatggcttcttgatggatttccacggagttttgcccaggcacaaagtctggacaaactgaacgtgaaacctgacatttttatcttactagatgttcctgatgaaattctgatcgatagatgtgttggtcgaaggttggatccagtgactggaaaaatttatcatatcaaaaattaccctcctgaatcagatgaaattaaagcaagactggttacacgcccggatgatacagaggagaaggtaaaagcacggctgcaaatatacaaacaaaattctgaagcgattatttcagcatactcagatgttatggtcaagattgatgcaaacaggccaaaagaagtggttttcgaggagacccagactctactgtctcagatacagttaaagagaatgataaagactgataaagcatctcctgttcaggataaatggagaggaataccgacgagattgaataacattccacattcgagggatatcagggcttatttttatgaagatgtgctgcaagccacaattagatctatcaaggatggtaacacccgtcttcgggtggacattaatatccctgagctaaatccggaaatggatgtttaccggataggaaccttgatggaacttgttcaagctttagctttatcattcgctgacgatggaaaaagagtgaaggtttgtgttcagggatcaatgggggaaggtgcacttgctgggatgccattgcagttggcaggcactcgaaagattttagaatatatggactggggtgatgatgaaactttgggaactttcgtcaagcttggtgcaattggtggtaaagaagttgatgaagaagatgacatgttcatcttagtggctccacaaaatgccgttggaaactgtattatagatgatctacaagcgatgactactgctgctgggaaaaggccagttgtacttatcaatcctcgcctcaaggacttgcccgcttcgagtggcataatgcaaacaatgggcagggagcaaaggctggaatatgctttgacgtttgacaactgctatgtattccggcttctctattatttgggaacacaatacccgattatgggcgctctaaggatgtcttatccataccggtatgagctttataagagagtgaacgaggaaaatggaaaggagaaatatgtcttgctagcaacgtacgctgaaagaccaacccctgaacaaatcgacgatgccttctctggaaaatcgcgggatcaaagcaagaaggcgtcaggaatctgggggttcttgagtagcgtgttttcgtaatggaactaggaagctgaagttgtggaacattcattaaatgctcatctatcagttaccaaacagagagagagtgatgctgctactttttgttcataattttctccttttattatgtctcagattgttgattatcttactttggggcaaataaaactgaaaactgtgattatttt

SEQ ID NO: 43975 - protein, 588 aa, Arabidopsis thaliana
  peptide (1)..(588): Ceres Seq. ID no. 12488620
MASLSLSSAHFSSTSSSSRSSISTSSLSPSSTSLPLLQSPIRRRYRSLRRRLSFSVIPRRTSRSFSTSNSQIRCSINEPLKVMISGAPASGKGTQCELIVHKFGLVHISTGDLLRAEVSSGTDIGKRAKEFMNSGSLVPDEIVIAMVAGRLSREDAKEHGWLLDGFPRSFAQAQSLDKLNVKPDIFILLDVPDEILIDRCVGRRLDPVTGKIYHIKNYPPESDEIKARLVTRPDDTEEKVKARLQIYKQNSEAIISAYSDVMVKIDANRPKEVVFEETQTLLSQIQLKRMIKTDKASPVQDKWRGIPTRLNNIPHSRDIRAYFYEDVLQATIRSIKDGNTRLRVDINIPELNPEMDVYRIGTLMELVQALALSFADDGKRVKVCVQGSMGEGALAGMPLQLAGTRKILEYMDWGDDETLGTFVKLGAIGGKEVDEEDDMFILVAPQNAVGNCIIDDLQAMTTAAGKRPVVLINPRLKDLPASSGIMQTMGREQRLEYALTFDNCYVFRLLYYLGTQYPIMGALRMSYPYRYELYKRVNEENGKEKYVLLATYAERPTPEQIDDAFSGKSRDQSKKASGIWGFLSSVFS

SEQ ID NO: 43976 - protein, 506 aa, Arabidopsis thaliana
  peptide (1)..(506): Ceres Seq. ID no. 12488621
MISGAPASGKGTQCELIVHKFGLVHISTGDLLRAEVSSGTDIGKRAKEFMNSGSLVPDEIVIAMVAGRLSREDAKEHGWLLDGFPRSFAQAQSLDKLNVKPDIFILLDVPDEILIDRCVGRRLDPVTGKIYHIKNYPPESDEIKARLVTRPDDTEEKVKARLQIYKQNSEAIISAYSDVMVKIDANRPKEVVFEETQTLLSQIQLKRMIKTDKASPVQDKWRGIPTRLNNIPHSRDIRAYFYEDVLQATIRSIKDGNTRLRVDINIPELNPEMDVYRIGTLMELVQALALSFADDGKRVKVCVQGSMGEGALAGMPLQLAGTRKILEYMDWGDDETLGTFVKLGAIGGKEVDEEDDMFILVAPQNAVGNCIIDDLQAMTTAAGKRPVVLINPRLKDLPASSGIMQTMGREQRLEYALTFDNCYVFRLLYYLGTQYPIMGALRMSYPYRYELYKRVNEENGKEKYVLLATYAERPTPEQIDDAFSGKSRDQSKKASGIWGFLSSVFS

SEQ ID NO: 43977 - protein, 457 aa, Arabidopsis thaliana
  peptide (1)..(457): Ceres Seq. ID no. 12488622
MNSGSLVPDEIVIAMVAGRLSREDAKEHGWLLDGFPRSFAQAQSLDKLNVKPDIFILLDVPDEILIDRCVGRRLDPVTGKIYHIKNYPPESDEIKARLVTRPDDTEEKVKARLQIYKQNSEAIISAYSDVMVKIDANRPKEVVFEETQTLLSQIQLKRMIKTDKASPVQDKWRGIPTRLNNIPHSRDIRAYFYEDVLQATIRSIKDGNTRLRVDINIPELNPEMDVYRIGTLMELVQALALSFADDGKRVKVCVQGSMGEGALAGMPLQLAGTRKILEYMDWGDDETLGTFVKLGAIGGKEVDEEDDMFILVAPQNAVGNCIIDDLQAMTTAAGKRPVVLINPRLKDLPASSGIMQTMGREQRLEYALTFDNCYVFRLLYYLGTQYPIMGALRMSYPYRYELYKRVNEENGKEKYVLLATYAERPTPEQIDDAFSGKSRDQSKKASGIWGFLSSVFS

SEQ ID NO: 43978 - DNA, 1752 bp, Arabidopsis thaliana
  misc_feature (1)..(1752): Ceres Seq. ID no. 13502518
  misc_feature (1)..(1752): Ortholog of  Ceres SEQ ID NO 14310736 as cited in SEQ ID NO 52901
  misc_feature (1)..(1752): Ortholog of  Ceres SEQ ID NO 15172325 as cited in SEQ ID NO 54668
  misc_feature (1)..(1752): Ortholog of  Ceres SEQ ID NO 13594345 as cited in SEQ ID NO 58043
  misc_feature (1)..(1752): Ortholog of  Ceres SEQ ID NO 12614112 as cited in SEQ ID NO 60891
  misc_feature (1)..(1752): Ortholog of  Ceres SEQ ID NO 13662880 as cited in SEQ ID NO 65422
  misc_feature (1)..(1752): Ortholog of  Ceres SEQ ID NO 12779098 as cited in SEQ ID NO 67698
  misc_feature (1)..(1752): Ortholog of  Ceres SEQ ID NO 13596180 as cited in SEQ ID NO 67941
  misc_feature (1)..(1752): Ortholog of  Ceres SEQ ID NO 13591190 as cited in SEQ ID NO 68044
  misc_feature (1)..(1752): Ortholog of  Ceres SEQ ID NO 13596089 as cited in SEQ ID NO 68373
ataaaacggagtcctataagcgtaaaggaatcatattcctatcaatcaaaaatacaaatcgactttcatattttctctgcataagagagaaagaaaatgggatctcatgtcgcacaaaaacaacacgtagtttgcgttccttatccggctcaaggccacatcaacccaatgatgaaagtggctaaactcctttacgccaaaggcttccatattaccttcgtcaacaccgtctacaaccacaaccgtctcctccggtcccgtgggcctaacgccgttgacgggcttccttctttccggtttgagtccatccctgacggtctacccgagactgacgtggacgtcactcaggacatccctactctttgcgagtccacaatgaagcactgtctcgctccattcaaggagcttctccggcagatcaacgcaagggatgatgttcctcctgtgagctgtatcgtatccgacggttgtatgagcttcacacttgatgctgcggaggagctcggtgtcccggaggttcttttttggacaactagtgcttgtggcttcttggcttacctttactactatcgcttcatcgagaagggattatcaccaataaaagatgagagttacttaaccaaggaacacttggacacaaaaatagactggataccatcgatgaagaacctaagactaaaagacatccctagcttcatccgaacgactaatcctgacgacatcatgctcaactttatcatccgtgaggctgaccgagccaaacgcgcttcagctatcattctcaacacgtttgatgatctcgaacacgacgttatccaatctatgaaatccattgtacctccggtttattctattggaccgttacatttactagagaaacaagagagcggcgagtatagtgaaatcggacggacaggatcgaatctttggagagaggagactgagtgtctggactggctaaacacgaaagctagaaacagtgttgtgtacgttaacttcgggagtataactgttttgagcgcaaaacagcttgtggagtttgcatggggtttggctgcaacggggaaagagtttttgtgggtgatccggccggatttagtagccggggatgaggcaatggttccaccggagtttttaacggctacggcggaccggaggatgttggcaagttggtgtcctcaagagaaagtcctttctcatccggccattggagggttcttgacgcattgcgggtggaactcgacgttggaaagtctatgcggtggagttccaatggtgtgttggccgttttttgcagagcaacaaactaattgtaagttttctcgtgacgaatgggaggttgggattgagattggtggagatgtgaagagagaagaggttgaggcggtggttagggagttgatggatgaagagaagggaaagaatatgagagagaaggcggaagagtggcggcgcttggcgaatgaagcgacggagcataagcatggttcttctaaattgaactttgagatgctcgttaataaggttcttttaggggagtagagactagtaaatatggatttcaagaaaaaagggatttaagcacacaagagtagaccattgctcacaaagaacctctttatttcccaaattaattactcatttactcataatcaaataaacatcttcttattcatcacaaaccaataaaacttactttcctcagttcaaatatttcatactattagactttgttttgataaaaaattgttc

SEQ ID NO: 43979 - protein, 481 aa, Arabidopsis thaliana
  peptide (1)..(481): Ceres Seq. ID no. 13502519
MGSHVAQKQHVVCVPYPAQGHINPMMKVAKLLYAKGFHITFVNTVYNHNRLLRSRGPNAVDGLPSFRFESIPDGLPETDVDVTQDIPTLCESTMKHCLAPFKELLRQINARDDVPPVSCIVSDGCMSFTLDAAEELGVPEVLFWTTSACGFLAYLYYYRFIEKGLSPIKDESYLTKEHLDTKIDWIPSMKNLRLKDIPSFIRTTNPDDIMLNFIIREADRAKRASAIILNTFDDLEHDVIQSMKSIVPPVYSIGPLHLLEKQESGEYSEIGRTGSNLWREETECLDWLNTKARNSVVYVNFGSITVLSAKQLVEFAWGLAATGKEFLWVIRPDLVAGDEAMVPPEFLTATADRRMLASWCPQEKVLSHPAIGGFLTHCGWNSTLESLCGGVPMVCWPFFAEQQTNCKFSRDEWEVGIEIGGDVKREEVEAVVRELMDEEKGKNMREKAEEWRRLANEATEHKHGSSKLNFEMLVNKVLLGE

SEQ ID NO: 43980 - protein, 457 aa, Arabidopsis thaliana
  peptide (1)..(457): Ceres Seq. ID no. 13502520
MMKVAKLLYAKGFHITFVNTVYNHNRLLRSRGPNAVDGLPSFRFESIPDGLPETDVDVTQDIPTLCESTMKHCLAPFKELLRQINARDDVPPVSCIVSDGCMSFTLDAAEELGVPEVLFWTTSACGFLAYLYYYRFIEKGLSPIKDESYLTKEHLDTKIDWIPSMKNLRLKDIPSFIRTTNPDDIMLNFIIREADRAKRASAIILNTFDDLEHDVIQSMKSIVPPVYSIGPLHLLEKQESGEYSEIGRTGSNLWREETECLDWLNTKARNSVVYVNFGSITVLSAKQLVEFAWGLAATGKEFLWVIRPDLVAGDEAMVPPEFLTATADRRMLASWCPQEKVLSHPAIGGFLTHCGWNSTLESLCGGVPMVCWPFFAEQQTNCKFSRDEWEVGIEIGGDVKREEVEAVVRELMDEEKGKNMREKAEEWRRLANEATEHKHGSSKLNFEMLVNKVLLGE

SEQ ID NO: 43981 - protein, 456 aa, Arabidopsis thaliana
  peptide (1)..(456): Ceres Seq. ID no. 13502521
MKVAKLLYAKGFHITFVNTVYNHNRLLRSRGPNAVDGLPSFRFESIPDGLPETDVDVTQDIPTLCESTMKHCLAPFKELLRQINARDDVPPVSCIVSDGCMSFTLDAAEELGVPEVLFWTTSACGFLAYLYYYRFIEKGLSPIKDESYLTKEHLDTKIDWIPSMKNLRLKDIPSFIRTTNPDDIMLNFIIREADRAKRASAIILNTFDDLEHDVIQSMKSIVPPVYSIGPLHLLEKQESGEYSEIGRTGSNLWREETECLDWLNTKARNSVVYVNFGSITVLSAKQLVEFAWGLAATGKEFLWVIRPDLVAGDEAMVPPEFLTATADRRMLASWCPQEKVLSHPAIGGFLTHCGWNSTLESLCGGVPMVCWPFFAEQQTNCKFSRDEWEVGIEIGGDVKREEVEAVVRELMDEEKGKNMREKAEEWRRLANEATEHKHGSSKLNFEMLVNKVLLGE

SEQ ID NO: 43982 - DNA, 1604 bp, Arabidopsis thaliana
  misc_feature (1)..(1604): Ceres Seq. ID no. 13503043
  misc_feature (1)..(1604): Ortholog of  Ceres SEQ ID NO 13639120 as cited in SEQ ID NO 56708
gagcgagtgattaatgggacattaatgttacatatagaaaaacaaaaaaataagttattgcctttatacaacaaagttcccaaaattttgaattttttgtaatcatctctaagattctgttaatggtctcgcctgagacatcatcatcacattaccaatcatctccaatggcaaaatacgccggaacaagaaccagaccggttgtatgtatctccgacgtcgttctcttccttggcggagctttcatgtcactaatcctcgtctggtctttcttctccttctcttcaatctccccaaatctcaccgtgaaaaacgaagaatcctccaacaaatgttcttcaggaatcgatatgagccaagatccaaccgacccggtttactacgacgacccggatctaacctacacaatcgaaaaaccggttaaaaactgggacgagaaacgaagacgttggttaaatctacacccttcgtttatccccggagctgagaatcgtacggttatggtaacaggatcacaatctgcgccgtgtaaaaacccaatcggagatcatttgttgcttcgattttttaagaacaaagttgattattgtcggatccatggtcatgatatattctatagtaacgctcttcttcatccgaagatgaattcttattgggcgaaacttccggcggttaaagcggcgatgattgctcatcctgaggcggagtggatctggtgggttgattctgatgctttgtttacggatatggattttacgccgccgtggcgacggtataaggagcataatcttgttgttcatggttggccgggagtgatttataatgatcggagctggacggcgttaaacgccggagtttttctcattaggaattgtcagtggtctatggaactcattgacacgtggacaggtatgggaccagtgagtccagagtacgcaaaatggggacaaatccaacggtcaatattcaaagacaaactcttcccagagtcagatgatcaaacggctctgctttacttactctacaaacacagagaagtgtattatccaaagatatacctcgaaggagacttttatttcgaaggatattggttagagatcgtaccgggtttatccaacgtaacggaacggtatctggagatggaaagagaagacgccacgttgcgtagacgacacgcagagaaagtgagcgaacgatacgctgcgtttcgtgaggaacggtttttaaaaggagaaagaggcgggaaaggaagcaaacggagaccgttcgtgacgcattttacgggatgtcaaccttgtagtggtgatcataacaagatgtacgatggtgacacgtgttggaatgggatgatcaaagccattaatttcgctgataatcaagtgatgcgtaaatatggtttcgtacactcggatctaggcaagacttcccctcttcaacctgtaccgttcgattatcctgatgagccttggtgaaataattgtgttttgttgttttataaactctttagatgtgcttttataatgagttgattattataatccatgaagtgaaaggtttataatgcggaatctttttgaataattcaatgattattggtttatttg

SEQ ID NO: 43983 - protein, 449 aa, Arabidopsis thaliana
  peptide (1)..(449): Ceres Seq. ID no. 13503044
MVSPETSSSHYQSSPMAKYAGTRTRPVVCISDVVLFLGGAFMSLILVWSFFSFSSISPNLTVKNEESSNKCSSGIDMSQDPTDPVYYDDPDLTYTIEKPVKNWDEKRRRWLNLHPSFIPGAENRTVMVTGSQSAPCKNPIGDHLLLRFFKNKVDYCRIHGHDIFYSNALLHPKMNSYWAKLPAVKAAMIAHPEAEWIWWVDSDALFTDMDFTPPWRRYKEHNLVVHGWPGVIYNDRSWTALNAGVFLIRNCQWSMELIDTWTGMGPVSPEYAKWGQIQRSIFKDKLFPESDDQTALLYLLYKHREVYYPKIYLEGDFYFEGYWLEIVPGLSNVTERYLEMEREDATLRRRHAEKVSERYAAFREERFLKGERGGKGSKRRPFVTHFTGCQPCSGDHNKMYDGDTCWNGMIKAINFADNQVMRKYGFVHSDLGKTSPLQPVPFDYPDEPW

SEQ ID NO: 43984 - protein, 434 aa, Arabidopsis thaliana
  peptide (1)..(434): Ceres Seq. ID no. 13503045
MAKYAGTRTRPVVCISDVVLFLGGAFMSLILVWSFFSFSSISPNLTVKNEESSNKCSSGIDMSQDPTDPVYYDDPDLTYTIEKPVKNWDEKRRRWLNLHPSFIPGAENRTVMVTGSQSAPCKNPIGDHLLLRFFKNKVDYCRIHGHDIFYSNALLHPKMNSYWAKLPAVKAAMIAHPEAEWIWWVDSDALFTDMDFTPPWRRYKEHNLVVHGWPGVIYNDRSWTALNAGVFLIRNCQWSMELIDTWTGMGPVSPEYAKWGQIQRSIFKDKLFPESDDQTALLYLLYKHREVYYPKIYLEGDFYFEGYWLEIVPGLSNVTERYLEMEREDATLRRRHAEKVSERYAAFREERFLKGERGGKGSKRRPFVTHFTGCQPCSGDHNKMYDGDTCWNGMIKAINFADNQVMRKYGFVHSDLGKTSPLQPVPFDYPDEPW

SEQ ID NO: 43985 - protein, 408 aa, Arabidopsis thaliana
  peptide (1)..(408): Ceres Seq. ID no. 13503046
MSLILVWSFFSFSSISPNLTVKNEESSNKCSSGIDMSQDPTDPVYYDDPDLTYTIEKPVKNWDEKRRRWLNLHPSFIPGAENRTVMVTGSQSAPCKNPIGDHLLLRFFKNKVDYCRIHGHDIFYSNALLHPKMNSYWAKLPAVKAAMIAHPEAEWIWWVDSDALFTDMDFTPPWRRYKEHNLVVHGWPGVIYNDRSWTALNAGVFLIRNCQWSMELIDTWTGMGPVSPEYAKWGQIQRSIFKDKLFPESDDQTALLYLLYKHREVYYPKIYLEGDFYFEGYWLEIVPGLSNVTERYLEMEREDATLRRRHAEKVSERYAAFREERFLKGERGGKGSKRRPFVTHFTGCQPCSGDHNKMYDGDTCWNGMIKAINFADNQVMRKYGFVHSDLGKTSPLQPVPFDYPDEPW

SEQ ID NO: 43986 - DNA, 1641 bp, Arabidopsis thaliana
  misc_feature (1)..(1641): Ceres Seq. ID no. 12489203
  misc_feature (1)..(1641): Ortholog of  Ceres SEQ ID NO 13594068 as cited in SEQ ID NO 58624
atgaggagctttatatatttagcataatatctttcagaagtgtgaggccttgttaattaagctcttcttctctatctctctctctccctctcaacctctcaccatggtagctcaagctcctcatgatgatcatcaggatgatgagaaattagcagcagcgagacaaaaagagatcgaagattggttaccaattacttcatcaagaaatgcaaagtggtggtactctgcttttcacaatgtcaccgccatggtcggtgccggagttcttggactcccttacgccatgtctcagctcggatggggaccgggaattgcagtgttggttttgtcatgggtcataacactatacacattatggcaaatggtggaaatgcatgaaatggttcctggaaagcgttttgatcgttaccatgagctcggacaacacgcgtttggagaaaaactcggtctttatatcgttgtgccgcaacaattgatcgttgaaatcggtgtttgcatcgtttatatggtcactggaggcaaatctttaaagaaatttcatgagcttgtttgtgatgattgtaaaccaatcaagcttacttatttcatcatgatctttgcttcggttcacttcgtcctctctcatcttcctaatttcaattccatctccggcgtttctcttgctgctgccgttatgtctctcagctactcaacaatcgcatgggcatcatcagcaagcaaaggtgttcaagaagacgttcaatacggttacaaagcgaaaacaacagccggtacggttttcaatttcttcagcggtttaggtgatgtggcatttgcttacgcgggtcataatgtggtccttgagatccaagcaactatcccttcaacgcctgagaaaccctcaaaaggtcccatgtggagaggagtcatcgttgcttacatcgtcgtagcgctctgttatttccccgtggctctcgttggatactacattttcgggaacggagtcgaagataatattctcatgtcacttaagaaaccggcgtggttaatcgccacggcgaacatcttcgtcgtgatccatgtcattggtagttaccagatatatgcaatgccggtatttgatatgatggagactttattggtcaagaagctaaatttcagaccaaccacaactcttcggttctttgtccgtaatttctacgttgctgcaactatgtttgttggtatgacgtttccgttcttcggtgggcttttggcgttctttggtggattcgcgtttgccccaaccacatacttcctcccttgcgtcatttggttagccatctacaaacccaagaaatacagcttgtcttggtgggccaactgggtatgcatcgtgtttggtcttttcttgatggtcctatcgccaattggagggctaaggacaatcgttattcaagcaaaaggatacaagttttactcataaacgctatgtaattccactaattaagaaacatatctttatattaatatatgtgtgaagaagtttttaagagatcaacacgagacatttatagaagaatcaatggtctggtctgaatctaaatgtagcttttagggtttgtattttcgtgtgtgttatatatattatataaaacaataatattttgctcaaaaaaattt

SEQ ID NO: 43987 - protein, 446 aa, Arabidopsis thaliana
  peptide (1)..(446): Ceres Seq. ID no. 12489204
MVAQAPHDDHQDDEKLAAARQKEIEDWLPITSSRNAKWWYSAFHNVTAMVGAGVLGLPYAMSQLGWGPGIAVLVLSWVITLYTLWQMVEMHEMVPGKRFDRYHELGQHAFGEKLGLYIVVPQQLIVEIGVCIVYMVTGGKSLKKFHELVCDDCKPIKLTYFIMIFASVHFVLSHLPNFNSISGVSLAAAVMSLSYSTIAWASSASKGVQEDVQYGYKAKTTAGTVFNFFSGLGDVAFAYAGHNVVLEIQATIPSTPEKPSKGPMWRGVIVAYIVVALCYFPVALVGYYIFGNGVEDNILMSLKKPAWLIATANIFVVIHVIGSYQIYAMPVFDMMETLLVKKLNFRPTTTLRFFVRNFYVAATMFVGMTFPFFGGLLAFFGGFAFAPTTYFLPCVIWLAIYKPKKYSLSWWANWVCIVFGLFLMVLSPIGGLRTIVIQAKGYKFYS

SEQ ID NO: 43988 - protein, 398 aa, Arabidopsis thaliana
  peptide (1)..(398): Ceres Seq. ID no. 12489205
MVGAGVLGLPYAMSQLGWGPGIAVLVLSWVITLYTLWQMVEMHEMVPGKRFDRYHELGQHAFGEKLGLYIVVPQQLIVEIGVCIVYMVTGGKSLKKFHELVCDDCKPIKLTYFIMIFASVHFVLSHLPNFNSISGVSLAAAVMSLSYSTIAWASSASKGVQEDVQYGYKAKTTAGTVFNFFSGLGDVAFAYAGHNVVLEIQATIPSTPEKPSKGPMWRGVIVAYIVVALCYFPVALVGYYIFGNGVEDNILMSLKKPAWLIATANIFVVIHVIGSYQIYAMPVFDMMETLLVKKLNFRPTTTLRFFVRNFYVAATMFVGMTFPFFGGLLAFFGGFAFAPTTYFLPCVIWLAIYKPKKYSLSWWANWVCIVFGLFLMVLSPIGGLRTIVIQAKGYKFYS

SEQ ID NO: 43989 - protein, 386 aa, Arabidopsis thaliana
  peptide (1)..(386): Ceres Seq. ID no. 12489206
MSQLGWGPGIAVLVLSWVITLYTLWQMVEMHEMVPGKRFDRYHELGQHAFGEKLGLYIVVPQQLIVEIGVCIVYMVTGGKSLKKFHELVCDDCKPIKLTYFIMIFASVHFVLSHLPNFNSISGVSLAAAVMSLSYSTIAWASSASKGVQEDVQYGYKAKTTAGTVFNFFSGLGDVAFAYAGHNVVLEIQATIPSTPEKPSKGPMWRGVIVAYIVVALCYFPVALVGYYIFGNGVEDNILMSLKKPAWLIATANIFVVIHVIGSYQIYAMPVFDMMETLLVKKLNFRPTTTLRFFVRNFYVAATMFVGMTFPFFGGLLAFFGGFAFAPTTYFLPCVIWLAIYKPKKYSLSWWANWVCIVFGLFLMVLSPIGGLRTIVIQAKGYKFYS

SEQ ID NO: 43990 - DNA, 951 bp, Arabidopsis thaliana
  misc_feature (1)..(951): Ceres Seq. ID no. 12559128
  misc_feature (1)..(951): Ortholog of  Ceres SEQ ID NO 14304528 as cited in SEQ ID NO 53293
gtcaaaaccccaaatattaaaaaacttatgtttattgctctctctctctgtttctcactactcttactagactcctccatagctaagctccacctactagattagcctccacgcgcttttattattactactgccacagtggcaaatccaccttcttccctctcatggccaccacaaccatcatcatcttcaacacctttcgccgccgtctcaatcccacctgatcactcttcctcctccgtcgccgccgttggaatcagtactactccagactacatgttaggtcttcgaaacatcattctcttatctccaccaccgacgcagataacacggccatctcttcctccggtaaacttcgcggcggtggaagacaacaacacagttggagagaaagtatgcagagactgtggaaacagagcaaagaaagagtgtttgttcgaaagatgtagaacttgttgtaaaagcagaggatacaactgtgtcactcacgtgaagagcacgtggattccttcttctgcaactcgttcttcatcttctccttctgagaggaagaagaagctcaaaatcgataaacagagttcccctaatgtctcgctacttccgacaaccacttctcgtcaagagagaggcttcagagaggggttaccggggaaaattgaagctccggcggtttttaaacggacgagagtaacagcgataagcaacaacgagcaagcagagattggttatcaagcaacagtaactataagtggtcatatcttcaaaggctttcttcattactatggtgttgatcataacaaagcttttccatgtctttctcaaaaatgatggaaactacttcataggattctgtgtataaagtttctctgttttcatctcaaagtttttgtctttttttaactaagtggattttatatatattcgacattaagggacaaaacattaatgggc

SEQ ID NO: 43991 - protein, 183 aa, Arabidopsis thaliana
  peptide (1)..(183): Ceres Seq. ID no. 12559129
MLGLRNIILLSPPPTQITRPSLPPVNFAAVEDNNTVGEKVCRDCGNRAKKECLFERCRTCCKSRGYNCVTHVKSTWIPSSATRSSSSPSERKKKLKIDKQSSPNVSLLPTTTSRQERGFREGLPGKIEAPAVFKRTRVTAISNNEQAEIGYQATVTISGHIFKGFLHYYGVDHNKAFPCLSQK

SEQ ID NO: 43992 - DNA, 779 bp, Arabidopsis thaliana; identical to SEQ ID NO: 36727
  misc_feature (1)..(779): Ceres Seq. ID no. 12580269
  misc_feature (1)..(779): Ortholog of  Ceres SEQ ID NO 13595763 as cited in SEQ ID NO 57864

SEQ ID NO: 43993 - protein, 122 aa, Arabidopsis thaliana; identical to SEQ ID NO: 36728
  peptide (1)..(122): Ceres Seq. ID no. 12580270

SEQ ID NO: 43994 - protein, 117 aa, Arabidopsis thaliana; identical to SEQ ID NO: 36729
  peptide (1)..(117): Ceres Seq. ID no. 12580271

SEQ ID NO: 43995 - protein, 89 aa, Arabidopsis thaliana; identical to SEQ ID NO: 36730
  peptide (1)..(89): Ceres Seq. ID no. 12580272

SEQ ID NO: 43996 - DNA, 1868 bp, Arabidopsis thaliana
  misc_feature (1)..(1868): Ceres Seq. ID no. 12488517
  misc_feature (1)..(1868): Ortholog of  Ceres SEQ ID NO 13600220 as cited in SEQ ID NO 0
aaatcatcacaaacttgttctcttccaaaagaccaaaaattagaaaccatggcattgcaaaagttccctctcctggggcttctttttctcataaccattgtcgtctcttcgacaatagccgtcgatgatcctgtgtgcccaacgacgtccaaactaagccgagcaagtttccctaatgggtttgtgtttggcacagctactgctgcgtttcaggttgaaggtgcaattaatgaaacttgtcgtggacctgctctatgggatatcttctgtaagagaaatccagagagatgtagtggccacaacgccgatgtggccgttgatttcttccatcgttataaggaagatattcaactaatgaagaatctaaacacagacgcattcagactctcaatcgcatggtcaagaatatttcctcatgggagaaaggagaagggagtgagtcaagctggtgtgaaattctaccacgacctgatcgatgagctccttaaaaatggtataattccgtttgtgactgttttccattgggacactccacaagatttagaagacgaatatggcggtttcttaagcgagaacattgtgaaagatttccgagaatatgcagattatgttttcactgaatacggtggaaaagtgaaaaactggatcactttcaacgagccatgggtcttcgctcatgcaggttacgacgtaggcaagaaggcgccaggacgttgttctcgctaccttaaaggttgtgaagaccgagatggacgatcaggttatgaggcttatctagttagtcacaacctcctcaacgctcatgcagaagctgttgaagttttccgccaaaaggttaaaggtgggaaaattggaatcgcacatagtccggcttggttcgaaccacatgatcttaaagattcaaatgacgttccaactgttagccgtgtacttgactttatgttgggatggcatctagacccaactacttttggagattatccacaaatcatgaaagaccttcttggtcacagattgcccaaattcacttcttcacaaaaagcaaaattgaaagattcgaccgatttcgtagggcttaactactatacttcaacattttcaaaccataatgaaaagccagatccgtctacaccaagttggaagcaagattctcttgttgcttgggaacctaagaatgtagatcacagcgccattggtagccagcctcttaccgctgcattgcccgtctacgctaaaggttttagaagtcttttaaagtacatcaaagataaatacgcaaacccggaaattatgatcatggaaaatggatatggagataaacttaaggacaaagattcggttgaggttggtactgctgattataacaggaaatactatcttcagaggcatcttctagctatgaacgaagctatttgcattgacaaagtgagagttacgggatactttgtatggtcattattagataactttgaatggcaagatggttataataacagattcggactctattacgtcgatttcaaaaataacctcacacgttatgagaaagaatcagccaagtactacaaagatttcctcggtcaaggtgttcgtccatccgcgctcaagaaggatgagctttaagttatattttgaggatttggttttctgttcaatgcttctttcctatgttttagtttgtgattgatcatgattcatgaagtcttggttaataataataaaagtgttttgtattccttcagtttctagcttatttgacatgatcaagaatgctttagtataaatatattatccttatatgaaggtatctttaccttcaaaacatgaagaaatattgtattatatatattaaaaaaagtcttaaattt

SEQ ID NO: 43997 - protein, 540 aa, Arabidopsis thaliana
  peptide (1)..(540): Ceres Seq. ID no. 12488518
KSSQTCSLPKDQKLETMALQKFPLLGLLFLITIVVSSTIAVDDPVCPTTSKLSRASFPNGFVFGTATAAFQVEGAINETCRGPALWDIFCKRNPERCSGHNADVAVDFFHRYKEDIQLMKNLNTDAFRLSIAWSRIFPHGRKEKGVSQAGVKFYHDLIDELLKNGIIPFVTVFHWDTPQDLEDEYGGFLSENIVKDFREYADYVFTEYGGKVKNWITFNEPWVFAHAGYDVGKKAPGRCSRYLKGCEDRDGRSGYEAYLVSHNLLNAHAEAVEVFRQKVKGGKIGIAHSPAWFEPHDLKDSNDVPTVSRVLDFMLGWHLDPTTFGDYPQIMKDLLGHRLPKFTSSQKAKLKDSTDFVGLNYYTSTFSNHNEKPDPSTPSWKQDSLVAWEPKNVDHSAIGSQPLTAALPVYAKGFRSLLKYIKDKYANPEIMIMENGYGDKLKDKDSVEVGTADYNRKYYLQRHLLAMNEAICIDKVRVTGYFVWSLLDNFEWQDGYNNRFGLYYVDFKNNLTRYEKESAKYYKDFLGQGVRPSALKKDEL

SEQ ID NO: 43998 - protein, 524 aa, Arabidopsis thaliana
  peptide (1)..(524): Ceres Seq. ID no. 12488519
MALQKFPLLGLLFLITIVVSSTIAVDDPVCPTTSKLSRASFPNGFVFGTATAAFQVEGAINETCRGPALWDIFCKRNPERCSGHNADVAVDFFHRYKEDIQLMKNLNTDAFRLSIAWSRIFPHGRKEKGVSQAGVKFYHDLIDELLKNGIIPFVTVFHWDTPQDLEDEYGGFLSENIVKDFREYADYVFTEYGGKVKNWITFNEPWVFAHAGYDVGKKAPGRCSRYLKGCEDRDGRSGYEAYLVSHNLLNAHAEAVEVFRQKVKGGKIGIAHSPAWFEPHDLKDSNDVPTVSRVLDFMLGWHLDPTTFGDYPQIMKDLLGHRLPKFTSSQKAKLKDSTDFVGLNYYTSTFSNHNEKPDPSTPSWKQDSLVAWEPKNVDHSAIGSQPLTAALPVYAKGFRSLLKYIKDKYANPEIMIMENGYGDKLKDKDSVEVGTADYNRKYYLQRHLLAMNEAICIDKVRVTGYFVWSLLDNFEWQDGYNNRFGLYYVDFKNNLTRYEKESAKYYKDFLGQGVRPSALKKDEL

SEQ ID NO: 43999 - protein, 422 aa, Arabidopsis thaliana
  peptide (1)..(422): Ceres Seq. ID no. 12488520
MKNLNTDAFRLSIAWSRIFPHGRKEKGVSQAGVKFYHDLIDELLKNGIIPFVTVFHWDTPQDLEDEYGGFLSENIVKDFREYADYVFTEYGGKVKNWITFNEPWVFAHAGYDVGKKAPGRCSRYLKGCEDRDGRSGYEAYLVSHNLLNAHAEAVEVFRQKVKGGKIGIAHSPAWFEPHDLKDSNDVPTVSRVLDFMLGWHLDPTTFGDYPQIMKDLLGHRLPKFTSSQKAKLKDSTDFVGLNYYTSTFSNHNEKPDPSTPSWKQDSLVAWEPKNVDHSAIGSQPLTAALPVYAKGFRSLLKYIKDKYANPEIMIMENGYGDKLKDKDSVEVGTADYNRKYYLQRHLLAMNEAICIDKVRVTGYFVWSLLDNFEWQDGYNNRFGLYYVDFKNNLTRYEKESAKYYKDFLGQGVRPSALKKDEL

SEQ ID NO: 44000 - DNA, 2019 bp, Arabidopsis thaliana
  misc_feature (1)..(2019): Ceres Seq. ID no. 12489150
  misc_feature (1)..(2019): Ortholog of  Ceres SEQ ID NO 13646221 as cited in SEQ ID NO 20310
  misc_feature (1)..(2019): Ortholog of  Ceres SEQ ID NO 14311423 as cited in SEQ ID NO 53911
aaagggttttgcttcgaattcaagtgtctcccttcactttctctctctctattgctgctctgtttctgctgtcaattccctaagaaagtcctgatttttagggtgatcgagagaagttgaagaatcatgtttattgagtttccttttttgatccatagggtcatctaattttgctaattttattgtcatctccttcaggtaagggattgttgttgccaatggggtggctaactaaaatccttaaaggttctagccataagttttctgatggacaatgtaatggaagatatagagaagatagaaacttggaaggtcctcgttattctgcggaaggatctgattttgacaaagaggagattgaatgtgctattgcactttctctttctgaacaagaacatgtaattccacaagatgacaaaggaaagaaaataatcgagtacaaatctgaaaccgaagaagatgacgatgacgatgaggatgaggatgaagaatacatgagagctcagctagaagcagcagaggaagaggaaagacgggtagctcaagctcaaatcgaggaagaagagaaaaggagagctgaagctcaactagaagaaacagagaaactgcttgcaaaagctcgattagaagaggaagaaatgaggcgttctaaagcccaactggaggaagatgagctactcgccaaggcccttcaagaaagtatgaatgtgggatctcctcctcgatatgatccaggaaatatacttcaaccatatcccttcctcattccttctagtcacaggatatgtgtcggttgccaagctgagataggacatggaaggtttctgagtgcatgggtggcgtttggcatcctgaatgtttctgttgcaatgcatgtgataagcccatcatagattatgagttctcaatgtcaggaaatcggccttatcacaaattatgttacaaggagcagcatcatcctaaatgtgatgtttgccataactttattccgacaaatccagctggtcttattgagtatagggcacatcccttttggatgcaaaagtattgtccttcacatgagcgtgatggaactcctcgttgttgcagttgtgagcgaatggagccaaaagatacaaaatatctcattcttgatgatggtcgaaaactgtgtcttgaatgtctcgactcagccattatggacactcatgaatgccaaccattgtaccttgagatacgtgaattttacgaaggcttacatatgaaagtggaacagtcaaattcctatgcttttggtggagagatcagctctaaacgagctatggaaggagagaaacacggacatcatcatttacctgaaactagaggactttgtttgtctgaagaacaaactgtcaccacggtgttaaggagaccaagaattggggcaggctacaagttaatagacatgatcacagagccttgcaggctgatacgtcgttgtgaagtcactgcgattctcattttatatggacttcctcgtttgttaaccgggtcaatccttgctcatgagatgatgcatgcatggcttcgactaaatgggtatccaaatcttagaccagaagtggaagaaggaatatgtcaagttttagcacacatgtggttggaatctgagacttatgctggctctacattagtagacatcgcatcttcttcatcatctgctgtggtgtcagcatcgtccaagaaaggtgagaggtctgattttgagaagaaacttggtgagtttttcaagcatcaaatcgagtcggattcttcatcggcatatggggatgggttcaggcaaggtaaccaagcagttcttaagcatggtctgaggcgaaccctcgaccatattcgcttgaccggtacatttcctaaatggatttaaactataaaaagagagaaaacaagctttgttatagttttttagagtatagacttgagaagaaaagaaaaagaaaaatgtataggttacaacaatacacacatttaagtgtcataaagtttccactttttaag

SEQ ID NO: 44001 - protein, 351 aa, Arabidopsis thaliana
  peptide (1)..(351): Ceres Seq. ID no. 12489151
MGGVWHPECFCCNACDKPIIDYEFSMSGNRPYHKLCYKEQHHPKCDVCHNFIPTNPAGLIEYRAHPFWMQKYCPSHERDGTPRCCSCERMEPKDTKYLILDDGRKLCLECLDSAIMDTHECQPLYLEIREFYEGLHMKVEQSNSYAFGGEISSKRAMEGEKHGHHHLPETRGLCLSEEQTVTTVLRRPRIGAGYKLIDMITEPCRLIRRCEVTAILILYGLPRLLTGSILAHEMMHAWLRLNGYPNLRPEVEEGICQVLAHMWLESETYAGSTLVDIASSSSSAVVSASSKKGERSDFEKKLGEFFKHQIESDSSSAYGDGFRQGNQAVLKHGLRRTLDHIRLTGTFPKWI

SEQ ID NO: 44002 - protein, 326 aa, Arabidopsis thaliana
  peptide (1)..(326): Ceres Seq. ID no. 12489152
MSGNRPYHKLCYKEQHHPKCDVCHNFIPTNPAGLIEYRAHPFWMQKYCPSHERDGTPRCCSCERMEPKDTKYLILDDGRKLCLECLDSAIMDTHECQPLYLEIREFYEGLHMKVEQSNSYAFGGEISSKRAMEGEKHGHHHLPETRGLCLSEEQTVTTVLRRPRIGAGYKLIDMITEPCRLIRRCEVTAILILYGLPRLLTGSILAHEMMHAWLRLNGYPNLRPEVEEGICQVLAHMWLESETYAGSTLVDIASSSSSAVVSASSKKGERSDFEKKLGEFFKHQIESDSSSAYGDGFRQGNQAVLKHGLRRTLDHIRLTGTFPKWI

SEQ ID NO: 44003 - protein, 283 aa, Arabidopsis thaliana
  peptide (1)..(283): Ceres Seq. ID no. 12489153
MQKYCPSHERDGTPRCCSCERMEPKDTKYLILDDGRKLCLECLDSAIMDTHECQPLYLEIREFYEGLHMKVEQSNSYAFGGEISSKRAMEGEKHGHHHLPETRGLCLSEEQTVTTVLRRPRIGAGYKLIDMITEPCRLIRRCEVTAILILYGLPRLLTGSILAHEMMHAWLRLNGYPNLRPEVEEGICQVLAHMWLESETYAGSTLVDIASSSSSAVVSASSKKGERSDFEKKLGEFFKHQIESDSSSAYGDGFRQGNQAVLKHGLRRTLDHIRLTGTFPKWI

SEQ ID NO: 44004 - DNA, 995 bp, Arabidopsis thaliana
  misc_feature (1)..(995): Ceres Seq. ID no. 12462179
  misc_feature (1)..(995): Ortholog of  Ceres SEQ ID NO 13661969 as cited in SEQ ID NO 61215
  misc_feature (1)..(995): Ortholog of  Ceres SEQ ID NO 12614809 as cited in SEQ ID NO 68808
  misc_feature (1)..(995): Ortholog of  Ceres SEQ ID NO 12634366 as cited in SEQ ID NO 0
  misc_feature (1)..(995): Ortholog of  Ceres SEQ ID NO 14309113 as cited in SEQ ID NO 0
  misc_feature (1)..(995): Ortholog of  Ceres SEQ ID NO 15175257 as cited in SEQ ID NO 0
aatgtgtacgtcttttgcataagaagaaacagagagcattatcaattattaacaattacacaagacagcgagattgtaaaagagtaagagagagagaatggcaggagaggcagaggctttggccacgacggcaccgttagctccggtcaccagtcagcgaaaagtacggaacgatttggaggaaacattaccaaaaccatacatggcaagagcattagcagctccagatacagagcatccgaatggaacagaaggtcacgatagcaaaggaatgagtgttatgcaacaacatgttgctttcttcgaccaaaacgacgatggaatcgtctatccttgggagacttataagggatttcgtgaccttggtttcaacccaatttcctctatcttttggaccttactcataaacttagcgttcagctacgttacacttccgagttgggtgccatcaccattattgccggtttatatcgacaacatacacaaagccaagcatgggagtgattcgagcacctatgacaccgaaggaaggtatgtcccagttaacctcgagaacatatttagcaaatacgcgctaacggttaaagataagttatcatttaaagaggtttggaatgtaaccgagggaaatcgaatggcaatcgatccttttggatggctttcaaacaaagttgaatggatactactctatattcttgctaaggacgaagatggtttcctatctaaagaagctgtgagaggttgctttgatggaagtttatttgaacaaattgccaaagagagggccaattctcgcaaacaagactaagaatgtgtgtgtttggttagcgaataaagctttttgaagaaaagcattgtgtaatttagcttctttcgtcttgttattcagtttggggatttgtataattaatgtgtttgtaaactatgtttcaaagttatataaataagagaagatgttacaaaaaaaaaaaaaagactaataagaagaatttggt

SEQ ID NO: 44005 - protein, 236 aa, Arabidopsis thaliana
  peptide (1)..(236): Ceres Seq. ID no. 12462180
MAGEAEALATTAPLAPVTSQRKVRNDLEETLPKPYMARALAAPDTEHPNGTEGHDSKGMSVMQQHVAFFDQNDDGIVYPWETYKGFRDLGFNPISSIFWTLLINLAFSYVTLPSWVPSPLLPVYIDNIHKAKHGSDSSTYDTEGRYVPVNLENIFSKYALTVKDKLSFKEVWNVTEGNRMAIDPFGWLSNKVEWILLYILAKDEDGFLSKEAVRGCFDGSLFEQIAKERANSRKQD

SEQ ID NO: 44006 - protein, 201 aa, Arabidopsis thaliana
  peptide (1)..(201): Ceres Seq. ID no. 12462181
MARALAAPDTEHPNGTEGHDSKGMSVMQQHVAFFDQNDDGIVYPWETYKGFRDLGFNPISSIFWTLLINLAFSYVTLPSWVPSPLLPVYIDNIHKAKHGSDSSTYDTEGRYVPVNLENIFSKYALTVKDKLSFKEVWNVTEGNRMAIDPFGWLSNKVEWILLYILAKDEDGFLSKEAVRGCFDGSLFEQIAKERANSRKQD

SEQ ID NO: 44007 - protein, 178 aa, Arabidopsis thaliana
  peptide (1)..(178): Ceres Seq. ID no. 12462182
MSVMQQHVAFFDQNDDGIVYPWETYKGFRDLGFNPISSIFWTLLINLAFSYVTLPSWVPSPLLPVYIDNIHKAKHGSDSSTYDTEGRYVPVNLENIFSKYALTVKDKLSFKEVWNVTEGNRMAIDPFGWLSNKVEWILLYILAKDEDGFLSKEAVRGCFDGSLFEQIAKERANSRKQD

SEQ ID NO: 44008 - DNA, 3088 bp, Arabidopsis thaliana
  misc_feature (1)..(3088): Ceres Seq. ID no. 12489219
  misc_feature (1)..(3088): Ortholog of  Ceres SEQ ID NO 13592852 as cited in SEQ ID NO 20709
  misc_feature (1)..(3088): Ortholog of  Ceres SEQ ID NO 13532807 as cited in SEQ ID NO 53012
  misc_feature (1)..(3088): Ortholog of  Ceres SEQ ID NO 14313425 as cited in SEQ ID NO 54973
  misc_feature (1)..(3088): Ortholog of  Ceres SEQ ID NO 13663060 as cited in SEQ ID NO 60964
  misc_feature (1)..(3088): Ortholog of  Ceres SEQ ID NO 13656849 as cited in SEQ ID NO 65764
  misc_feature (1)..(3088): Ortholog of  Ceres SEQ ID NO 13500573 as cited in SEQ ID NO 67431
  misc_feature (1)..(3088): Ortholog of  Ceres SEQ ID NO 13656501 as cited in SEQ ID NO 69206
acttcaaacctcaaagcaaccactgaatctcgactttgatcaattgagagagaaatgaacaccggcggtggccaatacacggattttccggcggtggaaactcacggaggacagttcataagttacgatatcttcggtagtttattcgagatcacatctaagtatcgtcctccgattataccaattggtcgtggagcttatggaatcgtttgctctgtgttggatacggagacgaacgagctagtagcgatgaagaagatagctaatgcttttgataatcatatggatgctaagcgtacgcttcgtgagatcaagcttcttcgtcatcttgatcatgaaaacattatagctataagagatgttgttccaccaccactaagaagacagttcagtgatgtttatatctctactgaattaatggatactgatcttcatcaaatcatcagatctaaccagagtttatcagaagaacactgtcagtacttcttgtaccagctacttcgaggactgaagtatatccactcagctaacattattcatagggatttaaagccgagcaatcttctgttgaacgcgaattgcgatttaaagatttgtgatttcggtcttgctagacctacttcagagaatgattttatgactgagtatgttgttacgagatggtatagagcacctgagcttctgttgaactcttcagattacacagctgctattgatgtttggtctgttggttgtatctttatggagcttatgaatagaaagcctttgttccctggtaaagaccatgttcatcaaatgcgcttattgacagagttgcttggcacaccgacagaatctgatctcggttttactcacaatgaggatgcgaaaagatacatccggcaacttcccaacttcccacgtcagcccttagctaaacttttctctcatgttaacccaatggccattgatcttgttgacagaatgttgacgtttgaccccaacagaagaatcactgttgaacaagctctgaatcaccagtaccttgctaaattgcacgacccgaatgatgagccaatctgtcaaaagccattctcttttgagttcgaacaacagcctctggatgaggaacagataaaagagatgatctaccaagaagccatagcactcaatccaacatacggttagaagtgcagcagccccgtgaatgcctgaatttcaggccattgttgacaaaaatagtgaaagatttctgcttgattttgagacatggctagttcagttactggcgatgcagaaacagcgatatcagcagattcaagcaccaaacgccgtggtggaggttggattacctttccgtttatgatagctacgttgttaggcttgacaatagctgcgtggggttggttacttaacttgatcgtctacctgatcgaggaattcaacgtgaagagcattgcagcggctcagattgctaatattgttagtggttgtatctgtatggttccagctgttgcagccattgcatctgactctttctttggaaccattcctgttatctcagtttcagctttcatttctcttatgggtgtagctctactgactctaactgcttcacttgacactttaagacctagaccctgcgaaacagcttcaatactatgccagtctccttcgaaaacccagctcggagtcctttacacggccataactctagcctctataggaacaggtgggacacggttcacattagcaactgctggtgcgaaccagtatgaaaaaactaaagaccaaggaagctttttcaactggtttttcttcacaacatatctagccggagctataagtgcaaccgccattgtctacaccgaagacaatatcagctggacccttgggtttggtctgtctgtagccgctaatttcttcagttttttggttttcgtctcggggaaaagattctacaagcatgacaagcctttgggaagtcccttcacaagtctactatgcgtcattttcgcagcattacgcaaaagaaaagctgtggtttccaccaacgaaaaagactaccacaatgaatcaatcacaatgcccacaaagagtttcaggttctttaaccgtgcagcattgaaacaggaagacgaggtaaaaccagatggcacaattcgcaatccatggagactatgcagcgttcaacaagtggaagatttcaaagcagtcataagaatcatccctctcgccttagccacaatattcttgagcactccaatcgcaatgcaactaagcttaacagttcttcaaggtctggtgatggaccggaggcttggtcctagcttcaaaatccctgcaggctctctccaagtcataacacttctctccacttgcctatttatcatagtcaacgatagggttctctatccattttaccaaaagttaacgggaaagcacctcacaccgctccaacgagttgggataggccatgcgttcaacattctaagcatggctgtgactgccatagttgaagcaaagcgattaaagatagtacagaagggtcattttctcggatcatcatctgttgctgacatgtcagtcttatggctcttccctcctctagtcatagtaggaatcggagaggccttccatttcccagggaatgtagctctgtgctatcaagagtttccagagtctatgagaagcaccgcaacatcgataacctcggtggtgattgggatatgtttctacacaagcactgctttgatagatctgattcaaaggaccacggcgtggttaccagatgacataaaccatggaagagttgacaatgtttactggattttagtcataggaggagtcttgaatcttggctattttcttgtgtgttcttggctatacagatacagaaacctcaaggatgatgatcataagcaagctgcaaatgtctctcactgatctttaagctggagaaagaaagaacatgtcctttgttgttatcatttgcatttctttacagagagctttgtctgaaagtatctccaatttgtagccattgaaaaacagtttttcatatgtagaattgatttggaaatttgtggtaatataatcgttttgtttc

SEQ ID NO: 44009 - protein, 558 aa, Arabidopsis thaliana
  peptide (1)..(558): Ceres Seq. ID no. 12489220
MASSVTGDAETAISADSSTKRRGGGWITFPFMIATLLGLTIAAWGWLLNLIVYLIEEFNVKSIAAAQIANIVSGCICMVPAVAAIASDSFFGTIPVISVSAFISLMGVALLTLTASLDTLRPRPCETASILCQSPSKTQLGVLYTAITLASIGTGGTRFTLATAGANQYEKTKDQGSFFNWFFFTTYLAGAISATAIVYTEDNISWTLGFGLSVAANFFSFLVFVSGKRFYKHDKPLGSPFTSLLCVIFAALRKRKAVVSTNEKDYHNESITMPTKSFRFFNRAALKQEDEVKPDGTIRNPWRLCSVQQVEDFKAVIRIIPLALATIFLSTPIAMQLSLTVLQGLVMDRRLGPSFKIPAGSLQVITLLSTCLFIIVNDRVLYPFYQKLTGKHLTPLQRVGIGHAFNILSMAVTAIVEAKRLKIVQKGHFLGSSSVADMSVLWLFPPLVIVGIGEAFHFPGNVALCYQEFPESMRSTATSITSVVIGICFYTSTALIDLIQRTTAWLPDDINHGRVDNVYWILVIGGVLNLGYFLVCSWLYRYRNLKDDDHKQAANVSH

SEQ ID NO: 44010 - protein, 527 aa, Arabidopsis thaliana
  peptide (1)..(527): Ceres Seq. ID no. 12489221
MIATLLGLTIAAWGWLLNLIVYLIEEFNVKSIAAAQIANIVSGCICMVPAVAAIASDSFFGTIPVISVSAFISLMGVALLTLTASLDTLRPRPCETASILCQSPSKTQLGVLYTAITLASIGTGGTRFTLATAGANQYEKTKDQGSFFNWFFFTTYLAGAISATAIVYTEDNISWTLGFGLSVAANFFSFLVFVSGKRFYKHDKPLGSPFTSLLCVIFAALRKRKAVVSTNEKDYHNESITMPTKSFRFFNRAALKQEDEVKPDGTIRNPWRLCSVQQVEDFKAVIRIIPLALATIFLSTPIAMQLSLTVLQGLVMDRRLGPSFKIPAGSLQVITLLSTCLFIIVNDRVLYPFYQKLTGKHLTPLQRVGIGHAFNILSMAVTAIVEAKRLKIVQKGHFLGSSSVADMSVLWLFPPLVIVGIGEAFHFPGNVALCYQEFPESMRSTATSITSVVIGICFYTSTALIDLIQRTTAWLPDDINHGRVDNVYWILVIGGVLNLGYFLVCSWLYRYRNLKDDDHKQAANVSH

SEQ ID NO: 44011 - protein, 481 aa, Arabidopsis thaliana
  peptide (1)..(481): Ceres Seq. ID no. 12489222
MVPAVAAIASDSFFGTIPVISVSAFISLMGVALLTLTASLDTLRPRPCETASILCQSPSKTQLGVLYTAITLASIGTGGTRFTLATAGANQYEKTKDQGSFFNWFFFTTYLAGAISATAIVYTEDNISWTLGFGLSVAANFFSFLVFVSGKRFYKHDKPLGSPFTSLLCVIFAALRKRKAVVSTNEKDYHNESITMPTKSFRFFNRAALKQEDEVKPDGTIRNPWRLCSVQQVEDFKAVIRIIPLALATIFLSTPIAMQLSLTVLQGLVMDRRLGPSFKIPAGSLQVITLLSTCLFIIVNDRVLYPFYQKLTGKHLTPLQRVGIGHAFNILSMAVTAIVEAKRLKIVQKGHFLGSSSVADMSVLWLFPPLVIVGIGEAFHFPGNVALCYQEFPESMRSTATSITSVVIGICFYTSTALIDLIQRTTAWLPDDINHGRVDNVYWILVIGGVLNLGYFLVCSWLYRYRNLKDDDHKQAANVSH

SEQ ID NO: 44012 - DNA, 686 bp, Arabidopsis thaliana
  misc_feature (1)..(686): Ceres Seq. ID no. 12466305
  misc_feature (1)..(686): Ortholog of  Ceres SEQ ID NO 12563124 as cited in SEQ ID NO 57104
  misc_feature (1)..(686): Ortholog of  Ceres SEQ ID NO 13598373 as cited in SEQ ID NO 62185
  misc_feature (1)..(686): Ortholog of  Ceres SEQ ID NO 12617639 as cited in SEQ ID NO 65219
atcacataagtctctctcttacattttgaaaccctaatttctcaaaaaaaatgtctgaagttgagtaccggtgctttgtcggcggccttgcctgggccaccaatgatgaagatcttcaaaggacgttctcacagttcggcgacgttatcgattctaagatcattaacgaccgcgagagtggaagatcaaggggattcggattcgtcaccttcaaggacgagaaagccatgagggatgcgattgaagagatgaacggtaaagagctcgatggacgtgtcatcaccgtgaacgaggctcagtcgagaggtagcggcggtggcggaggaggccgtggtggaagcggtggtggttaccgcagcggaggcggtggtggatactcaggaggcggtggcggcggatactcaggaggaggcggtggtggttacgagaggcggtgatggtggaagttacggcggcggtggtggcggctggtaatcaaagatagagttgtttgcgtgctgctgctctgtttttggtttagatttggatttgtgtcnccncttctggtttggttatcgttcgtttggtttacttttttgatgaaacagtttcgtttaagtcttctttgtctggatcgaaatgttaattcgcgtgttgtttactaaatttataacgtttccttttaaccagattcgagattttccctc

SEQ ID NO: 44013 - protein, 128 aa, Arabidopsis thaliana
  peptide (1)..(128): Ceres Seq. ID no. 12466306
MSEVEYRCFVGGLAWATNDEDLQRTFSQFGDVIDSKIINDRESGRSRGFGFVTFKDEKAMRDAIEEMNGKELDGRVITVNEAQSRGSGGGGGGRGGSGGGYRSGGGGGYSGGGGGGYSGGGGGGYERR

SEQ ID NO: 44014 - protein, 69 aa, Arabidopsis thaliana
  peptide (1)..(69): Ceres Seq. ID no. 12466307
MRDAIEEMNGKELDGRVITVNEAQSRGSGGGGGGRGGSGGGYRSGGGGGYSGGGGGGYSGGGGGGYERR

SEQ ID NO: 44015 - DNA, 1135 bp, Arabidopsis thaliana
  misc_feature (1)..(1135): Ceres Seq. ID no. 12489310
  misc_feature (1)..(1135): Ortholog of  Ceres SEQ ID NO 12557497 as cited in SEQ ID NO 43
  misc_feature (1)..(1135): Ortholog of  Ceres SEQ ID NO 15177850 as cited in SEQ ID NO 51765
  misc_feature (1)..(1135): Ortholog of  Ceres SEQ ID NO 14303417 as cited in SEQ ID NO 54923
  misc_feature (1)..(1135): Ortholog of  Ceres SEQ ID NO 15169084 as cited in SEQ ID NO 59115
  misc_feature (1)..(1135): Ortholog of  Ceres SEQ ID NO 12635723 as cited in SEQ ID NO 0
atcaagaaacggatctttcttctctatcttctgaatatcacaaaacccaattagccggagatggccgcaacatccgccgctgctgcagctgcttcttccatcatgggtactcgggtggctcccggtatccatcccggttcaggtcggttcacagccgtgttcggtttcggaaagaagaaggcagctcccaaaaagagtgccaaaaagacggtgactacggaccggcctctttggtacccaggcgccatttctcctgactggcttgatggttccttggttggagattacggttttgatcccttcggtttaggcaaaccggccgagtatcttcaattcgatatcgattcactagaccagaatctggctaagaacttggccggagacgtgatcggaacccgtacggaagctgccgacgccaaatcgacgccgtttcagccgtacagtgaggtgttcggaatccagagattcagggaatgcgaactcatccacggacggtgggcgatgctcgctactctcggcgctctctccgtcgaatggcttaccggcgttacatggcaagacgctggcaaggtggagcttgtagatggatcgtcctacttggggcagccattacctttctcgatctcgacattgatatggatcgaggtgttagtgatcggctacatcgagttccagcgcaacgccgagcttgattcggagaagcgtttataccccggaggcaagttctttgacccgctaggtttagcggctgacccggagaagactgctcaacttcagttagctgagatcaagcatgcacgtcttgcgatggtcgccttcttgggattcgcggttcaagcggctgcaacaggtaaaggtccactcaacaattgggctactcacctcagtgatccactccacaccaccatcatcgataccttctcctcatcttaaaatcattatcatgtgagattctatttgtaacttatgtaaaaacagagctatgatgatactgaatcgactttgggcttttgcttgtttggtttatttacatgtttggcccatgacattaaattgggcttctccttatttactatacctactcgtcgtacattttcaaaatgtatttttgtcgcatatacagattggcccaata

SEQ ID NO: 44016 - protein, 290 aa, Arabidopsis thaliana
  peptide (1)..(290): Ceres Seq. ID no. 12489311
MAATSAAAAAASSIMGTRVAPGIHPGSGRFTAVFGFGKKKAAPKKSAKKTVTTDRPLWYPGAISPDWLDGSLVGDYGFDPFGLGKPAEYLQFDIDSLDQNLAKNLAGDVIGTRTEAADAKSTPFQPYSEVFGIQRFRECELIHGRWAMLATLGALSVEWLTGVTWQDAGKVELVDGSSYLGQPLPFSISTLIWIEVLVIGYIEFQRNAELDSEKRLYPGGKFFDPLGLAADPEKTAQLQLAEIKHARLAMVAFLGFAVQAAATGKGPLNNWATHLSDPLHTTIIDTFSSS

SEQ ID NO: 44017 - protein, 276 aa, Arabidopsis thaliana
  peptide (1)..(276): Ceres Seq. ID no. 12489312
MGTRVAPGIHPGSGRFTAVFGFGKKKAAPKKSAKKTVTTDRPLWYPGAISPDWLDGSLVGDYGFDPFGLGKPAEYLQFDIDSLDQNLAKNLAGDVIGTRTEAADAKSTPFQPYSEVFGIQRFRECELIHGRWAMLATLGALSVEWLTGVTWQDAGKVELVDGSSYLGQPLPFSISTLIWIEVLVIGYIEFQRNAELDSEKRLYPGGKFFDPLGLAADPEKTAQLQLAEIKHARLAMVAFLGFAVQAAATGKGPLNNWATHLSDPLHTTIIDTFSSS

SEQ ID NO: 44018 - DNA, 648 bp, Arabidopsis thaliana
  misc_feature (1)..(648): Ceres Seq. ID no. 13580561
  misc_feature (1)..(648): Ortholog of  Ceres SEQ ID NO 13600689 as cited in SEQ ID NO 0
  misc_feature (1)..(648): Ortholog of  Ceres SEQ ID NO 15178120 as cited in SEQ ID NO 0
aaagaaaaaggttcctttttttgactttgtatccgtagatcatcttcttcttcttcttccagagttttatccttatccgttccatcaaattctctctctaagcaaagatgaataaaggaagcatctttaagatggacaacgatttcgaaaagagaaaagctgaagctggaaggatcagggagaaataccctgatcgaattcctgtgattgtggaaaaggctgagaaaagtgaagtcccaaatatagacaagaagaagtaccttgtgccatcagacctaacagttggtcaatttgtgtatgtgattcggaagagaatcaaactaagtgcagagaaagctatcttcattttcgtagacaatgttcttcctccaacaggagagctaatgtcaagcgtttacgaggataagaaagacgaagatggcttcctttacatcacttacagtggcgagaacacattcggtgcttcttcaatctaatctctgacctctgagaatccgccacgttttaatgcttcttcccaactttcaatttgtgtgtatagtttgttctcaatatttatcatttctcaaataattgtgattactatcttcttttcacttgttaaaatgtacatagactaatcttataatattatcttcctttggtatt

SEQ ID NO: 44019 - protein, 122 aa, Arabidopsis thaliana
  peptide (1)..(122): Ceres Seq. ID no. 13580562
MNKGSIFKMDNDFEKRKAEAGRIREKYPDRIPVIVEKAEKSEVPNIDKKKYLVPSDLTVGQFVYVIRKRIKLSAEKAIFIFVDNVLPPTGELMSSVYEDKKDEDGFLYITYSGENTFGASSI

SEQ ID NO: 44020 - protein, 114 aa, Arabidopsis thaliana
  peptide (1)..(114): Ceres Seq. ID no. 13580563
MDNDFEKRKAEAGRIREKYPDRIPVIVEKAEKSEVPNIDKKKYLVPSDLTVGQFVYVIRKRIKLSAEKAIFIFVDNVLPPTGELMSSVYEDKKDEDGFLYITYSGENTFGASSI

SEQ ID NO: 44021 - DNA, 1445 bp, Arabidopsis thaliana; identical to SEQ ID NO: 23722
  misc_feature (1)..(1445): Ceres Seq. ID no. 13509190
  misc_feature (1)..(1445): Ortholog of  Ceres SEQ ID NO 15177298 as cited in SEQ ID NO 52711

SEQ ID NO: 44022 - protein, 386 aa, Arabidopsis thaliana; identical to SEQ ID NO: 23723
  peptide (1)..(386): Ceres Seq. ID no. 13509191

SEQ ID NO: 44023 - protein, 382 aa, Arabidopsis thaliana; identical to SEQ ID NO: 23724
  peptide (1)..(382): Ceres Seq. ID no. 13509192

SEQ ID NO: 44024 - protein, 331 aa, Arabidopsis thaliana; identical to SEQ ID NO: 23725
  peptide (1)..(331): Ceres Seq. ID no. 13509193

SEQ ID NO: 44025 - DNA, 1588 bp, Arabidopsis thaliana
  misc_feature (1)..(1588): Ceres Seq. ID no. 12489381
  misc_feature (1)..(1588): Ortholog of  Ceres SEQ ID NO 13594345 as cited in SEQ ID NO 58043
  misc_feature (1)..(1588): Ortholog of  Ceres SEQ ID NO 12614112 as cited in SEQ ID NO 60891
  misc_feature (1)..(1588): Ortholog of  Ceres SEQ ID NO 13597574 as cited in SEQ ID NO 64677
  misc_feature (1)..(1588): Ortholog of  Ceres SEQ ID NO 14302832 as cited in SEQ ID NO 64926
  misc_feature (1)..(1588): Ortholog of  Ceres SEQ ID NO 13662880 as cited in SEQ ID NO 65422
  misc_feature (1)..(1588): Ortholog of  Ceres SEQ ID NO 13591190 as cited in SEQ ID NO 68044
  misc_feature (1)..(1588): Ortholog of  Ceres SEQ ID NO 13596089 as cited in SEQ ID NO 68373
acaacaccaaccaataattaaacaaatggccaacaacaattccaactctcccaccggtccacactttctattcgtaacatttccagcccaaggtcacatcaacccatctctcgagctagccaaacgcctcgccggaacaatctctggtgctcgagtcaccttcgccgcctcaatctctgcctacaaccgccgcatgttctctacagaaaacgtccccgaaaccctaatcttcgctacctactccgatggccacgacgacggtttcaaatcctctgcttactccgacaaatctcgtcaagacgccactggaaacttcatgtctgagatgagacgacgtggcaaagagacactaaccgaactaatcgaagataaccggaaacaaaacaggccttttacttgcgtggtttacacgattctcctcacttgggtcgctgagctagcgcgtgagtttcatcttccttctgctcttctttgggtccaaccagtaacagtcttctccattttttaccattacttcaatggctacgaagatgcaatctcagagatggctaataccccctctagttctattaaattaccttctctgccactgcttactgtccgtgatattccttctttcattgtctcttccaatgtctacgcgtttcttctacccgcgtttcgagaacagattgattcactgaaggaagaaataaaccctaagatcctcatcaacactttccaagagcttgagccagaagccatgagctcggttccagataatttcaagattgtccctgtcggtccgttactaacgttgagaacggatttttcgagtcgcggtgaatacatagagtggttggatactaaagcggattcgtctgtgctttatgtttcgttcgggacgcttgccgtgttgagcaagaaacagcttgtggagctttgtaaagcgttgatacaaagtcggagaccattcttgtgggtgattacggataagtcgtacagaaataaagaagatgagcaagagaaggaagaagattgcataagtagtttcagagaagagctcgatgagataggaatggtggtttcatggtgtgatcagtttagggttttgaatcatagatcgataggttgtttcgtgacgcattgcgggtggaactctacgctggagagcttggtttcaggagttccggtggtggcgtttccgcaatggaatgatcagatgatgaacgcgaagcttttagaagattgttggaaaacaggtgtaagagtgatggagaagaaggaagaagaaggagttgtggtggtggatagtgaggagatacggcggtgcattgaggaagttatggaagacaaggcggaggagtttagaggaaatgccacgaggtggaaggatttagcggcggaggctgtgagagaaggaggctcttcctttaatcatctcaaagcttttgtcgatgagcacatgtgattttggtatcagaaattataacaacactccgcttttctgttcttccttgctctgtttcaatgtttacacaatacagtagacagtattttggatgttgattggttagttttgaagatgatgaaatgtaatttattcaag

SEQ ID NO: 44026 - protein, 482 aa, Arabidopsis thaliana
  peptide (1)..(482): Ceres Seq. ID no. 12489382
QHQPIIKQMANNNSNSPTGPHFLFVTFPAQGHINPSLELAKRLAGTISGARVTFAASISAYNRRMFSTENVPETLIFATYSDGHDDGFKSSAYSDKSRQDATGNFMSEMRRRGKETLTELIEDNRKQNRPFTCVVYTILLTWVAELAREFHLPSALLWVQPVTVFSIFYHYFNGYEDAISEMANTPSSSIKLPSLPLLTVRDIPSFIVSSNVYAFLLPAFREQIDSLKEEINPKILINTFQELEPEAMSSVPDNFKIVPVGPLLTLRTDFSSRGEYIEWLDTKADSSVLYVSFGTLAVLSKKQLVELCKALIQSRRPFLWVITDKSYRNKEDEQEKEEDCISSFREELDEIGMVVSWCDQFRVLNHRSIGCFVTHCGWNSTLESLVSGVPVVAFPQWNDQMMNAKLLEDCWKTGVRVMEKKEEEGVVVVDSEEIRRCIEEVMEDKAEEFRGNATRWKDLAAEAVREGGSSFNHLKAFVDEHM

SEQ ID NO: 44027 - protein, 474 aa, Arabidopsis thaliana
  peptide (1)..(474): Ceres Seq. ID no. 12489383
MANNNSNSPTGPHFLFVTFPAQGHINPSLELAKRLAGTISGARVTFAASISAYNRRMFSTENVPETLIFATYSDGHDDGFKSSAYSDKSRQDATGNFMSEMRRRGKETLTELIEDNRKQNRPFTCVVYTILLTWVAELAREFHLPSALLWVQPVTVFSIFYHYFNGYEDAISEMANTPSSSIKLPSLPLLTVRDIPSFIVSSNVYAFLLPAFREQIDSLKEEINPKILINTFQELEPEAMSSVPDNFKIVPVGPLLTLRTDFSSRGEYIEWLDTKADSSVLYVSFGTLAVLSKKQLVELCKALIQSRRPFLWVITDKSYRNKEDEQEKEEDCISSFREELDEIGMVVSWCDQFRVLNHRSIGCFVTHCGWNSTLESLVSGVPVVAFPQWNDQMMNAKLLEDCWKTGVRVMEKKEEEGVVVVDSEEIRRCIEEVMEDKAEEFRGNATRWKDLAAEAVREGGSSFNHLKAFVDEHM

SEQ ID NO: 44028 - protein, 418 aa, Arabidopsis thaliana
  peptide (1)..(418): Ceres Seq. ID no. 12489384
MFSTENVPETLIFATYSDGHDDGFKSSAYSDKSRQDATGNFMSEMRRRGKETLTELIEDNRKQNRPFTCVVYTILLTWVAELAREFHLPSALLWVQPVTVFSIFYHYFNGYEDAISEMANTPSSSIKLPSLPLLTVRDIPSFIVSSNVYAFLLPAFREQIDSLKEEINPKILINTFQELEPEAMSSVPDNFKIVPVGPLLTLRTDFSSRGEYIEWLDTKADSSVLYVSFGTLAVLSKKQLVELCKALIQSRRPFLWVITDKSYRNKEDEQEKEEDCISSFREELDEIGMVVSWCDQFRVLNHRSIGCFVTHCGWNSTLESLVSGVPVVAFPQWNDQMMNAKLLEDCWKTGVRVMEKKEEEGVVVVDSEEIRRCIEEVMEDKAEEFRGNATRWKDLAAEAVREGGSSFNHLKAFVDEHM

SEQ ID NO: 44029 - DNA, 2421 bp, Arabidopsis thaliana
  misc_feature (1)..(2421): Ceres Seq. ID no. 13494625
  misc_feature (1)..(2421): Ortholog of  Ceres SEQ ID NO 15177722 as cited in SEQ ID NO 0
atggctgagtgcagcgtatgtcgttcaaggttggtttctcccagtagcaaagctatttcaagggcttatgacaactacaactacaagattagagtatcctcaaaacaacgagctctcaatgtctttttggtagtcggtgactgcatgctagttggtctacagcccgtcttagtgtacatgtctaaagtggatggaaagttcaactttagtcctattagcgtcaacttcttgacagaaatcgcgaaagttattttcgcgatggtcatgctattattccaggccaggcaccaaaaagttggagagaaacctctactatctctttccacgtttgtccaggcagctcggaacaatatgcttctcgctgttccagcagggttgtatgccattaataactatcttaagttcacaatgcagtttcacacagcaattcacttttctgctgtgccagctatatttcaatcctgctactgtgaagatgctcagcaatctaaaagttctggtgattgctgtactactgaagatgataatgaagcgtcggttttccatcatacagggattagtataaatcagctgcgttctcttcctgaaggagctacaactgtggctgttccaattgctacgggtgcatacatatgtacctttatctttagccttattcagcacgtcatcatgcaggttactgtcccatctttggcatctgtctacaacgagtatgctctaaagagtcagtatgacacaagcatttatctccagctggctgtgttaacactgtggtttgatacatttcttttggctcgtattgttgaacttgctctattctttggtctagtcatctctcttagcaatgttgttgaccatgatcctctcctgggttctgaatgtaaagctttaatttcccttgtgcagaacttatttctttatggttatggtgcgatattcaacttcctcggaatactaggaactgttatatataaaggtcctggcagttttgacatcctacaaggacattctagggctactatgtttctgatactgaacaacgcagcacaagggattctatcctcctttttcttcaaatatgcagatacaatcttgaagaaatattcgtccacagtagccacaatatttactggcatagcatctgcagcactctttggacatatattaacaatgaattttcttctgggaatttctatagttttcatttcaatgcatcagttcttttcacccctttcaaaagcaaaagacgaacaacaaaacggaaacatagagttagttgacgcaaaggatggccatagggctaaagactcattcatcaacatggcagcaggagcaactgaagagtccacaagtgagaaacattacacaatgaacatgacttcgtgttcttcttcatcttcttcttctttcccacgactcttcgccgccaaatcccaaatctataaagctccagttttatccttctccactcctaaacgccgtcgtcctcgtcctcgccggaaccggaaatctaatggctcatcctacgaccacaccgacggcaatcttctttctatctccacttcctctccctccggagccgacgaccaaagtctcagcttaaccctagacgttcaccgtatttcaactctagctaattaccgcttccaattgtttctcgattccagcaaagacgcgttctccgacttgcaaacactaatctcactcgacgataaccggagagtcgttgtctcgtgcaaaaaatcaactatgcaattcgtcggcggtgtggttatactaggattcgtatttggttttgcaattagggttcttgtgaaattaggatcagctttaaagggtaatttccaaagtaatcccaaatttgtagttaggagagataggagtcttggtgggaaggaagtggtcgtctctgttgataacattcgttcatcttcaagagattccaagagcttcatagcttctgatcaagcttctcgaagtaactctacgcctagaaatctccaccttaaagctcagaataatttgccgaaatggtggccgacttcattgactagccagagctttgatgtggtcgacaaagaagactatcagagggaagccaacagaatcgttcgagctccgtgggagtcttcttctgttgagatttgtagtgaagatgcccgagagttcattgctgggctcgctgagaacattggacttgcaaagatagatgctgctagaatggtttctgcagcagttgcagcacgcacacgttcatggtttctacaagcttgggctgagatggaaatggttgcaagagggttggagaaactcatgaagcttgaagagcgacagtctctactgaaaacgtttgttggaatgtgttgcagtgaagatagtcaaagaagcgcagctgaggctctgggtttggtgcactggtaa

SEQ ID NO: 44030 - protein, 806 aa, Arabidopsis thaliana
  peptide (1)..(806): Ceres Seq. ID no. 13494626
MAECSVCRSRLVSPSSKAISRAYDNYNYKIRVSSKQRALNVFLVVGDCMLVGLQPVLVYMSKVDGKFNFSPISVNFLTEIAKVIFAMVMLLFQARHQKVGEKPLLSLSTFVQAARNNMLLAVPAGLYAINNYLKFTMQFHTAIHFSAVPAIFQSCYCEDAQQSKSSGDCCTTEDDNEASVFHHTGISINQLRSLPEGATTVAVPIATGAYICTFIFSLIQHVIMQVTVPSLASVYNEYALKSQYDTSIYLQLAVLTLWFDTFLLARIVELALFFGLVISLSNVVDHDPLLGSECKALISLVQNLFLYGYGAIFNFLGILGTVIYKGPGSFDILQGHSRATMFLILNNAAQGILSSFFFKYADTILKKYSSTVATIFTGIASAALFGHILTMNFLLGISIVFISMHQFFSPLSKAKDEQQNGNIELVDAKDGHRAKDSFINMAAGATEESTSEKHYTMNMTSCSSSSSSSFPRLFAAKSQIYKAPVLSFSTPKRRRPRPRRNRKSNGSSYDHTDGNLLSISTSSPSGADDQSLSLTLDVHRISTLANYRFQLFLDSSKDAFSDLQTLISLDDNRRVVVSCKKSTMQFVGGVVILGFVFGFAIRVLVKLGSALKGNFQSNPKFVVRRDRSLGGKEVVVSVDNIRSSSRDSKSFIASDQASRSNSTPRNLHLKAQNNLPKWWPTSLTSQSFDVVDKEDYQREANRIVRAPWESSSVEICSEDAREFIAGLAENIGLAKIDAARMVSAAVAARTRSWFLQAWAEMEMVARGLEKLMKLEERQSLLKTFVGMCCSEDSQRSAAEALGLVHW

SEQ ID NO: 44031 - protein, 758 aa, Arabidopsis thaliana
  peptide (1)..(758): Ceres Seq. ID no. 13494627
MLVGLQPVLVYMSKVDGKFNFSPISVNFLTEIAKVIFAMVMLLFQARHQKVGEKPLLSLSTFVQAARNNMLLAVPAGLYAINNYLKFTMQFHTAIHFSAVPAIFQSCYCEDAQQSKSSGDCCTTEDDNEASVFHHTGISINQLRSLPEGATTVAVPIATGAYICTFIFSLIQHVIMQVTVPSLASVYNEYALKSQYDTSIYLQLAVLTLWFDTFLLARIVELALFFGLVISLSNVVDHDPLLGSECKALISLVQNLFLYGYGAIFNFLGILGTVIYKGPGSFDILQGHSRATMFLILNNAAQGILSSFFFKYADTILKKYSSTVATIFTGIASAALFGHILTMNFLLGISIVFISMHQFFSPLSKAKDEQQNGNIELVDAKDGHRAKDSFINMAAGATEESTSEKHYTMNMTSCSSSSSSSFPRLFAAKSQIYKAPVLSFSTPKRRRPRPRRNRKSNGSSYDHTDGNLLSISTSSPSGADDQSLSLTLDVHRISTLANYRFQLFLDSSKDAFSDLQTLISLDDNRRVVVSCKKSTMQFVGGVVILGFVFGFAIRVLVKLGSALKGNFQSNPKFVVRRDRSLGGKEVVVSVDNIRSSSRDSKSFIASDQASRSNSTPRNLHLKAQNNLPKWWPTSLTSQSFDVVDKEDYQREANRIVRAPWESSSVEICSEDAREFIAGLAENIGLAKIDAARMVSAAVAARTRSWFLQAWAEMEMVARGLEKLMKLEERQSLLKTFVGMCCSEDSQRSAAEALGLVHW

SEQ ID NO: 44032 - protein, 747 aa, Arabidopsis thaliana
  peptide (1)..(747): Ceres Seq. ID no. 13494628
MSKVDGKFNFSPISVNFLTEIAKVIFAMVMLLFQARHQKVGEKPLLSLSTFVQAARNNMLLAVPAGLYAINNYLKFTMQFHTAIHFSAVPAIFQSCYCEDAQQSKSSGDCCTTEDDNEASVFHHTGISINQLRSLPEGATTVAVPIATGAYICTFIFSLIQHVIMQVTVPSLASVYNEYALKSQYDTSIYLQLAVLTLWFDTFLLARIVELALFFGLVISLSNVVDHDPLLGSECKALISLVQNLFLYGYGAIFNFLGILGTVIYKGPGSFDILQGHSRATMFLILNNAAQGILSSFFFKYADTILKKYSSTVATIFTGIASAALFGHILTMNFLLGISIVFISMHQFFSPLSKAKDEQQNGNIELVDAKDGHRAKDSFINMAAGATEESTSEKHYTMNMTSCSSSSSSSFPRLFAAKSQIYKAPVLSFSTPKRRRPRPRRNRKSNGSSYDHTDGNLLSISTSSPSGADDQSLSLTLDVHRISTLANYRFQLFLDSSKDAFSDLQTLISLDDNRRVVVSCKKSTMQFVGGVVILGFVFGFAIRVLVKLGSALKGNFQSNPKFVVRRDRSLGGKEVVVSVDNIRSSSRDSKSFIASDQASRSNSTPRNLHLKAQNNLPKWWPTSLTSQSFDVVDKEDYQREANRIVRAPWESSSVEICSEDAREFIAGLAENIGLAKIDAARMVSAAVAARTRSWFLQAWAEMEMVARGLEKLMKLEERQSLLKTFVGMCCSEDSQRSAAEALGLVHW

SEQ ID NO: 44033 - DNA, 1851 bp, Arabidopsis thaliana
  misc_feature (1)..(1851): Ceres Seq. ID no. 12488238
  misc_feature (1)..(1851): Ortholog of  Ceres SEQ ID NO 15176922 as cited in SEQ ID NO 55251
aagaagcttcagtaacatctcttaatgatgtctgaagatggctacaacacagattttccaagaaaccctctatacattttctttagtgatttcagatcagttctgaaatttgatgagctcggtttagagatagcgcgaattgctttacccgcagcacttgctttaacagctgatcctattgcatctctagttgacacagccttcataggccaaattggtcctgtagagcttgctgcagttggagtttctattgctttattcaaccaagtttcaagaattgctattttcccacttgttagcatcacaacttcctttgtagcagaagaagatgcttgtagttctcagcaagacacagtccgagatcataaagaatgtattgaaattggtatcaacaatccaactgaggaaactatagaattgattcctgaaaaacataaagattctttatcagatgaatttaaaaccagtagcagtatctttagtattagtaaacctccagccaagaaaagaaacataccatcagcttcatctgctttaatcattggaggcgttctcggcctttttcaagccgtgtttcttatatccgcagccaaacctctcttgagtttcatgggagtaaaacacgattctccaatgatgagaccttctcagagatatctatctttaagatcacttggtgcaccagctgttctactctcacttgcggcacaaggcgttttccgcggatttaaagacacgacaactccgttattcgctactgtgattggagatgtaacaaacataatactcgacccgattttcatatttgttttccgcctaggcgtaacaggagcagccactgctcatgttatatcccaataccttatgtgtggaatactcttgtggaaactgatgggtcaagttgatatcttcaacatgagtaccaaacatcttcagttctgtagattcatgaaaaatggctttcttttgctgatgagagtaattgcagtaacattctgtgtaactctctccgcgtcactagctgcacgagaaggatcaacttccatggcagctttccaagtttgcttgcaggtttggttagctacttcacttcttgcagacgggcaatactagcgagcgcgtttgccaaaaaagactacaaaagagcagcagctaccgcctctcgtgtactgcagttgggattggttctcggttttgtacttgcggttatacttggagcaggattgcattttggagcaagagtgtttacaaaagacgataaagttttacacctaattagcataggacttccgtttgtggcagggacacaaccaattaatgccttagcgtttgtgttcgatggagttaactttggagcatccgatttcggttacgccgcagcttcattagtaatggtggctatagttagcatcttgtgtttgctcttcctctcatcgactcatggttttattggactttggtttggtctcaccatttacatgagtcttagagcagccgttggattctggcggattgggacaggaacaggaccttggtcttttcttaggagctgaagaaggaattttagagggaagagcatgttttaactgttcttaaacctttatttctaatgaggttgtgtaactaaataaaaataccaagagtacaagtctggagattcaaataattctatgcgatttttactgctactcttgtaaatattcaagttgtatcctgtaattagaggtggttagtccaatttttggaggttttatttcagatattgtagttaaatatagaaaatcgatagaacatatagaaactgatttttgtttggttgactatagtgttgaacttcagattaattttttc

SEQ ID NO: 44034 - protein, 362 aa, Arabidopsis thaliana
  peptide (1)..(362): Ceres Seq. ID no. 12488239
MMSEDGYNTDFPRNPLYIFFSDFRSVLKFDELGLEIARIALPAALALTADPIASLVDTAFIGQIGPVELAAVGVSIALFNQVSRIAIFPLVSITTSFVAEEDACSSQQDTVRDHKECIEIGINNPTEETIELIPEKHKDSLSDEFKTSSSIFSISKPPAKKRNIPSASSALIIGGVLGLFQAVFLISAAKPLLSFMGVKHDSPMMRPSQRYLSLRSLGAPAVLLSLAAQGVFRGFKDTTTPLFATVIGDVTNIILDPIFIFVFRLGVTGAATAHVISQYLMCGILLWKLMGQVDIFNMSTKHLQFCRFMKNGFLLLMRVIAVTFCVTLSASLAAREGSTSMAAFQVCLQVWLATSLLADGQY

SEQ ID NO: 44035 - protein, 361 aa, Arabidopsis thaliana
  peptide (1)..(361): Ceres Seq. ID no. 12488240
MSEDGYNTDFPRNPLYIFFSDFRSVLKFDELGLEIARIALPAALALTADPIASLVDTAFIGQIGPVELAAVGVSIALFNQVSRIAIFPLVSITTSFVAEEDACSSQQDTVRDHKECIEIGINNPTEETIELIPEKHKDSLSDEFKTSSSIFSISKPPAKKRNIPSASSALIIGGVLGLFQAVFLISAAKPLLSFMGVKHDSPMMRPSQRYLSLRSLGAPAVLLSLAAQGVFRGFKDTTTPLFATVIGDVTNIILDPIFIFVFRLGVTGAATAHVISQYLMCGILLWKLMGQVDIFNMSTKHLQFCRFMKNGFLLLMRVIAVTFCVTLSASLAAREGSTSMAAFQVCLQVWLATSLLADGQY

SEQ ID NO: 44036 - DNA, 1035 bp, Arabidopsis thaliana; identical to SEQ ID NO: 22638
  misc_feature (1)..(1035): Ceres Seq. ID no. 13509220
  misc_feature (1)..(1035): Ortholog of  Ceres SEQ ID NO 13595072 as cited in SEQ ID NO 55971

SEQ ID NO: 44037 - protein, 267 aa, Arabidopsis thaliana; identical to SEQ ID NO: 22639
  peptide (1)..(267): Ceres Seq. ID no. 13509221

SEQ ID NO: 44038 - protein, 262 aa, Arabidopsis thaliana; identical to SEQ ID NO: 22640
  peptide (1)..(262): Ceres Seq. ID no. 13509222

SEQ ID NO: 44039 - protein, 233 aa, Arabidopsis thaliana; identical to SEQ ID NO: 21214
  peptide (1)..(233): Ceres Seq. ID no. 13509223

SEQ ID NO: 44040 - DNA, 649 bp, Arabidopsis thaliana
  misc_feature (1)..(649): Ceres Seq. ID no. 13509774
  misc_feature (1)..(649): Ortholog of  Ceres SEQ ID NO 13598157 as cited in SEQ ID NO 61570
accaatctcagagcaaattatatacactactacttcttgatcttttgtactatacaaacatatggctccaagaacctctcttgcactcttcgtttctctcaacctcctcttcttcacttgcacctctgcaaccacagggacttgtcctatacagatcagtacttgtgccaatgtgctcaatctagtggacctaacattgggaaacccacctgtaaagccatgttgctcgctcatccaaggcttggctgaccttgaggctgcggcctgcctctgcactgcgctcaaagctagcattcttggaattgtcaatattaaccttcctatcaatctcagcgtactcctcaatgtttgtagtaggaatgctccaaagggtttccagtgcgcgtaagttgaatacctatgacatacctataaaacaaacgaatcatactgatacttgaacatgttttcttatctacttgttgttgttctaaggtttttttttttcttggattgttaaaaatgaacgtacgttctgatgcaataatggaaatggagttgtgtgtataattggcaagtttatatctactccttcgcttcgttgttccttcgtctcttctttgtaattgtgtatttcaaatttgcttaataaaaatatgggtgaaagacc

SEQ ID NO: 44041 - protein, 108 aa, Arabidopsis thaliana
  peptide (1)..(108): Ceres Seq. ID no. 13509775
MAPRTSLALFVSLNLLFFTCTSATTGTCPIQISTCANVLNLVDLTLGNPPVKPCCSLIQGLADLEAAACLCTALKASILGIVNINLPINLSVLLNVCSRNAPKGFQCA

SEQ ID NO: 44042 - protein, 82 aa, Arabidopsis thaliana
  peptide (1)..(82): Ceres Seq. ID no. 13509776
TNLRANYIHYYFLIFCTIQTYGSKNLSCTLRFSQPPLLHLHLCNHRDLSYTDQYLCQCAQSSGPNIGKPTCKAMLLAHPRLG

SEQ ID NO: 44043 - protein, 60 aa, Arabidopsis thaliana
  peptide (1)..(60): Ceres Seq. ID no. 13509777
QSQSKLYTLLLLDLLYYTNIWLQEPLLHSSFLSTSSSSLAPLQPQGLVLYRSVLVPMCSI

SEQ ID NO: 44044 - DNA, 2165 bp, Arabidopsis thaliana
  misc_feature (1)..(2165): Ceres Seq. ID no. 12600007
  misc_feature (1)..(2165): Ortholog of  Ceres SEQ ID NO 14312180 as cited in SEQ ID NO 59480
aaagtgtttattttcagatctcatcgatccatttcttctaaatcttaattcttgtgtgtattgtattgatcaaagatccaaactttcattgctgatccagccgttttagtcttcagtgaggtttggttttggtgttatagaattatgaagagcgggaagcaatcttcgcaacctgaaaagggtacttccaggatcttgtcactgactgtcctgtttatcgcattttgcggtttctccttctacctcggtggtatattttgctctgagagagacaagattgtagccaaggatgtcacaaggacgactacaaaggctgtagcttcccctaaagaacctacagctactcctattcaaatcaaatccgtttctttcccggagtgcgggtcagagttccaagattacaccccgtgcaccgatccaaagaggtggaagaagtatggtgtccatcgcttaagtttcttggagcgtcattgtcctccggtatatgaaaagaatgagtgtttgattccaccaccagacgggtataaaccgcctataagatggcccaagagccgagaacagtgttggtacaggaacgtgccttatgattggatcaataagcaaaagtctaaccagcattggcttaagaaagaaggagataagttccatttccctggtggtggtaccatgttccctcgtggagttagtcactatgttgatttgatgcaagatctgattcctgaaatgaaagacggaacagtcaggaccgccattgatactggctgtggggttgcgagctggggaggcgatcttttggaccgtgggatactatcactctctcttgctccaagagataaccatgaagctcaggttcaatttgctcttgaacgtggaattcctgcgattctcgggatcatctctacgcaacgtctcccttttccttcaaatgcatttgatatggctcattgttcaagatgtcttattccctggacagaatttggtggaatctatttacttgagattcaccgtatagttcgacctggaggtttttgggttctttctggtccacctgtgaactataatagacgatggcgtggatggaacacaaccatggaagatcagaaatctgactacaacaagcttcagtcacttctaacctccatgtgtttcaaaaagtacgctcaaaaagatgacatagccgtgtggcagaaactctcagacaaatcttgctatgacaaaatcgctaagaacatggaagcttaccctcccaaatgtgacgacagtatagaacctgattctgcttggtacactccactccgtccttgcgtggttgccccgacacctaaagtcaagaagtctggtctcggatcaatcccaaaatggcccgagaggttacatgtcgcgcccgagagaatcggtgatgttcacggagggagtgcgaacagtttgaaacacgatgatggtaaatggaagaacagagttaagcattacaagaaagttttaccagctcttgggacagacaagataagaaatgttatggatatgaacactgtttatggaggtttctctgcggccctcattgaggatcccatttgggtcatgaacgttgtatcatcgtacagcgcaaattcgcttcctgttgtctttgatcgcggtctcatcgggacttaccacgactggtgcgaagctttctcaacgtatccaagaacatatgatcttcttcacctcgacagtctttttaccttggagagtcacaggtgtgagatgaagtacattttgctagagatggacaggatcttgcggccgagtggatatgttataatccgagaatcgagttatttcatggacgcaatcacaacgttagcgaaagggataaggtggagttgccggagagaggagactgagtatgcagtcaaaagtgagaagattctggtttgccagaaaaagctatggttttcgtcaaaccaaacctcttgatgagaccacctgtatcatagtgtttatcatctcctgtgatgcacactacagagagaaggatctagtcctttgagtccaagatatagctctataaacaatctcctttttttgttctctttaatttcttgggtatttcacggtatagattgatattatatattttttaattatatttttaatatatagatatattagtatgtggtttaaac

SEQ ID NO: 44045 - protein, 603 aa, Arabidopsis thaliana
  peptide (1)..(603): Ceres Seq. ID no. 12600008
MKSGKQSSQPEKGTSRILSLTVLFIAFCGFSFYLGGIFCSERDKIVAKDVTRTTTKAVASPKEPTATPIQIKSVSFPECGSEFQDYTPCTDPKRWKKYGVHRLSFLERHCPPVYEKNECLIPPPDGYKPPIRWPKSREQCWYRNVPYDWINKQKSNQHWLKKEGDKFHFPGGGTMFPRGVSHYVDLMQDLIPEMKDGTVRTAIDTGCGVASWGGDLLDRGILSLSLAPRDNHEAQVQFALERGIPAILGIISTQRLPFPSNAFDMAHCSRCLIPWTEFGGIYLLEIHRIVRPGGFWVLSGPPVNYNRRWRGWNTTMEDQKSDYNKLQSLLTSMCFKKYAQKDDIAVWQKLSDKSCYDKIAKNMEAYPPKCDDSIEPDSAWYTPLRPCVVAPTPKVKKSGLGSIPKWPERLHVAPERIGDVHGGSANSLKHDDGKWKNRVKHYKKVLPALGTDKIRNVMDMNTVYGGFSAALIEDPIWVMNVVSSYSANSLPVVFDRGLIGTYHDWCEAFSTYPRTYDLLHLDSLFTLESHRCEMKYILLEMDRILRPSGYVIIRESSYFMDAITTLAKGIRWSCRREETEYAVKSEKILVCQKKLWFSSNQTS

SEQ ID NO: 44046 - protein, 429 aa, Arabidopsis thaliana
  peptide (1)..(429): Ceres Seq. ID no. 12600009
MFPRGVSHYVDLMQDLIPEMKDGTVRTAIDTGCGVASWGGDLLDRGILSLSLAPRDNHEAQVQFALERGIPAILGIISTQRLPFPSNAFDMAHCSRCLIPWTEFGGIYLLEIHRIVRPGGFWVLSGPPVNYNRRWRGWNTTMEDQKSDYNKLQSLLTSMCFKKYAQKDDIAVWQKLSDKSCYDKIAKNMEAYPPKCDDSIEPDSAWYTPLRPCVVAPTPKVKKSGLGSIPKWPERLHVAPERIGDVHGGSANSLKHDDGKWKNRVKHYKKVLPALGTDKIRNVMDMNTVYGGFSAALIEDPIWVMNVVSSYSANSLPVVFDRGLIGTYHDWCEAFSTYPRTYDLLHLDSLFTLESHRCEMKYILLEMDRILRPSGYVIIRESSYFMDAITTLAKGIRWSCRREETEYAVKSEKILVCQKKLWFSSNQTS

SEQ ID NO: 44047 - protein, 417 aa, Arabidopsis thaliana
  peptide (1)..(417): Ceres Seq. ID no. 12600010
MQDLIPEMKDGTVRTAIDTGCGVASWGGDLLDRGILSLSLAPRDNHEAQVQFALERGIPAILGIISTQRLPFPSNAFDMAHCSRCLIPWTEFGGIYLLEIHRIVRPGGFWVLSGPPVNYNRRWRGWNTTMEDQKSDYNKLQSLLTSMCFKKYAQKDDIAVWQKLSDKSCYDKIAKNMEAYPPKCDDSIEPDSAWYTPLRPCVVAPTPKVKKSGLGSIPKWPERLHVAPERIGDVHGGSANSLKHDDGKWKNRVKHYKKVLPALGTDKIRNVMDMNTVYGGFSAALIEDPIWVMNVVSSYSANSLPVVFDRGLIGTYHDWCEAFSTYPRTYDLLHLDSLFTLESHRCEMKYILLEMDRILRPSGYVIIRESSYFMDAITTLAKGIRWSCRREETEYAVKSEKILVCQKKLWFSSNQTS

SEQ ID NO: 44048 - DNA, 1652 bp, Arabidopsis thaliana
  misc_feature (1)..(1652): Ceres Seq. ID no. 13647117
  misc_feature (1)..(1652): Ortholog of  Ceres SEQ ID NO 14307863 as cited in SEQ ID NO 20504
aggaaaaaaagaagatctcgctcaccgctctcatttcctcaattctccgtccgtcgaagaagcgaatcgctcgaaattagggtttctactgagagaagatgcgagaaatcataagcattcacatcggacaagctgggatccaggtcggaaattcgtgttgggagctttactgtctcgaacatggaatccagccggacggaatgatgccgagtgatactacagttggtgttgcacacgatgcgttcaatactttctttagcgagactggtgctgggaagcatgtccctagggctgtcttcgttgatctcgagcctaccgttatcgacgaagttcgtactggtacttaccgtcaacttttccatccagagcagctcatttctgggaaagaagatgctgctaacaacttcgctagaggacattacactgttgggaaggaaattgtggatctatgtcttgaccgtgtgaggaaacttgccgacaactgtactggcttacaagggtttttggtgttcaatgctgttggtggtggaactggttctggattgggttctctgttgctagagcgtttgtctgtagattatggaaagaagtctaagcttggttttaccatatacccttctcctcaggtttctactgctgttgtagaaccttacaacagtgttctctcaacgcattcccttcttgaacatacggatgtagctgtcctcttggataacgaagccatctatgacatttgccgcagatccctagatatcgagaggccaacctacacaaacttgaacaggttgatatcacagatcatttcatccttgacaacatctttgaggtttgatggtgccatcaacgtggatatcactgagttccagaccaatcttgtcccatatccccgtatccatttcatgctgtcatcttatgcaccagtcatctcagccgccaaggcttaccacgagcagctatcagtccctgagatcaccaatgccgtttttgagccagctagcatgatggcaaagtgtgacccgagacacggaaagtacatggcctgttgtttgatgtaccgaggagatgttgttcccaaagatgttaatgctgctgttggcaccatcaagacaaagaggactgttcagtttgttgactggtgcccaactgggttcaaatgtggaatcaactaccaacctccaacagttgttccaggtggtgacctcgctaaggttcagagagctgtatgtatgatcagtaacaacacagcagttgcagaggtgttctcacggatcgaccacaagtttgatctcatgtatgcgaagagggcatttgtccactggtacgttggtgaaggaatggaggaaggtgaattctctgaggcacgtgaagacttggccgcactggagaaagattacgaagaagttggtgctgaaggtggagacgatgaagaagatgaaggtgaagactattgacaccttttctcaaaaaaactgcaaccaaaaaaagttttttcgtttatctgttttcacttttgattctgttgattgtttaaatcctgtaaaatattcgttcggtcttcgtgttttatctcggttggatacattttcattggtagagcgaccattgcgagttcccgagttcattatcaagcttttgtgtaccaaactttgata

SEQ ID NO: 44049 - protein, 450 aa, Arabidopsis thaliana; identical to SEQ ID NO: 38746
  peptide (1)..(450): Ceres Seq. ID no. 13647118

SEQ ID NO: 44050 - protein, 416 aa, Arabidopsis thaliana; identical to SEQ ID NO: 38747
  peptide (1)..(416): Ceres Seq. ID no. 13647119

SEQ ID NO: 44051 - protein, 415 aa, Arabidopsis thaliana; identical to SEQ ID NO: 38748
  peptide (1)..(415): Ceres Seq. ID no. 13647120

SEQ ID NO: 44052 - DNA, 1867 bp, Arabidopsis thaliana
  misc_feature (1)..(1867): Ceres Seq. ID no. 13509300
  misc_feature (1)..(1867): Ortholog of  Ceres SEQ ID NO 13593925 as cited in SEQ ID NO 59489
  misc_feature (1)..(1867): Ortholog of  Ceres SEQ ID NO 13657610 as cited in SEQ ID NO 66165
  misc_feature (1)..(1867): Ortholog of  Ceres SEQ ID NO 13598312 as cited in SEQ ID NO 68448
  misc_feature (1)..(1867): Ortholog of  Ceres SEQ ID NO 13596100 as cited in SEQ ID NO 68573
acaatttgataacacaattcacttaattctcactcactctctttccttctctactctctgtttctttcttccatggagctcttctcactctcttctcttctcctactctccactctcttcgttttctacatcttcaagtttgttttcaaaagaagaaaccagagaaactgctacatgcttcactacgagtgctacaagggcatggaagagagaaaactcgacaccgagacttgtgctaaggtcgttcaacgaaacaagaacttgggtcttgaagagtacaggtttctccttcgtactatggctagttccgggataggagaggaaacgtacggcccaagaaatgtgcttgaaggtagagaagactctcctactctccttgacgctcactccgaaatggacgagatcatgttcgacactctcgacaagcttttccacaagacaaaaggctcaatctctccttcagacattgatattctcgttgtcaacgtctcactcttcgctccatctccttccctaacctcacgagtcatcaacagatacaagatgagagaagacatcaaatcctacaatctctcgggactagggtgtagcgcgagcgttatatcgatagatatcgtgcaaaggatgttcgaaactcgtgaaaacgctctcgcactcgtggttagcaccgagacaatgggtcctcactggtactgcggtaaagataggtcaatgatgctctcaaactgtctcttccgtgccggaggaagctctgttctgttaaccaacgcagctaggttcaagaaccaggctttgatgaagctcgtgacagtggtccgggctcatgttggctcagacgacgaggcctactcgtgctgcatacaaatggaggacagagatggtcatccaggctttctcttaaccaaatacctaaaaaaagccgcagctcgagccctaaccaagaacctccaagttctcctccctagagtcttgcctgtcaaggaactgatccgctatgcaatagttcgcgcgcttaaacgaagaacctccgcgaaaagagagcccgcgagctcagggataggtctaaacctaaaaacagggttgcaacatttctgtattcacccgggaggaagagcgattatcgaaggagttgggaaaagcttagggctcacggaattcgacatcgagccagcgagaatggcgcttcataggttcgggaacacatcttctggtggtttatggtatgttcttggctacatggaagctaagaacagactaaagaaaggtgagaagatactaatgatgagtatgggagctggattcgagtctaataattgtgtttgggaggttctaaaggatcttgatgataagaatgtttgggaagattcagttgatcgatatccggaattgtcgagaatccctaatccattcgttgagaagtatgattggatcaacgacgataccatgagcttcgttcgtgttgattgatcacaagtaagcagaaaataacaagatcgattctttttaatatatttgtcaatcaattattatatgaaatgtttctttatcaggcaatatttcgaactttggattatttggaatgtttagacggctatagtcgacgattgatttttattttttaaaatttgaaataaataattaaagcatgtttaattggcgttgttttgtattttattttattttttacaatttgattgtagaattgactagtaaacgaccaattggtgtgtagaggttgatattttagaacagtaacaaaagagtgtgtattcaagttggtgcatttattttgtcagaattacattattgtggcatacccatttatgagtaagactcaacaataaatttcatgtgtgttcgcagatcg

SEQ ID NO: 44053 - protein, 464 aa, Arabidopsis thaliana
  peptide (1)..(464): Ceres Seq. ID no. 13509301
MELFSLSSLLLLSTLFVFYIFKFVFKRRNQRNCYMLHYECYKGMEERKLDTETCAKVVQRNKNLGLEEYRFLLRTMASSGIGEETYGPRNVLEGREDSPTLLDAHSEMDEIMFDTLDKLFHKTKGSISPSDIDILVVNVSLFAPSPSLTSRVINRYKMREDIKSYNLSGLGCSASVISIDIVQRMFETRENALALVVSTETMGPHWYCGKDRSMMLSNCLFRAGGSSVLLTNAARFKNQALMKLVTVVRAHVGSDDEAYSCCIQMEDRDGHPGFLLTKYLKKAAARALTKNLQVLLPRVLPVKELIRYAIVRALKRRTSAKREPASSGIGLNLKTGLQHFCIHPGGRAIIEGVGKSLGLTEFDIEPARMALHRFGNTSSGGLWYVLGYMEAKNRLKKGEKILMMSMGAGFESNNCVWEVLKDLDDKNVWEDSVDRYPELSRIPNPFVEKYDWINDDTMSFVRVD

SEQ ID NO: 44054 - protein, 430 aa, Arabidopsis thaliana
  peptide (1)..(430): Ceres Seq. ID no. 13509302
MLHYECYKGMEERKLDTETCAKVVQRNKNLGLEEYRFLLRTMASSGIGEETYGPRNVLEGREDSPTLLDAHSEMDEIMFDTLDKLFHKTKGSISPSDIDILVVNVSLFAPSPSLTSRVINRYKMREDIKSYNLSGLGCSASVISIDIVQRMFETRENALALVVSTETMGPHWYCGKDRSMMLSNCLFRAGGSSVLLTNAARFKNQALMKLVTVVRAHVGSDDEAYSCCIQMEDRDGHPGFLLTKYLKKAAARALTKNLQVLLPRVLPVKELIRYAIVRALKRRTSAKREPASSGIGLNLKTGLQHFCIHPGGRAIIEGVGKSLGLTEFDIEPARMALHRFGNTSSGGLWYVLGYMEAKNRLKKGEKILMMSMGAGFESNNCVWEVLKDLDDKNVWEDSVDRYPELSRIPNPFVEKYDWINDDTMSFVRVD

SEQ ID NO: 44055 - protein, 421 aa, Arabidopsis thaliana
  peptide (1)..(421): Ceres Seq. ID no. 13509303
MEERKLDTETCAKVVQRNKNLGLEEYRFLLRTMASSGIGEETYGPRNVLEGREDSPTLLDAHSEMDEIMFDTLDKLFHKTKGSISPSDIDILVVNVSLFAPSPSLTSRVINRYKMREDIKSYNLSGLGCSASVISIDIVQRMFETRENALALVVSTETMGPHWYCGKDRSMMLSNCLFRAGGSSVLLTNAARFKNQALMKLVTVVRAHVGSDDEAYSCCIQMEDRDGHPGFLLTKYLKKAAARALTKNLQVLLPRVLPVKELIRYAIVRALKRRTSAKREPASSGIGLNLKTGLQHFCIHPGGRAIIEGVGKSLGLTEFDIEPARMALHRFGNTSSGGLWYVLGYMEAKNRLKKGEKILMMSMGAGFESNNCVWEVLKDLDDKNVWEDSVDRYPELSRIPNPFVEKYDWINDDTMSFVRVD

SEQ ID NO: 44056 - DNA, 1293 bp, Arabidopsis thaliana; identical to SEQ ID NO: 34838
  misc_feature (1)..(1293): Ceres Seq. ID no. 12333690
  misc_feature (1)..(1293): Ortholog of  Ceres SEQ ID NO 13596519 as cited in SEQ ID NO 62572
  misc_feature (1)..(1293): Ortholog of  Ceres SEQ ID NO 12625108 as cited in SEQ ID NO 68102

SEQ ID NO: 44057 - protein, 255 aa, Arabidopsis thaliana; identical to SEQ ID NO: 34839
  peptide (1)..(255): Ceres Seq. ID no. 12333691

SEQ ID NO: 44058 - protein, 221 aa, Arabidopsis thaliana; identical to SEQ ID NO: 34840
  peptide (1)..(221): Ceres Seq. ID no. 12333692

SEQ ID NO: 44059 - protein, 201 aa, Arabidopsis thaliana; identical to SEQ ID NO: 34841
  peptide (1)..(201): Ceres Seq. ID no. 12333693

SEQ ID NO: 44060 - DNA, 1513 bp, Arabidopsis thaliana
  misc_feature (1)..(1513): Ceres Seq. ID no. 12489279
  misc_feature (1)..(1513): Ortholog of  Ceres SEQ ID NO 15172958 as cited in SEQ ID NO 51206
  misc_feature (1)..(1513): Ortholog of  Ceres SEQ ID NO 15171139 as cited in SEQ ID NO 60093
ggccgagaaaaaaaaaaaatgttgccggtcacaagtcgccgccacttcacaatgtccctatatatgctccgttcatcttctccacacatcaatcatcactctttccttcttccttcttttgtttcctccaaattcaaacaccatactttatctcctcctccttctcctcctcctcctcctcctatggctgcgtgcatcgacacctgccgcactggtaaaccccagatttctcctcgcgattcttctaaacaccacgacgatgaatctggctttcgttacatgaactacttccgttatcctgatcgatcttccttcaatggaacccagaccaaaaccctccatactcgtcctttgcttgaagatctcgatcgcgacgctgaagtcgatgatgtttgggccaaaatccgagaagaggctaaatctgatatcgccaaagaacctattgtttccgcttattatcacgcttcgattgtttctcagcgttcgttggaagctgcgttggcgaatactttatctgttaaactcagcaatttgaatcttccaagcaacacgcttttcgatttgttctctggtgttcttcaaggaaacccagatattgttgaatctgtcaagctagatcttttagctgttaaggagagagatcctgcttgtataagctacgttcattgtttccttcactttaaaggcttcctcgcttgtcaagcgcatcgtattgctcatgagctttggactcaggacagaaaaatcctagctttgttgatccagaacagagtctctgaagccttcgctgttgatttccaccctggagctaaaatcggtaccgggattttgctagaccatgctacggctattgtgatcggtgagacggcggttgtggggaacaatgtttcgattctccataacgttacgcttggaggaacggggaaacagtgtggagataggcacccgaagattggcgatggggttttgattggagctgggacttgtattttggggaatatcacgattggtgaaggagctaagattggtgcggggtcggtggtgttgaaagacgtgccgccgcgtacgacggctgttggaaatccggcgaggttgcttggtggtaaagataatccgaaaacgcatgacaagattcctggtttgactatggaccagacgtcgcatatatccgagtggtcggattatgtaatttgaaaaagtctttgtttttggttgttgttgttgtttatggcttttcattgttctctcggcttcttctgttattgaagctggtgaagtatatgatatgcgatgatgctgtttccataatcagatcatttgtctctccataagataacactgattaagatgggattggaaagtaaactcggaaactctgaactctgtttagtggagtttcctgtggttggtttctgattagcagagacttaagatatgtttagtatgtaagtgcttatttggttaaaccatgatttctgtgatcagattgttgggaagaaactgaagattcatc

SEQ ID NO: 44061 - protein, 397 aa, Arabidopsis thaliana
  peptide (1)..(397): Ceres Seq. ID no. 12489280
GREKKKMLPVTSRRHFTMSLYMLRSSSPHINHHSFLLPSFVSSKFKHHTLSPPPSPPPPPPMAACIDTCRTGKPQISPRDSSKHHDDESGFRYMNYFRYPDRSSFNGTQTKTLHTRPLLEDLDRDAEVDDVWAKIREEAKSDIAKEPIVSAYYHASIVSQRSLEAALANTLSVKLSNLNLPSNTLFDLFSGVLQGNPDIVESVKLDLLAVKERDPACISYVHCFLHFKGFLACQAHRIAHELWTQDRKILALLIQNRVSEAFAVDFHPGAKIGTGILLDHATAIVIGETAVVGNNVSILHNVTLGGTGKQCGDRHPKIGDGVLIGAGTCILGNITIGEGAKIGAGSVVLKDVPPRTTAVGNPARLLGGKDNPKTHDKIPGLTMDQTSHISEWSDYVI

SEQ ID NO: 44062 - protein, 391 aa, Arabidopsis thaliana
  peptide (1)..(391): Ceres Seq. ID no. 12489281
MLPVTSRRHFTMSLYMLRSSSPHINHHSFLLPSFVSSKFKHHTLSPPPSPPPPPPMAACIDTCRTGKPQISPRDSSKHHDDESGFRYMNYFRYPDRSSFNGTQTKTLHTRPLLEDLDRDAEVDDVWAKIREEAKSDIAKEPIVSAYYHASIVSQRSLEAALANTLSVKLSNLNLPSNTLFDLFSGVLQGNPDIVESVKLDLLAVKERDPACISYVHCFLHFKGFLACQAHRIAHELWTQDRKILALLIQNRVSEAFAVDFHPGAKIGTGILLDHATAIVIGETAVVGNNVSILHNVTLGGTGKQCGDRHPKIGDGVLIGAGTCILGNITIGEGAKIGAGSVVLKDVPPRTTAVGNPARLLGGKDNPKTHDKIPGLTMDQTSHISEWSDYVI

SEQ ID NO: 44063 - protein, 380 aa, Arabidopsis thaliana
  peptide (1)..(380): Ceres Seq. ID no. 12489282
MSLYMLRSSSPHINHHSFLLPSFVSSKFKHHTLSPPPSPPPPPPMAACIDTCRTGKPQISPRDSSKHHDDESGFRYMNYFRYPDRSSFNGTQTKTLHTRPLLEDLDRDAEVDDVWAKIREEAKSDIAKEPIVSAYYHASIVSQRSLEAALANTLSVKLSNLNLPSNTLFDLFSGVLQGNPDIVESVKLDLLAVKERDPACISYVHCFLHFKGFLACQAHRIAHELWTQDRKILALLIQNRVSEAFAVDFHPGAKIGTGILLDHATAIVIGETAVVGNNVSILHNVTLGGTGKQCGDRHPKIGDGVLIGAGTCILGNITIGEGAKIGAGSVVLKDVPPRTTAVGNPARLLGGKDNPKTHDKIPGLTMDQTSHISEWSDYVI

SEQ ID NO: 44064 - DNA, 1827 bp, Arabidopsis thaliana
  misc_feature (1)..(1827): Ceres Seq. ID no. 12488659
  misc_feature (1)..(1827): Ortholog of  Ceres SEQ ID NO 15177316 as cited in SEQ ID NO 52739
tctctttctctctgactctgaaaaagatgaagtggagaagttaatgttcaccaacttaatactgcaaagtcgaaatctttctttcttcttctttgccttctttcaagtgctttccctctctcattctccttcttcctcctctgtttctttgttgttctaaacttaaaaaaagattgaagttgcaagtaacagaggagctgtctcagatctggttctaaagcgagagaaagagattttgagttgaggaaaaatgagtaaagaagagttcatgaagatccagacttgtgttcttaaagtgaacatacactgtgatggctgtaagcagaaagtcaagaaaatcttgcagaaaatcgaaggtgttttcacgaccaagattgactcagagcaagggaaagtgactgtctctgggagcgtagatccttcagttctcatcaagaagctcgccaaatctggtaaacatgctgaaatctggggagctccaaagggtaacaacaatcccaatcagtcccaaatggccaatcagtttaagggaatgcagattgaccatggaaaagccggaggcggtggtggcggaaacaataataacaacaagaaaggccagaaaaacggcggaggaggtggcggcggtggaggtggaggtaacagtaatgcgccaaagatgggccagcaactgaatccacaacatttgcagcagcttcaacagcttcagaagatgaaagggtttcaagatctgaagcttcctcctcagttaaaaggctctgttcctgtcaacaagaaccaaaaccagaaaggagtcaagtttgatgtccctgaagatgatgatgatgatgatttcagtgacgaattcgatgatgaatttactgatgatgatgacgacgagtttgatgatgagtttgacgatctccctcttccgtctaataagatgaagcccaacatgacgatgatgcctaatgctcaacagatgatgatgaacgctcagaagaatgccaatcttgccggtggtcctgctaaaaacggcggtaaaggcgctcccgctgctggcggcggcggtgccggtggtggaaagggtgctggcggcggtgctaagggtggtcctgggaatcaaaaccaaggtggaggcaagaacggcggtggtggacatccacaagatggtaaaaacggcggtggaggcggtggtcccaacgccggaaaaaagggtaacggcggaggtgggcccatggctggaggagtttcgggaggtttccgacccatgggaggtggaggaccacagaatatgagcatgccaatgggtggtcaaatgggtatgggtggtccgatggggaatatgccggcggttcaggggttaccagcgaccggtccaggcggtgcaccacagggttatttccaaggggccgggatagatcctatgcaaatgcagcaacagcaacaacaacagcaatatttagcggcggttatgaaccagcaacgagctatggggaacgaacggttccaaccaatgatgtacgcaaggccaccaccggcagttaactatatgccgccaaacccgcaccaatatccgaatccgcatccgtatccgtatccgtacccgtatccatatcctccaccttatgggaatgatcaatactctcatgcctttagcgacgagaacacatcaagctgcgatattatgtgagatggttaaaaatcaaaataaaacttttatagtttgtgtgtatttgaatcctaagttggggtttttttcgatggatcgaaatgctaagttgttgtaggtttttttttttcactttgtgatagcttcggtaatttaatagaataatataaaatttg

SEQ ID NO: 44065 - protein, 473 aa, Arabidopsis thaliana
  peptide (1)..(473): Ceres Seq. ID no. 12488660
MSKEEFMKIQTCVLKVNIHCDGCKQKVKKILQKIEGVFTTKIDSEQGKVTVSGSVDPSVLIKKLAKSGKHAEIWGAPKGNNNPNQSQMANQFKGMQIDHGKAGGGGGGNNNNNKKGQKNGGGGGGGGGGGNSNAPKMGQQLNPQHLQQLQQLQKMKGFQDLKLPPQLKGSVPVNKNQNQKGVKFDVPEDDDDDDFSDEFDDEFTDDDDDEFDDEFDDLPLPSNKMKPNMTMMPNAQQMMMNAQKNANLAGGPAKNGGKGAPAAGGGGAGGGKGAGGGAKGGPGNQNQGGGKNGGGGHPQDGKNGGGGGGPNAGKKGNGGGGPMAGGVSGGFRPMGGGGPQNMSMPMGGQMGMGGPMGNMPAVQGLPATGPGGAPQGYFQGAGIDPMQMQQQQQQQQYLAAVMNQQRAMGNERFQPMMYARPPPAVNYMPPNPHQYPNPHPYPYPYPYPYPPPYGNDQYSHAFSDENTSSCDIM

SEQ ID NO: 44066 - protein, 467 aa, Arabidopsis thaliana
  peptide (1)..(467): Ceres Seq. ID no. 12488661
MKIQTCVLKVNIHCDGCKQKVKKILQKIEGVFTTKIDSEQGKVTVSGSVDPSVLIKKLAKSGKHAEIWGAPKGNNNPNQSQMANQFKGMQIDHGKAGGGGGGNNNNNKKGQKNGGGGGGGGGGGNSNAPKMGQQLNPQHLQQLQQLQKMKGFQDLKLPPQLKGSVPVNKNQNQKGVKFDVPEDDDDDDFSDEFDDEFTDDDDDEFDDEFDDLPLPSNKMKPNMTMMPNAQQMMMNAQKNANLAGGPAKNGGKGAPAAGGGGAGGGKGAGGGAKGGPGNQNQGGGKNGGGGHPQDGKNGGGGGGPNAGKKGNGGGGPMAGGVSGGFRPMGGGGPQNMSMPMGGQMGMGGPMGNMPAVQGLPATGPGGAPQGYFQGAGIDPMQMQQQQQQQQYLAAVMNQQRAMGNERFQPMMYARPPPAVNYMPPNPHQYPNPHPYPYPYPYPYPPPYGNDQYSHAFSDENTSSCDIM

SEQ ID NO: 44067 - protein, 386 aa, Arabidopsis thaliana
  peptide (1)..(386): Ceres Seq. ID no. 12488662
MANQFKGMQIDHGKAGGGGGGNNNNNKKGQKNGGGGGGGGGGGNSNAPKMGQQLNPQHLQQLQQLQKMKGFQDLKLPPQLKGSVPVNKNQNQKGVKFDVPEDDDDDDFSDEFDDEFTDDDDDEFDDEFDDLPLPSNKMKPNMTMMPNAQQMMMNAQKNANLAGGPAKNGGKGAPAAGGGGAGGGKGAGGGAKGGPGNQNQGGGKNGGGGHPQDGKNGGGGGGPNAGKKGNGGGGPMAGGVSGGFRPMGGGGPQNMSMPMGGQMGMGGPMGNMPAVQGLPATGPGGAPQGYFQGAGIDPMQMQQQQQQQQYLAAVMNQQRAMGNERFQPMMYARPPPAVNYMPPNPHQYPNPHPYPYPYPYPYPPPYGNDQYSHAFSDENTSSCDIM

SEQ ID NO: 44068 - DNA, 1975 bp, Arabidopsis thaliana
  misc_feature (1)..(1975): Ceres Seq. ID no. 13509683
  misc_feature (1)..(1975): Ortholog of  Ceres SEQ ID NO 15169037 as cited in SEQ ID NO 58715
acctgagctgagactgagagacatctcggtgaagaagtagcagagatgtcgacggtgtacgtgctagagccgccgacaaagggaaaggtcattgtaaatactactcatggtccaatcgacgtcgagctttggcctaaggaagcgcccaaatccgtacggaacttcgttcaactatgcctcgagggttactttgacaacaccatcttccatcgtgtcattcccggttttctcgttcaaggcggcgatcccaccggctccggaaccggtggagatagtatatatggaggtgtctttgccgatgagttccattcaaggctgagatttagccaccgtgggattgttgccatggctaatgcgagctcacctaattctaatggaagtcagttctttttcactttggataagtgtgattggcttgataagaagcacactatctttggcaaggtaacgggcgattcaatctacaatcttttaagactaggagaggttgacacgagtaaggatgatcgacctctggatcctgctccgaaaatattatctgtcgaggttttgtggaacccttttgaagatattgttcctagagtgttagcaaagacatcagaagaatctgctgctgaaatcaaggaacccccaacaaagcccgtgaagaaattgaatttactgtcattcggagaagaagctgaagaagaggaaaaggaactggctgttgtaaagcaaaagattaagagcagtcatgacgtattgaatgatcctcgacttttgaaggcagaagcttcagataaagagaggaacgcatctgagtccaaggaggtactatctgtgcgagaagctctgaatgctaagaaagaagcggctcaaaaagataaaagcttttctgtatctgatacagttggaaatagtgatgatgacgatgatggtgaagatgagactaaatttgatgcaaagatgaggaatcaagtgctcagcagaaggaaggagattggagatacgccttcaaagccgactcagaaaaaaaagagctctagcctgaaaggccgtgaagagtctacgcaaaggtctgatgctgtaagtagtgaagatgagaaaccaaggatggaaaagttgtccttgaagaaaaaaggaataggctcagaagccaaagccgaacatatggagaaaggagacactgatttacagctttacaacgcttctgaacgcgcccggcagttgcataagttgaaaaagcgcagactgcaaggaaatgaggattctgtaagttgtttaccaaatttgtggcttaattttaaatttattttctggcttattatatattccccttcttcgtttcctaaacttgtccttgctttattgtggcatacttattccctaaaagttaaatctaattttgtcagagcaactgtgttagcaaaactcgagaagtttaagcagtctatctctgcaaaaccgtttacctcgagtaatgaaccagtagtgttgacctcgagtagtgaaccagttgacaataaagaagaagatctctctgattggaagaatgtaaagctcaagtttgctcctgagcgtggcaaggataaaatgttacgcagggatgatccagatgcgtatatggtggttgaccctcttcttgaaaagggaaaagagagttcaacagaatgcaagccaaacaaaaacgaagggagcgagaatggtctggaaaatctcttgcctgagtttggaaatnttaaccatttaattttgttttcttatgttgatccttaagatgcccgttcactgtcaaaatctctcctgtttaaacttagatacattcagagacatgaatgagcatnttaaataaggtcactagctccaatgatacagaactaatgtgttaatacatgttatatgtaggaaacttagctatataagtgatatgattttaagcccttcaactgacatttatcttcaatagattggtcatccaggttggatggtattctcc

SEQ ID NO: 44069 - protein, 569 aa, Arabidopsis thaliana
  peptide (1)..(569): Ceres Seq. ID no. 13509684
  misc_feature (558)..(558): Xaa is any aa, unknown or other
MSTVYVLEPPTKGKVIVNTTHGPIDVELWPKEAPKSVRNFVQLCLEGYFDNTIFHRVIPGFLVQGGDPTGSGTGGDSIYGGVFADEFHSRLRFSHRGIVAMANASSPNSNGSQFFFTLDKCDWLDKKHTIFGKVTGDSIYNLLRLGEVDTSKDDRPLDPAPKILSVEVLWNPFEDIVPRVLAKTSEESAAEIKEPPTKPVKKLNLLSFGEEAEEEEKELAVVKQKIKSSHDVLNDPRLLKAEASDKERNASESKEVLSVREALNAKKEAAQKDKSFSVSDTVGNSDDDDDGEDETKFDAKMRNQVLSRRKEIGDTPSKPTQKKKSSSLKGREESTQRSDAVSSEDEKPRMEKLSLKKKGIGSEAKAEHMEKGDTDLQLYNASERARQLHKLKKRRLQGNEDSVSCLPNLWLNFKFIFWLIIYSPSSFPKLVLALLWHTYSLKVKSNFVRATVLAKLEKFKQSISAKPFTSSNEPVVLTSSSEPVDNKEEDLSDWKNVKLKFAPERGKDKMLRRDDPDAYMVVDPLLEKGKESSTECKPNKNEGSENGLENLLPEFGNXNHLILFSYVDP

SEQ ID NO: 44070 - protein, 469 aa, Arabidopsis thaliana
  peptide (1)..(469): Ceres Seq. ID no. 13509685
  misc_feature (458)..(458): Xaa is any aa, unknown or other
MANASSPNSNGSQFFFTLDKCDWLDKKHTIFGKVTGDSIYNLLRLGEVDTSKDDRPLDPAPKILSVEVLWNPFEDIVPRVLAKTSEESAAEIKEPPTKPVKKLNLLSFGEEAEEEEKELAVVKQKIKSSHDVLNDPRLLKAEASDKERNASESKEVLSVREALNAKKEAAQKDKSFSVSDTVGNSDDDDDGEDETKFDAKMRNQVLSRRKEIGDTPSKPTQKKKSSSLKGREESTQRSDAVSSEDEKPRMEKLSLKKKGIGSEAKAEHMEKGDTDLQLYNASERARQLHKLKKRRLQGNEDSVSCLPNLWLNFKFIFWLIIYSPSSFPKLVLALLWHTYSLKVKSNFVRATVLAKLEKFKQSISAKPFTSSNEPVVLTSSSEPVDNKEEDLSDWKNVKLKFAPERGKDKMLRRDDPDAYMVVDPLLEKGKESSTECKPNKNEGSENGLENLLPEFGNXNHLILFSYVDP

SEQ ID NO: 44071 - DNA, 1040 bp, Arabidopsis thaliana
  misc_feature (1)..(1040): Ceres Seq. ID no. 12489363
  misc_feature (1)..(1040): Ortholog of  Ceres SEQ ID NO 13595569 as cited in SEQ ID NO 56778
  misc_feature (1)..(1040): Ortholog of  Ceres SEQ ID NO 12611159 as cited in SEQ ID NO 59821
agaagagagtcatgggaagatctccttgctgcgagaaagaacacatgaacaaaggtgcttggactaaagaagaagatgagagactagtctcttacatcaagtctcacggtgaaggttgttggcgatctcttcctagagccgctggtctccttcgctgcggtaaaagctgccgtcttcggtggattaactatctccgacctgatctcaaaagaggaaactttacacatgatgaagatgaacttatcatcaagcttcatagcctcctaggcaacaagtggtctttgattgcggcgagattacctggaagaacagataacgagatcaagaactactggaacacacatataaagaggaagcttttgagcaaagggattgatccagccactcatagagggatcaacgaggcaaaaatttctgatttgaagaaaacaaaggaccaaattgtaaaagatgtttcttttgtgacaaagtttgaggaaacagacaagtctggggaccagaagcaaaataagtatattcgaaatgggttagtttgcaaagaagagagagttgttgttgaagaaaaaataggcccagatttgaatcttgagcttaggatcagtccaccatggcaaaaccagagagaaatatctacttgcactgcgtcccgtttttacatggaaaacgacatggagtgtagtagtgaaactgtgaaatgtcaaacagagaatagtagcagcattagctattcttctattgatattagtagtagtaacgttggttatgacttcttgggtttgaagacaagaattttggattttcgaagcttggaaatgaaataaatgaatagtattagattcttaatttgtaggtgtgataatgaatgttagattcttatttttgcttcttctttttttatttttcatctttgttttccttttttccacaacatttgtatattaacttgaaattttcaatcagattaccgcaagnccttgtgttcctatgagatcgatgagcattttgatagagatccacacgtgaatttgccatcaggcatc

SEQ ID NO: 44072 - protein, 272 aa, Arabidopsis thaliana
  peptide (1)..(272): Ceres Seq. ID no. 12489364
KRVMGRSPCCEKEHMNKGAWTKEEDERLVSYIKSHGEGCWRSLPRAAGLLRCGKSCRLRWINYLRPDLKRGNFTHDEDELIIKLHSLLGNKWSLIAARLPGRTDNEIKNYWNTHIKRKLLSKGIDPATHRGINEAKISDLKKTKDQIVKDVSFVTKFEETDKSGDQKQNKYIRNGLVCKEERVVVEEKIGPDLNLELRISPPWQNQREISTCTASRFYMENDMECSSETVKCQTENSSSISYSSIDISSSNVGYDFLGLKTRILDFRSLEMK

SEQ ID NO: 44073 - protein, 269 aa, Arabidopsis thaliana
  peptide (1)..(269): Ceres Seq. ID no. 12489365
MGRSPCCEKEHMNKGAWTKEEDERLVSYIKSHGEGCWRSLPRAAGLLRCGKSCRLRWINYLRPDLKRGNFTHDEDELIIKLHSLLGNKWSLIAARLPGRTDNEIKNYWNTHIKRKLLSKGIDPATHRGINEAKISDLKKTKDQIVKDVSFVTKFEETDKSGDQKQNKYIRNGLVCKEERVVVEEKIGPDLNLELRISPPWQNQREISTCTASRFYMENDMECSSETVKCQTENSSSISYSSIDISSSNVGYDFLGLKTRILDFRSLEMK

SEQ ID NO: 44074 - protein, 258 aa, Arabidopsis thaliana
  peptide (1)..(258): Ceres Seq. ID no. 12489366
MNKGAWTKEEDERLVSYIKSHGEGCWRSLPRAAGLLRCGKSCRLRWINYLRPDLKRGNFTHDEDELIIKLHSLLGNKWSLIAARLPGRTDNEIKNYWNTHIKRKLLSKGIDPATHRGINEAKISDLKKTKDQIVKDVSFVTKFEETDKSGDQKQNKYIRNGLVCKEERVVVEEKIGPDLNLELRISPPWQNQREISTCTASRFYMENDMECSSETVKCQTENSSSISYSSIDISSSNVGYDFLGLKTRILDFRSLEMK

SEQ ID NO: 44075 - DNA, 2179 bp, Arabidopsis thaliana
  misc_feature (1)..(2179): Ceres Seq. ID no. 13509312
  misc_feature (1)..(2179): Ortholog of  Ceres SEQ ID NO 13582619 as cited in SEQ ID NO 56520
  misc_feature (1)..(2179): Ortholog of  Ceres SEQ ID NO 13660872 as cited in SEQ ID NO 60830
agttctggctcgtccttcacgccactctctcctatatctctctctcgctctcctccccctttccgccgatcgtcctttccccaccgtcgagtttttccctatccatctccggcaggctttacgttgcacaccagatgtctgttgatctctgcaagaagaatccatcttttctttggtgtgactgtggttatatgagcagggggaggttgtggtgttttcagattatcctcttcaggcactggacttgacttgtcttcaattcctcgacttctctctctttcttcttctcctctcttctttctcgtttctctgttttttttttctgcttgatttgatcaaagggtattcgtttctgctgctccctgtttactgtgaacttgaagactaagttttctttgctaaactctcactttactggtgaagagtttacagaagattgttcaaagttttcccctttggattcttcgccaatggggaaaactcaactcgctcctggatttcgtttccatccgactgatgttgaactcgtgaggtattacttgaagaggaaaatactggggaaaaagctccttgtcgatgctattgctgaagttgacatttacaagtttgaaccccctgatttacctgatatgtcttttataagaagtggggatcttaagtggcacttcttctgccccagggaaaagaagtatgctagtggggtaagggcaaaccgtgcaactgagtgtggctactggaagaccacggggaaggagagaccagttctgtgcaattctgaggttgtgggaaagatcaaaactctggtttatcactttggcaagtcgcctcgtggggagcggactgattgggttatgcatgaatacaggcttgacgacaaagtactgacgcagatgaatgttcctcaggatacttatgtggtgtgtgttctgttcaagaaagatggtcctggacctagaaatggagctcaatatggagctccgtttaaggaagaggactggagtgatgaggaagtacgtactgatgttccttctactagtaatcccacaaaccttcttgagcctagcaaagaaaccactctggctttgactgccccagatgactccaataaggattgttttggtggcatgatatcagagtcatgtgtctcggatttcctaccagctacaactaataccaccagcgagcttccacatccaagtgatgcagctaccactcctatgtctactgcacctctggcagagaccgttcagacccccaacaatgatgacttatattcaatgttggatctatttgatgatgacgaagagttcttagggttcaacaataatgaggtaagatatgatcccggtgtctcagctccagtttgcttagaagaagaaggcattttcaacggactaccagagttgagcagcatgccaaggacggcctcttacgacctagttgaaaactcggagttatacctagagctacaagacctcactgctccattaaatccccaaactgggctacaagacctcactgctccatttaatcctcaaactgggctacaagacctcactgctccatttaatcatcaaactgggctacaagaccacactgctccatttaatcctcaaactgggctacaagaccacactgctccatttaatcatcaaactgggctacaagacctcactgctccatttaatcctcaaactgggctacaagacctcactgctccatttaatcctcaaactgggctacatgacctcacttctccatttaatcctcaaactgggctacaagacctcactgctccattaaatcctcaaactgggaatcgcaatgacccgagaagctcctcctttctgtataatcaaggccattttgacttctctggtggtaatgatgatgatccttatggcttttctgcttccatgagacatagaccaaaaatgtaaaaaaagaagaagagaagagaagcaggatttacaaatccaacagatgcaaatcagaccgaatagaaggaggagcaagcncctttgtttcttgtctttgaattatgatttttattagtcaaaatctttttaatgtgtcgaaacttccctatcaacattntctgtttcatccttagaatctcgtatttnttcagagtattntcaacntttattnttgnttntattttgntatggattattgc

SEQ ID NO: 44076 - protein, 489 aa, Arabidopsis thaliana
  peptide (1)..(489): Ceres Seq. ID no. 13509313
MGKTQLAPGFRFHPTDVELVRYYLKRKILGKKLLVDAIAEVDIYKFEPPDLPDMSFIRSGDLKWHFFCPREKKYASGVRANRATECGYWKTTGKERPVLCNSEVVGKIKTLVYHFGKSPRGERTDWVMHEYRLDDKVLTQMNVPQDTYVVCVLFKKDGPGPRNGAQYGAPFKEEDWSDEEVRTDVPSTSNPTNLLEPSKETTLALTAPDDSNKDCFGGMISESCVSDFLPATTNTTSELPHPSDAATTPMSTAPLAETVQTPNNDDLYSMLDLFDDDEEFLGFNNNEVRYDPGVSAPVCLEEEGIFNGLPELSSMPRTASYDLVENSELYLELQDLTAPLNPQTGLQDLTAPFNPQTGLQDLTAPFNHQTGLQDHTAPFNPQTGLQDHTAPFNHQTGLQDLTAPFNPQTGLQDLTAPFNPQTGLHDLTSPFNPQTGLQDLTAPLNPQTGNRNDPRSSSFLYNQGHFDFSGGNDDDPYGFSASMRHRPKM

SEQ ID NO: 44077 - protein, 436 aa, Arabidopsis thaliana
  peptide (1)..(436): Ceres Seq. ID no. 13509314
MSFIRSGDLKWHFFCPREKKYASGVRANRATECGYWKTTGKERPVLCNSEVVGKIKTLVYHFGKSPRGERTDWVMHEYRLDDKVLTQMNVPQDTYVVCVLFKKDGPGPRNGAQYGAPFKEEDWSDEEVRTDVPSTSNPTNLLEPSKETTLALTAPDDSNKDCFGGMISESCVSDFLPATTNTTSELPHPSDAATTPMSTAPLAETVQTPNNDDLYSMLDLFDDDEEFLGFNNNEVRYDPGVSAPVCLEEEGIFNGLPELSSMPRTASYDLVENSELYLELQDLTAPLNPQTGLQDLTAPFNPQTGLQDLTAPFNHQTGLQDHTAPFNPQTGLQDHTAPFNHQTGLQDLTAPFNPQTGLQDLTAPFNPQTGLHDLTSPFNPQTGLQDLTAPLNPQTGNRNDPRSSSFLYNQGHFDFSGGNDDDPYGFSASMRHRPKM

SEQ ID NO: 44078 - protein, 362 aa, Arabidopsis thaliana
  peptide (1)..(362): Ceres Seq. ID no. 13509315
MHEYRLDDKVLTQMNVPQDTYVVCVLFKKDGPGPRNGAQYGAPFKEEDWSDEEVRTDVPSTSNPTNLLEPSKETTLALTAPDDSNKDCFGGMISESCVSDFLPATTNTTSELPHPSDAATTPMSTAPLAETVQTPNNDDLYSMLDLFDDDEEFLGFNNNEVRYDPGVSAPVCLEEEGIFNGLPELSSMPRTASYDLVENSELYLELQDLTAPLNPQTGLQDLTAPFNPQTGLQDLTAPFNHQTGLQDHTAPFNPQTGLQDHTAPFNHQTGLQDLTAPFNPQTGLQDLTAPFNPQTGLHDLTSPFNPQTGLQDLTAPLNPQTGNRNDPRSSSFLYNQGHFDFSGGNDDDPYGFSASMRHRPKM

SEQ ID NO: 44079 - DNA, 1121 bp, Arabidopsis thaliana; identical to SEQ ID NO: 36876
  misc_feature (1)..(1121): Ceres Seq. ID no. 13592128
  misc_feature (1)..(1121): Ortholog of  Ceres SEQ ID NO 15169849 as cited in SEQ ID NO 53636
  misc_feature (1)..(1121): Ortholog of  Ceres SEQ ID NO 14307300 as cited in SEQ ID NO 54107

SEQ ID NO: 44080 - protein, 262 aa, Arabidopsis thaliana [sequence omitted]

SEQ ID NO: 44081 - protein, 160 aa, Arabidopsis thaliana; identical to SEQ ID NO: 36878
  peptide (1)..(160): Ceres Seq. ID no. 13592130

SEQ ID NO: 44082 - DNA, 1036 bp, Arabidopsis thaliana; identical to SEQ ID NO: 28440
  misc_feature (1)..(1036): Ceres Seq. ID no. 12488547
  misc_feature (1)..(1036): Ortholog of  Ceres SEQ ID NO 14311477 as cited in SEQ ID NO 51390
  misc_feature (1)..(1036): Ortholog of  Ceres SEQ ID NO 14302840 as cited in SEQ ID NO 62295
  misc_feature (1)..(1036): Ortholog of  Ceres SEQ ID NO 13596892 as cited in SEQ ID NO 62900

SEQ ID NO: 44083 - protein, 309 aa, Arabidopsis thaliana; identical to SEQ ID NO: 28441
  peptide (1)..(309): Ceres Seq. ID no. 12488548

SEQ ID NO: 44084 - protein, 307 aa, Arabidopsis thaliana; identical to SEQ ID NO: 28442
  peptide (1)..(307): Ceres Seq. ID no. 12488549

SEQ ID NO: 44085 - protein, 156 aa, Arabidopsis thaliana; identical to SEQ ID NO: 28443
  peptide (1)..(156): Ceres Seq. ID no. 12488550

SEQ ID NO: 44086 - DNA, 1013 bp, Arabidopsis thaliana; identical to SEQ ID NO: 26249
  misc_feature (1)..(1013): Ceres Seq. ID no. 12580328
  misc_feature (1)..(1013): Ortholog of  Ceres SEQ ID NO 13589868 as cited in SEQ ID NO 55521
  misc_feature (1)..(1013): Ortholog of  Ceres SEQ ID NO 15226426 as cited in SEQ ID NO 55985
  misc_feature (1)..(1013): Ortholog of  Ceres SEQ ID NO 14312250 as cited in SEQ ID NO 59168
  misc_feature (1)..(1013): Ortholog of  Ceres SEQ ID NO 15173326 as cited in SEQ ID NO 63793
  misc_feature (1)..(1013): Ortholog of  Ceres SEQ ID NO 12617659 as cited in SEQ ID NO 65286
  misc_feature (1)..(1013): Ortholog of  Ceres SEQ ID NO 12780566 as cited in SEQ ID NO 65822
  misc_feature (1)..(1013): Ortholog of  Ceres SEQ ID NO 15179979 as cited in SEQ ID NO 0

SEQ ID NO: 44087 - protein, 182 aa, Arabidopsis thaliana; identical to SEQ ID NO: 26250
  peptide (1)..(182): Ceres Seq. ID no. 12580329

SEQ ID NO: 44088 - protein, 175 aa, Arabidopsis thaliana; identical to SEQ ID NO: 26251
  peptide (1)..(175): Ceres Seq. ID no. 12580330

SEQ ID NO: 44089 - protein, 144 aa, Arabidopsis thaliana; identical to SEQ ID NO: 26252
  peptide (1)..(144): Ceres Seq. ID no. 12580331

SEQ ID NO: 44090 - DNA, 539 bp, Arabidopsis thaliana
  misc_feature (1)..(539): Ceres Seq. ID no. 12455419
  misc_feature (1)..(539): Ortholog of  Ceres SEQ ID NO 13598758 as cited in SEQ ID NO 61555
gttaaaaccccaattcacattagcctgttgcgatctaaaacctctaaaaccctagaatcaaaatcgcccattcgagatcgagagagacgatggatcacatagcggcagcggaggagcaaattgtaacggagaggattagaagaaaacttgaagaagttaatgcaactgctcaatcgcaactctctcctattcaagatcacatcaatttcacccttcagcaagcctatttcaaatgtgcatacgagtgctttgacagaaataggaagcaagaggagatagccaactgtgttgagcactgcagtgttccagttgtcaatgctcaacagcatttcgaaggcgaaatgtctcagtttcaggaaaggatgaacagatctctcatggtctgtcaagacaaatttgaggctgcaaagctccataagaacaggggagatgccgccaaagctatggagagttgtgtgaacacatccattgaggatagtctcgatacattgcctcatattgtgcagagaatgaagacgtcattctccattgccgactaa

SEQ ID NO: 44091 - protein, 149 aa, Arabidopsis thaliana
  peptide (1)..(149): Ceres Seq. ID no. 12455420
MDHIAAAEEQIVTERIRRKLEEVNATAQSQLSPIQDHINFTLQQAYFKCAYECFDRNRKQEEIANCVEHCSVPVVNAQQHFEGEMSQFQERMNRSLMVCQDKFEAAKLHKNRGDAAKAMESCVNTSIEDSLDTLPHIVQRMKTSFSIAD

SEQ ID NO: 44092 - DNA, 1876 bp, Arabidopsis thaliana
  misc_feature (1)..(1876): Ceres Seq. ID no. 12462191
  misc_feature (1)..(1876): Ortholog of  Ceres SEQ ID NO 13597407 as cited in SEQ ID NO 64106
aagctccacagtgagttcttctcagcaatcacaatctatctggtttaagccctcactatcctctctctcaaatcgcggagtctccgaagtttctctgacaaaatgcagtcgtcaacgtatgcggttaaaggaaacgctgcgtttgcgtttcagagacggaccttctcttctgacagatcgacgacttctaccggaattcgcttcgctggttataagagcttagccaccaccgggccactctactgttctggttctgaagccatgggagcgacgcttgctcgtgctgataacgggatccagagcgttatgagtttctcttctgtcaaagctcgatcggtcagagctcaagcctcatctgatggagatgaagaagaagctatacctctgagatctgaagggaaaagctctggaacagttttgccttttgttggtgttgcttgtcttggtgctatactctttggttatcatctcggggtggttaatggtgctcttgaatatcttgctaaggatcttgggatcgccgaaaatactgttttgcaaggatggattgttagttctctgcttgctggtgctacggtaggttcattcactggaggtgcattagctgacaaatttggacgaacaagaacttttcaattggatgctatcccgcttgccattggagctttcttatgtgcaacagctcagagtgtgcagactatgattgtgggacgtctgctcgctggaattggaattggaatctcatcagcgattgtaccactttacatatctgagatatcaccaactgaaatccgtggagcactcggatctgtgaaccagttgttcatctgtataggaatacttgcagccttgatagctggattaccccttgcagcaaaccctctatggtggaggacgatgtttggtgttgcagttatcccttccgttctattggccataggaatggctttttctccagaaagcccaaggtggctcgttcagcaaggaaaagtctctgaagctgaaaaggcgatcaaaactttgtatggtaaagaaagagtggttgaactagttcgcgacttatcagcctctggccaaggttcttctgagccggaggcaggatggtttgatctattcagcagccgctactggaaagttgtaagcgtaggtgcggctctcttcttgtttcaacagttagccgggataaacgcagttgtgtattactccacatcggtattccgtagtgcgggaatccaatcagatgttgcagccagtgctctcgttggagcatcaaatgtctttggcactgctgttgcttcatcgttgatggataaaatgggaaggaaaagtcttttactgacaagctttggtggaatggctttgtcaatgctgttactctccttgtccttcacatggaaggctcttgctgcctattctggaacccttgccgttgttggaactgttctatatgtcctgtcattctcacttggtgctggcccggtaccggctcttcttcttccagagatatttgcatcccgaatcagagcaaaagccgtcgctctttctctcggcatgcactggatatcaaactttgtgatcggactatacttcttaagcgttgtgactaaattcggaatcagcagtgtctacttgggttttgctggagtctgcgtccttgcggtcctctacattgcaggaaacgtcgtcgagactaaaggtcgatcactggaggaaatagagcttgctcttacatctggagcttgaaattaaacaaaagaaatcagcagaacaaaaaccagtttgtttcatcatttagtttgtgagtctttctctaatctgctactcttaaattgtacaatggacgacgttatcaataacgagaaatcttttcatgacc

SEQ ID NO: 44093 - protein, 546 aa, Arabidopsis thaliana
  peptide (1)..(546): Ceres Seq. ID no. 12462192
MQSSTYAVKGNAAFAFQRRTFSSDRSTTSTGIRFAGYKSLATTGPLYCSGSEAMGATLARADNGIQSVMSFSSVKARSVRAQASSDGDEEEAIPLRSEGKSSGTVLPFVGVACLGAILFGYHLGVVNGALEYLAKDLGIAENTVLQGWIVSSLLAGATVGSFTGGALADKFGRTRTFQLDAIPLAIGAFLCATAQSVQTMIVGRLLAGIGIGISSAIVPLYISEISPTEIRGALGSVNQLFICIGILAALIAGLPLAANPLWWRTMFGVAVIPSVLLAIGMAFSPESPRWLVQQGKVSEAEKAIKTLYGKERVVELVRDLSASGQGSSEPEAGWFDLFSSRYWKVVSVGAALFLFQQLAGINAVVYYSTSVFRSAGIQSDVAASALVGASNVFGTAVASSLMDKMGRKSLLLTSFGGMALSMLLLSLSFTWKALAAYSGTLAVVGTVLYVLSFSLGAGPVPALLLPEIFASRIRAKAVALSLGMHWISNFVIGLYFLSVVTKFGISSVYLGFAGVCVLAVLYIAGNVVETKGRSLEEIELALTSGA

SEQ ID NO: 44094 - protein, 493 aa, Arabidopsis thaliana
  peptide (1)..(493): Ceres Seq. ID no. 12462193
MGATLARADNGIQSVMSFSSVKARSVRAQASSDGDEEEAIPLRSEGKSSGTVLPFVGVACLGAILFGYHLGVVNGALEYLAKDLGIAENTVLQGWIVSSLLAGATVGSFTGGALADKFGRTRTFQLDAIPLAIGAFLCATAQSVQTMIVGRLLAGIGIGISSAIVPLYISEISPTEIRGALGSVNQLFICIGILAALIAGLPLAANPLWWRTMFGVAVIPSVLLAIGMAFSPESPRWLVQQGKVSEAEKAIKTLYGKERVVELVRDLSASGQGSSEPEAGWFDLFSSRYWKVVSVGAALFLFQQLAGINAVVYYSTSVFRSAGIQSDVAASALVGASNVFGTAVASSLMDKMGRKSLLLTSFGGMALSMLLLSLSFTWKALAAYSGTLAVVGTVLYVLSFSLGAGPVPALLLPEIFASRIRAKAVALSLGMHWISNFVIGLYFLSVVTKFGISSVYLGFAGVCVLAVLYIAGNVVETKGRSLEEIELALTSGA

SEQ ID NO: 44095 - protein, 478 aa, Arabidopsis thaliana; identical to SEQ ID NO: 30167
  peptide (1)..(478): Ceres Seq. ID no. 12462194

SEQ ID NO: 44096 - DNA, 1884 bp, Arabidopsis thaliana
  misc_feature (1)..(1884): Ceres Seq. ID no. 12489261
  misc_feature (1)..(1884): Ortholog of  Ceres SEQ ID NO 14310841 as cited in SEQ ID NO 53666
  misc_feature (1)..(1884): Ortholog of  Ceres SEQ ID NO 15178736 as cited in SEQ ID NO 56439
  misc_feature (1)..(1884): Ortholog of  Ceres SEQ ID NO 14308493 as cited in SEQ ID NO 60320
ctcgcttttttccccatttcaacttttttttttcctctccagtgcactaggaaacaaaaaaaacccaagatctatagttcgatcggatcgagagaagctcgaaaatggcgctggcgttcgatgagttcgggcgtccgttcattatactgagagagcaagatcaaaagactcgtcttagaggaatcgatgctcagaaagccaatatcgccgctggtaaagccgtggctcggatccttcgatcctctcttggacccaaaggaatggataagatgcttcaaggacctgacggagacatcaccatcacaaacgatggtgctacgatattggagcaaatggatgttgacaaccagattgcgaaactaatggtggaactgtcgcggagtcaggattatgaaattggtgatggaacaacaggtgttgttgttatggctggtgcacttcttgagcaagctgaacgtcagttagatagaggaattcatcccattcgtattgctgaaggatatgagatggcttctagggtggctgttgagcatttggagcgtattgcccaaaagtttgaattcgatgttaataattatgagcctctggttcagacttgcatgactactctgtcctcgaagattgtgaatcgatgcaagcgcagcttagctgagattgctgttaaagcggttcttgctgttgctgatttagagaggagggatgttaacttagatctgatcaaagtagaggggaaagttgggggaaagttggaggacactgagcttatttatggaatactgattgacaaagatatgagtcatccgcaaatgccaaagcagattgaagatgcccacattgccattttgacttgtccctttgagccaccgaagccgaagactaagcataaggtggacattgatacagtggaaaagtttgagacattgcgcaagcaagagcagcaatatttcgatgagatggtacaaaagtgcaaggatgttggtgctacgctggttatttgccaatggggattcgatgatgaggcaaaccatctattgatgcacaggaatttgcctgctgtcagatgggtagggggtgttgaattagaacttatcgcaatagccacaggcggtagaattgttccaagattccaggagttgaccccagagaagttagggaaggctggcgtggttcgtgagaaatcttttggcacaacaaaagaacgaatgctgtatattgagcactgtgcgaactcaaaagctgtcactgttttcatccgtggaggtaacaaaatgatgatagaagagacgaaacgtagtatccacgatgctctgtgtgtggctaggaatctcatccgcaacaaatcaattgtttatggaggtggggcagctgaaatcgcttgctcacttgcggttgatgcagctgctgataaataccctggcgtggagcagtatgcaattagggcgtttgcagaagctttggactctgtccctatggctcttgcagagaacagtggattacagcccattgagacactctctgcggttaaatctcagcaaattaaggagaatattcccttctatggaatagattgcaatgacgtgggaacaaacgatatgagggagcaaaatgtgtttgaaacattgatcgggaaacagcaacaaattttgctagctacgcaagtcgttaagatgattctaaagatcgacgatgtcatctccaattctgaatactgatttgttgctacctttgtcctaacctttggcttcttcggtgttttttgtttgctttctattagcttttgatacccttcgacatcgttatccttgacttgttccctttgttttgcaaccttctatttaagaacatcgtcagatcttaatttttgtgtgtacttgtccacagatc

SEQ ID NO: 44097 - protein, 535 aa, Arabidopsis thaliana
  peptide (1)..(535): Ceres Seq. ID no. 12489262
MALAFDEFGRPFIILREQDQKTRLRGIDAQKANIAAGKAVARILRSSLGPKGMDKMLQGPDGDITITNDGATILEQMDVDNQIAKLMVELSRSQDYEIGDGTTGVVVMAGALLEQAERQLDRGIHPIRIAEGYEMASRVAVEHLERIAQKFEFDVNNYEPLVQTCMTTLSSKIVNRCKRSLAEIAVKAVLAVADLERRDVNLDLIKVEGKVGGKLEDTELIYGILIDKDMSHPQMPKQIEDAHIAILTCPFEPPKPKTKHKVDIDTVEKFETLRKQEQQYFDEMVQKCKDVGATLVICQWGFDDEANHLLMHRNLPAVRWVGGVELELIAIATGGRIVPRFQELTPEKLGKAGVVREKSFGTTKERMLYIEHCANSKAVTVFIRGGNKMMIEETKRSIHDALCVARNLIRNKSIVYGGGAAEIACSLAVDAAADKYPGVEQYAIRAFAEALDSVPMALAENSGLQPIETLSAVKSQQIKENIPFYGIDCNDVGTNDMREQNVFETLIGKQQQILLATQVVKMILKIDDVISNSEY

SEQ ID NO: 44098 - protein, 483 aa, Arabidopsis thaliana
  peptide (1)..(483): Ceres Seq. ID no. 12489263
MDKMLQGPDGDITITNDGATILEQMDVDNQIAKLMVELSRSQDYEIGDGTTGVVVMAGALLEQAERQLDRGIHPIRIAEGYEMASRVAVEHLERIAQKFEFDVNNYEPLVQTCMTTLSSKIVNRCKRSLAEIAVKAVLAVADLERRDVNLDLIKVEGKVGGKLEDTELIYGILIDKDMSHPQMPKQIEDAHIAILTCPFEPPKPKTKHKVDIDTVEKFETLRKQEQQYFDEMVQKCKDVGATLVICQWGFDDEANHLLMHRNLPAVRWVGGVELELIAIATGGRIVPRFQELTPEKLGKAGVVREKSFGTTKERMLYIEHCANSKAVTVFIRGGNKMMIEETKRSIHDALCVARNLIRNKSIVYGGGAAEIACSLAVDAAADKYPGVEQYAIRAFAEALDSVPMALAENSGLQPIETLSAVKSQQIKENIPFYGIDCNDVGTNDMREQNVFETLIGKQQQILLATQVVKMILKIDDVISNSEY

SEQ ID NO: 44099 - protein, 480 aa, Arabidopsis thaliana
  peptide (1)..(480): Ceres Seq. ID no. 12489264
MLQGPDGDITITNDGATILEQMDVDNQIAKLMVELSRSQDYEIGDGTTGVVVMAGALLEQAERQLDRGIHPIRIAEGYEMASRVAVEHLERIAQKFEFDVNNYEPLVQTCMTTLSSKIVNRCKRSLAEIAVKAVLAVADLERRDVNLDLIKVEGKVGGKLEDTELIYGILIDKDMSHPQMPKQIEDAHIAILTCPFEPPKPKTKHKVDIDTVEKFETLRKQEQQYFDEMVQKCKDVGATLVICQWGFDDEANHLLMHRNLPAVRWVGGVELELIAIATGGRIVPRFQELTPEKLGKAGVVREKSFGTTKERMLYIEHCANSKAVTVFIRGGNKMMIEETKRSIHDALCVARNLIRNKSIVYGGGAAEIACSLAVDAAADKYPGVEQYAIRAFAEALDSVPMALAENSGLQPIETLSAVKSQQIKENIPFYGIDCNDVGTNDMREQNVFETLIGKQQQILLATQVVKMILKIDDVISNSEY

SEQ ID NO: 44100 - DNA, 1135 bp, Arabidopsis thaliana
  misc_feature (1)..(1135): Ceres Seq. ID no. 12489247
  misc_feature (1)..(1135): Ortholog of  Ceres SEQ ID NO 15171289 as cited in SEQ ID NO 51570
accttcttcttcttcttcttcttctctacaacaaacaaacaaaagatctgtttcaatggcggatcgtgttaaaggtccatggagtcaagaagaagatgagcagctacgaaggatggttgagaaatacggaccgaggaattggtctgcgattagcaaatcgattccaggtcgatctggtaaatcgtgtagattacgttggtgtaatcagttatctccggaggttgagcatcgtcctttctcgccggaggaagatgagactattgtaaccgcccgtgctcagtttggtaacaagtgggcgacgattgctcgtcttcttaacggtcgtacggataacgccgttaaaaatcactggaactctacgcttaagaggaaatgcagcggaggtgtggcggttacgacggtgacggagacggaggaagatcaggatcggccgaagaagaggagatctgttagctttgattctgcttttgctccggtggatactggattgtacatgagtcctgagagtcctaacggaatcgatgttagtgattctagcacgattccgtcaccgtcgtctcctgttgctcagctgtttaaaccaatgccgatttccggcggttttacggtggttccgcagccgttaccggttgaaatgtcttcgtcttcggaggatccacctacttcgttgagtttgtcactacctggagctgagaacacgagttcgagccataacaataacaacaacgcgttgatgtttccgagatttgagagtcagatgaagattaatgtagaggagagaggagaaggacgtagaggtgagtttatgacggtggtgcaggagatgataaaagctgaagtgaggagttacatggcggaaatgcagaaaacaagtggtggattcgtcgtcggaggtttatacgaatccggcggcaatggtggttttagggattgtggagtaataacacctaaggttgagtagttttggtttagggttaaaacttgaatcgattggggattttcaagagcattcatttttggggtttatggtaaaattaaaaacaaaaacaaaatgtacagaggaattaaaatttctatggaataatcttaaatctcaaatatttgttacttgttttggtgattcataaccaaaatc

SEQ ID NO: 44101 - protein, 319 aa, Arabidopsis thaliana
  peptide (1)..(319): Ceres Seq. ID no. 12489248
PSSSSSSSLQQTNKRSVSMADRVKGPWSQEEDEQLRRMVEKYGPRNWSAISKSIPGRSGKSCRLRWCNQLSPEVEHRPFSPEEDETIVTARAQFGNKWATIARLLNGRTDNAVKNHWNSTLKRKCSGGVAVTTVTETEEDQDRPKKRRSVSFDSAFAPVDTGLYMSPESPNGIDVSDSSTIPSPSSPVAQLFKPMPISGGFTVVPQPLPVEMSSSSEDPPTSLSLSLPGAENTSSSHNNNNNALMFPRFESQMKINVEERGEGRRGEFMTVVQEMIKAEVRSYMAEMQKTSGGFVVGGLYESGGNGGFRDCGVITPKVE

SEQ ID NO: 44102 - protein, 301 aa, Arabidopsis thaliana
  peptide (1)..(301): Ceres Seq. ID no. 12489249
MADRVKGPWSQEEDEQLRRMVEKYGPRNWSAISKSIPGRSGKSCRLRWCNQLSPEVEHRPFSPEEDETIVTARAQFGNKWATIARLLNGRTDNAVKNHWNSTLKRKCSGGVAVTTVTETEEDQDRPKKRRSVSFDSAFAPVDTGLYMSPESPNGIDVSDSSTIPSPSSPVAQLFKPMPISGGFTVVPQPLPVEMSSSSEDPPTSLSLSLPGAENTSSSHNNNNNALMFPRFESQMKINVEERGEGRRGEFMTVVQEMIKAEVRSYMAEMQKTSGGFVVGGLYESGGNGGFRDCGVITPKVE

SEQ ID NO: 44103 - protein, 282 aa, Arabidopsis thaliana
  peptide (1)..(282): Ceres Seq. ID no. 12489250
MVEKYGPRNWSAISKSIPGRSGKSCRLRWCNQLSPEVEHRPFSPEEDETIVTARAQFGNKWATIARLLNGRTDNAVKNHWNSTLKRKCSGGVAVTTVTETEEDQDRPKKRRSVSFDSAFAPVDTGLYMSPESPNGIDVSDSSTIPSPSSPVAQLFKPMPISGGFTVVPQPLPVEMSSSSEDPPTSLSLSLPGAENTSSSHNNNNNALMFPRFESQMKINVEERGEGRRGEFMTVVQEMIKAEVRSYMAEMQKTSGGFVVGGLYESGGNGGFRDCGVITPKVE

SEQ ID NO: 44104 - DNA, 1710 bp, Arabidopsis thaliana
  misc_feature (1)..(1710): Ceres Seq. ID no. 12488449
  misc_feature (1)..(1710): Ortholog of  Ceres SEQ ID NO 13594536 as cited in SEQ ID NO 51382
  misc_feature (1)..(1710): Ortholog of  Ceres SEQ ID NO 15172549 as cited in SEQ ID NO 57185
aacctcgtcttctccgtccacttcactctctctaaactctctctcagatctctctctctctgtgattcaacaatggcggtttcttcttcttcgtttctatcgacagcttcactaaccaattccaaatccaacatttcattcgcttcctcagtatccccatccctccgcagcgtcgttttccgctccacgactccggcgacttctcaccgtcgttcaatgacggtccgatctaagattcgtgaaattttcatgccggcgttatcatcaaccatgacggaaggcaaaatcgtgtcatggatcaaaacagaaggcgagaaactcgccaagggagagagtgttgtggttgttgaatctgataaagccgatatggatgtagaaacgttttacgatggttatcttgctgcgattgtcgtcggagaaggtgaaacagctccggttggtgctgcgattggattgttagctgagactgaagctgagatcgaagaagctaagagtaaagccgcttcgaaatcttcttcttctgtggctgaggctgtcgttccatctcctcctccggttacttcttctcctgctccggcgattgctcaaccggctccggtgacggcagtatcagatggtccgaggaagactgttgcgacgccgtatgctaagaagcttgctaaacaacacaaggttgatattgaatccgttgctggaactggaccattcggtaggattacggcttctgatgtggagacggcggctggaattgctccgtccaaatcctccatcgcaccaccgcctcctcctccacctccggtgacggctaaagcaaccaccactaatttgcctcctctgttacctgattcaagcattgttcctttcacagcaatgcaatctgcagtatctaagaacatgattgagagtctctctgttcctacattccgtgttggttatcctgtgaacactgacgctcttgatgcactttacgagaaggtgaagccaaagggtgtaacaatgacagctttattagctaaagctgcagggatggccttggctcagcatcctgtggtgaacgctagctgcaaagacgggaagagttttagttacaatagtagcattaacattgcagtggcggttgctatcaatggtggcctgattacgcctgttctacaagatgcagataagttggatttgtacttgttatctcaaaaatggaaagagctggtggggaaagctagaagcaagcaacttcaaccccatgaatacaactctggaacttttactttatcgaatctcggtatgtttggagtggatagatttgacgctattcttccgccaggacagggtgctattatggctgttggagcgtcaaagccaactgtagttgctgataaggatggattcttcagtgtaaaaaacacaatgctggtgaatgtgactgcagatcatcgcattgtgtatggagctgacttggctgcttttctccaaacctttgcaaagatcattgagaatccagatagtttgaccttataagacgccaagcgaagacgagaagtcaaaaacagtttccaaaattcctgagccaaatttttcccaagtaaattttttaatcttcattgttcttggtcttgctctacttcttttgcatctttttcttcacttgtgttgtatctgtatttttgttttcaagaatcatcattttgggttttaaacaaataatttcctatc

SEQ ID NO: 44105 - protein, 504 aa, Arabidopsis thaliana
  peptide (1)..(504): Ceres Seq. ID no. 12488450
NLVFSVHFTLSKLSLRSLSLCDSTMAVSSSSFLSTASLTNSKSNISFASSVSPSLRSVVFRSTTPATSHRRSMTVRSKIREIFMPALSSTMTEGKIVSWIKTEGEKLAKGESVVVVESDKADMDVETFYDGYLAAIVVGEGETAPVGAAIGLLAETEAEIEEAKSKAASKSSSSVAEAVVPSPPPVTSSPAPAIAQPAPVTAVSDGPRKTVATPYAKKLAKQHKVDIESVAGTGPFGRITASDVETAAGIAPSKSSIAPPPPPPPPVTAKATTTNLPPLLPDSSIVPFTAMQSAVSKNMIESLSVPTFRVGYPVNTDALDALYEKVKPKGVTMTALLAKAAGMALAQHPVVNASCKDGKSFSYNSSINIAVAVAINGGLITPVLQDADKLDLYLLSQKWKELVGKARSKQLQPHEYNSGTFTLSNLGMFGVDRFDAILPPGQGAIMAVGASKPTVVADKDGFFSVKNTMLVNVTADHRIVYGADLAAFLQTFAKIIENPDSLTL

SEQ ID NO: 44106 - protein, 480 aa, Arabidopsis thaliana
  peptide (1)..(480): Ceres Seq. ID no. 12488451
MAVSSSSFLSTASLTNSKSNISFASSVSPSLRSVVFRSTTPATSHRRSMTVRSKIREIFMPALSSTMTEGKIVSWIKTEGEKLAKGESVVVVESDKADMDVETFYDGYLAAIVVGEGETAPVGAAIGLLAETEAEIEEAKSKAASKSSSSVAEAVVPSPPPVTSSPAPAIAQPAPVTAVSDGPRKTVATPYAKKLAKQHKVDIESVAGTGPFGRITASDVETAAGIAPSKSSIAPPPPPPPPVTAKATTTNLPPLLPDSSIVPFTAMQSAVSKNMIESLSVPTFRVGYPVNTDALDALYEKVKPKGVTMTALLAKAAGMALAQHPVVNASCKDGKSFSYNSSINIAVAVAINGGLITPVLQDADKLDLYLLSQKWKELVGKARSKQLQPHEYNSGTFTLSNLGMFGVDRFDAILPPGQGAIMAVGASKPTVVADKDGFFSVKNTMLVNVTADHRIVYGADLAAFLQTFAKIIENPDSLTL

SEQ ID NO: 44107 - protein, 432 aa, Arabidopsis thaliana
  peptide (1)..(432): Ceres Seq. ID no. 12488452
MTVRSKIREIFMPALSSTMTEGKIVSWIKTEGEKLAKGESVVVVESDKADMDVETFYDGYLAAIVVGEGETAPVGAAIGLLAETEAEIEEAKSKAASKSSSSVAEAVVPSPPPVTSSPAPAIAQPAPVTAVSDGPRKTVATPYAKKLAKQHKVDIESVAGTGPFGRITASDVETAAGIAPSKSSIAPPPPPPPPVTAKATTTNLPPLLPDSSIVPFTAMQSAVSKNMIESLSVPTFRVGYPVNTDALDALYEKVKPKGVTMTALLAKAAGMALAQHPVVNASCKDGKSFSYNSSINIAVAVAINGGLITPVLQDADKLDLYLLSQKWKELVGKARSKQLQPHEYNSGTFTLSNLGMFGVDRFDAILPPGQGAIMAVGASKPTVVADKDGFFSVKNTMLVNVTADHRIVYGADLAAFLQTFAKIIENPDSLTL

SEQ ID NO: 44108 - DNA, 1031 bp, Arabidopsis thaliana
  misc_feature (1)..(1031): Ceres Seq. ID no. 12462215
  misc_feature (1)..(1031): Ortholog of  Ceres SEQ ID NO 15179213 as cited in SEQ ID NO 0
agtgaggtaaacaaaaccaaaaccatcagatcttaagaagaagaacctaaagctcactacgatatttttcgagaatatgacgactttttctgttccgattgataacggagattctatgaagatcgcagaagaagaatcacaaagaacactgtacccatatgttactggaacttcaattgttgcaatcaagtacaaagatggggttttgatggcttctgatatgggaggttcatatggatcaaccttaagatacaagaacatcgagagagtgaaggctattggtaagcattctcttcttggtgccagcggagaaatcagcgactttcaggagattctccgttatcttgatgagctcaccctgaatgataacatgtgggatgatggtaactctttgggaccaaaagagattcacaactatctgacccgtgtgatgtacaaccgtcgcaacaagtttaaccctctgtggaacactctcgtccttggaggcgtcaaaaatgggaaaagttaccttggaatggtgtcaatgattggtgttagttttgaggacgatcatgttgccactggatttggaaaccaccttgctaggccaattcttcgtgatgagtggcatgcagacctgagttttgaagatggtgtcaagctacttgagaaatgtatgcgtgtgcttctttaccgtgacagatctgctattaacaagcttcagatagcgaagatcacggaagagggcgtgacggtctcacagccatactcattgaagacatactgggaattctcgtcattccacaacccaactgctggtgctgcaggctcctggtaagaagccaagcaaccacatcggctggcgatcttttaaggaagcttttattttattttatgtgatgttgttaaacactttgtactgtagttgttttactattaaacttggtggtttctttctgacagtccagagtttagatcaatgaggatttataaaaagtactggatatctttgggtagtaatccatacctttgttcattgttgatcgttctcc

SEQ ID NO: 44109 - protein, 246 aa, Arabidopsis thaliana
  peptide (1)..(246): Ceres Seq. ID no. 12462216
MTTFSVPIDNGDSMKIAEEESQRTLYPYVTGTSIVAIKYKDGVLMASDMGGSYGSTLRYKNIERVKAIGKHSLLGASGEISDFQEILRYLDELTLNDNMWDDGNSLGPKEIHNYLTRVMYNRRNKFNPLWNTLVLGGVKNGKSYLGMVSMIGVSFEDDHVATGFGNHLARPILRDEWHADLSFEDGVKLLEKCMRVLLYRDRSAINKLQIAKITEEGVTVSQPYSLKTYWEFSSFHNPTAGAAGSW

SEQ ID NO: 44110 - protein, 233 aa, Arabidopsis thaliana
  peptide (1)..(233): Ceres Seq. ID no. 12462217
MKIAEEESQRTLYPYVTGTSIVAIKYKDGVLMASDMGGSYGSTLRYKNIERVKAIGKHSLLGASGEISDFQEILRYLDELTLNDNMWDDGNSLGPKEIHNYLTRVMYNRRNKFNPLWNTLVLGGVKNGKSYLGMVSMIGVSFEDDHVATGFGNHLARPILRDEWHADLSFEDGVKLLEKCMRVLLYRDRSAINKLQIAKITEEGVTVSQPYSLKTYWEFSSFHNPTAGAAGSW

SEQ ID NO: 44111 - protein, 202 aa, Arabidopsis thaliana
  peptide (1)..(202): Ceres Seq. ID no. 12462218
MASDMGGSYGSTLRYKNIERVKAIGKHSLLGASGEISDFQEILRYLDELTLNDNMWDDGNSLGPKEIHNYLTRVMYNRRNKFNPLWNTLVLGGVKNGKSYLGMVSMIGVSFEDDHVATGFGNHLARPILRDEWHADLSFEDGVKLLEKCMRVLLYRDRSAINKLQIAKITEEGVTVSQPYSLKTYWEFSSFHNPTAGAAGSW

SEQ ID NO: 44112 - DNA, 1247 bp, Arabidopsis thaliana
  misc_feature (1)..(1247): Ceres Seq. ID no. 13509667
  misc_feature (1)..(1247): Ortholog of  Ceres SEQ ID NO 13491587 as cited in SEQ ID NO 20500
  misc_feature (1)..(1247): Ortholog of  Ceres SEQ ID NO 15169711 as cited in SEQ ID NO 54274
gatttcctgtgttgcgaaacccccaaattctcttctctctatctctctcgcgtacgccgcaccgtagcgaccaattgaatccacgaggaaatctcagtaaatactatggcgaccaacgaacccgagcacgagcacagagacgaggaagaggccggagctaacgaggatgaggacaccggagctcaggtcgctccgatcgttaggcttgaggaggttgccgtcactaccggcgaggaagacgaagatgccgtccttgatctgaaatcgaagctttatcgattcgataaggatgcgaatcagtggaaggagagaggagctggtactgtgaagttcttaaagcataagaacactgggaagattcgtctcgttatgaggcaatctaaaactttgaagatctgtgctaatcacttcgttaaatcgggcatgagtgttcaggaacacgttgggaatgaaaagtcatgtgtgtggcacgctcgtgactttgctgatggtgaactcaaggatgagcttttctgtatccgatttgcttctattgagaattgcaaaacatttatgcaaaagttcaaggaagttgctgagtctgaagaagagaaagaagagagcaaagatgccgctgacactgctggccttcttgagaaattgactgtggaagagacaaaaacggaggagaaaaccgaagcgaaagctgtggagacggcaaagactgaagtgaaagcagaagaaaagaaagagagcgaggcagagaaatctggtgaagcaaagaaaacagaagaaagtggtccctcaacataagaagcgtcatcatttaagttgccaaatcctggcgaggtaattaagcctcgaaatgttttgatgcatcatgagtctaccattgtcttggcactatctatctatacatgttttgtcgagtcatatcaagtggttgggggatcgcttggggtcgggttttactgaatgctgagtcgttatgggtctaatagtttttgagtctaaagtgtcgggtgatatgagagatttgggtgaaatattttttcatgttggttatctgaaagagtacattggtttcattgttttaagttttctcatggatcctttttggatggtcttattttgaggatacaaatgtgtttgtccatggacaagaatcagaagtctccattttttttttttcaaaatttaatgcatgtgattttttaatcttaaggtaattgccaattgtttgacaaaaaaaaggtaattgccaatct

SEQ ID NO: 44113 - protein, 228 aa, Arabidopsis thaliana
  peptide (1)..(228): Ceres Seq. ID no. 13509668
MATNEPEHEHRDEEEAGANEDEDTGAQVAPIVRLEEVAVTTGEEDEDAVLDLKSKLYRFDKDANQWKERGAGTVKFLKHKNTGKIRLVMRQSKTLKICANHFVKSGMSVQEHVGNEKSCVWHARDFADGELKDELFCIRFASIENCKTFMQKFKEVAESEEEKEESKDAADTAGLLEKLTVEETKTEEKTEAKAVETAKTEVKAEEKKESEAEKSGEAKKTEESGPST

SEQ ID NO: 44114 - protein, 140 aa, Arabidopsis thaliana
  peptide (1)..(140): Ceres Seq. ID no. 13509669
MRQSKTLKICANHFVKSGMSVQEHVGNEKSCVWHARDFADGELKDELFCIRFASIENCKTFMQKFKEVAESEEEKEESKDAADTAGLLEKLTVEETKTEEKTEAKAVETAKTEVKAEEKKESEAEKSGEAKKTEESGPST

SEQ ID NO: 44115 - protein, 122 aa, Arabidopsis thaliana
  peptide (1)..(122): Ceres Seq. ID no. 13509670
MSVQEHVGNEKSCVWHARDFADGELKDELFCIRFASIENCKTFMQKFKEVAESEEEKEESKDAADTAGLLEKLTVEETKTEEKTEAKAVETAKTEVKAEEKKESEAEKSGEAKKTEESGPST

SEQ ID NO: 44116 - DNA, 951 bp, Arabidopsis thaliana
  misc_feature (1)..(951): Ceres Seq. ID no. 13503085
  misc_feature (1)..(951): Ortholog of  Ceres SEQ ID NO 12619999 as cited in SEQ ID NO 66123
  misc_feature (1)..(951): Ortholog of  Ceres SEQ ID NO 13656436 as cited in SEQ ID NO 69154
tttctcatttcttaaccacgtcgtcgacacaacaaaccgatcgtgttacgtctctctctctctcagtctctcatcaccgacgaagatcacggctcttttctctgtttaatcggcggaatctctcttcttattttatttttcttccggtagatcgatccagctccgagatcaatcatgaatcctgaatatgactatttgttcaagcttttgctcattggtgattctggtgttggaaagtcgtgcttgcttctaaggtttgctgatgattcctacctggatagctacatcagcaccattggtgtcgactttaaaatccgaacagtcgaacaagatggaaagaccatcaaactccagatttgggatacggcaggccaggaacgtttcagaacgattactagcagttactacagaggagctcatggaattattgtgacttatgatgtaacagatctagaaagcttcaacaacgtcaagcaatggctaaatgaaatcgaccgctatgcaagtgagaatgttaacaagctactggttgggaacaagtgtgatctcacatcacagaaagttgtatccactgagacagctaaggctttcgctgatgaacttgggatcccattcttggaaacaagtgctaagaatgctaccaatgtcgaagaagctttcatggccatgactgctgcaatcaagaccagaatggcgagccaacctgcaggaggatctaagccaccaacggtccagatccgaggacaacctgttaaccagcaatcaggctgctgctcctcttaattcgctttggtaacacttaaccatattatgtcattcgtttgcatgtaagaaatctaaacaacgttgcttcttaaatcttttgtatttggtttttcaatttttcacttgtgtccaaaagcttttaaattctttgtaatggtacttggattattaataaacttctttagt

SEQ ID NO: 44117 - protein, 202 aa, Arabidopsis thaliana
  peptide (1)..(202): Ceres Seq. ID no. 13503086
MNPEYDYLFKLLLIGDSGVGKSCLLLRFADDSYLDSYISTIGVDFKIRTVEQDGKTIKLQIWDTAGQERFRTITSSYYRGAHGIIVTYDVTDLESFNNVKQWLNEIDRYASENVNKLLVGNKCDLTSQKVVSTETAKAFADELGIPFLETSAKNATNVEEAFMAMTAAIKTRMASQPAGGSKPPTVQIRGQPVNQQSGCCSS

SEQ ID NO: 44118 - DNA, 1034 bp, Arabidopsis thaliana
  misc_feature (1)..(1034): Ceres Seq. ID no. 12455416
  misc_feature (1)..(1034): Ortholog of  Ceres SEQ ID NO 13594298 as cited in SEQ ID NO 57803
  misc_feature (1)..(1034): Ortholog of  Ceres SEQ ID NO 13503476 as cited in SEQ ID NO 61978
  misc_feature (1)..(1034): Ortholog of  Ceres SEQ ID NO 12578438 as cited in SEQ ID NO 62201
  misc_feature (1)..(1034): Ortholog of  Ceres SEQ ID NO 12617675 as cited in SEQ ID NO 64656
atcaacaatatacatctgagatatcaaaactcctagagagatctaataaaaatgaagtcttttacgttcttgattctctttctctttgcagcacaatctatcagcgtctatgcaggcagcttccacaaagacgttaagatacattggggtgatggtcgtggaaagattcacgataatcaagggaaacttctatctctctcgcttgacaaatcctctggttcaggtttccaatctaatcaagagtttctctatggtaaagccgaagttcaaatgaaacttgtccctggtaactctgctggaaccgtcacaacattctatcttaaatctccgggaactacatgggatgagattgatttcgagtttttggggaacataagtggtcatccatatactctccatactaatgtttacacaaaaggctcaggagacaaagaacaacaatttcatctatggtttgacccaaccgctaactttcacacttattgcatcacatggaatccacaaagaattatttttaccgttgatgggattccaattagagagtttatgaatgccgagtcacgtggagtcccattcccaacaaagcaaccaatgaggctatatgcgagtctatgggaagcagagcattgggctacaaggggaggattagagaaaacagattggtcaaaagctcctttcaccgcttattacagaaactacaatgtcgagggatgtgtatgggttaatggaaagtcagtttgtcccgcaaattcccaatggttcactcaaaaactcgattcgaatggccagacaagaatgaaaggggtacagagtaaatacatggtttacaactattgctccgataaaaaaaggtttcctcgaggtgttcctccagagtgcagctaaatgattgattctttgattcataaataagttacttgacgttgtctttgtaactcaatggttcttcttatctataatttttcaattcatttgttaccaaatatatgcgtgtttgtgtaagatcttttttacaatgaacaatgagttcttcc

SEQ ID NO: 44119 - protein, 277 aa, Arabidopsis thaliana
  peptide (1)..(277): Ceres Seq. ID no. 12455417
MKSFTFLILFLFAAQSISVYAGSFHKDVKIHWGDGRGKIHDNQGKLLSLSLDKSSGSGFQSNQEFLYGKAEVQMKLVPGNSAGTVTTFYLKSPGTTWDEIDFEFLGNISGHPYTLHTNVYTKGSGDKEQQFHLWFDPTANFHTYCITWNPQRIIFTVDGIPIREFMNAESRGVPFPTKQPMRLYASLWEAEHWATRGGLEKTDWSKAPFTAYYRNYNVEGCVWVNGKSVCPANSQWFTQKLDSNGQTRMKGVQSKYMVYNYCSDKKRFPRGVPPECS

SEQ ID NO: 44120 - protein, 204 aa, Arabidopsis thaliana
  peptide (1)..(204): Ceres Seq. ID no. 12455418
MKLVPGNSAGTVTTFYLKSPGTTWDEIDFEFLGNISGHPYTLHTNVYTKGSGDKEQQFHLWFDPTANFHTYCITWNPQRIIFTVDGIPIREFMNAESRGVPFPTKQPMRLYASLWEAEHWATRGGLEKTDWSKAPFTAYYRNYNVEGCVWVNGKSVCPANSQWFTQKLDSNGQTRMKGVQSKYMVYNYCSDKKRFPRGVPPECS

SEQ ID NO: 44121 - DNA, 689 bp, Arabidopsis thaliana
  misc_feature (1)..(689): Ceres Seq. ID no. 12466272
  misc_feature (1)..(689): Ortholog of  Ceres SEQ ID NO 12612272 as cited in SEQ ID NO 55946
  misc_feature (1)..(689): Ortholog of  Ceres SEQ ID NO 15169960 as cited in SEQ ID NO 57591
aacaaggagcaaagagttcatagcaaagcaaagcttcaaaacagagcaaacgcaaagagtagcaatcacaagaggaagtgaaacgatgtctctaattccaagcatcttcggaggaagaagaacaaacgttttcgatccgttctcgctggatgttttcgatccgttcgaaggtttcttgacgccgtcaggattggcaaacgcacccgctatggatgtggcagcgttcacaaacgctaaagtggattggagggagacacctgaggcgcacgtgttcaaggcggatttaccgggactgaggaaggaagaggtgaaagtggaggttgaggatggcaacatacttcagataagtggagagaggagcaatgagaatgaagagaagaatgacaagtggcaccgtgtggagcggtcgagtgggaagttcacgaggaggtttaggctgccggagaatgctaagatggaggaaatcaaagccagtatggaaaatggtgtgttgtcggttaccgtgcccaaggtgccagagaaaaagccagaggttaagtccattgatatctctggttaaagggaattgtttaagaccaaaaatgtgtgatggtagtgaaataattggtgtgtgatgtgtttttcttgtaatcatgaatctcgttgtatcattatcataaaatcttaataagagtgtgctttgtctcgtg

SEQ ID NO: 44122 - protein, 185 aa, Arabidopsis thaliana
  peptide (1)..(185): Ceres Seq. ID no. 12466273
TRSKEFIAKQSFKTEQTQRVAITRGSETMSLIPSIFGGRRTNVFDPFSLDVFDPFEGFLTPSGLANAPAMDVAAFTNAKVDWRETPEAHVFKADLPGLRKEEVKVEVEDGNILQISGERSNENEEKNDKWHRVERSSGKFTRRFRLPENAKMEEIKASMENGVLSVTVPKVPEKKPEVKSIDISG

SEQ ID NO: 44123 - protein, 157 aa, Arabidopsis thaliana
  peptide (1)..(157): Ceres Seq. ID no. 12466274
MSLIPSIFGGRRTNVFDPFSLDVFDPFEGFLTPSGLANAPAMDVAAFTNAKVDWRETPEAHVFKADLPGLRKEEVKVEVEDGNILQISGERSNENEEKNDKWHRVERSSGKFTRRFRLPENAKMEEIKASMENGVLSVTVPKVPEKKPEVKSIDISG

SEQ ID NO: 44124 - protein, 116 aa, Arabidopsis thaliana
  peptide (1)..(116): Ceres Seq. ID no. 12466275
MDVAAFTNAKVDWRETPEAHVFKADLPGLRKEEVKVEVEDGNILQISGERSNENEEKNDKWHRVERSSGKFTRRFRLPENAKMEEIKASMENGVLSVTVPKVPEKKPEVKSIDISG

SEQ ID NO: 44125 - DNA, 1267 bp, Arabidopsis thaliana; identical to SEQ ID NO: 26325
  misc_feature (1)..(1267): Ceres Seq. ID no. 12488498
  misc_feature (1)..(1267): Ortholog of  Ceres SEQ ID NO 14303417 as cited in SEQ ID NO 54923
  misc_feature (1)..(1267): Ortholog of  Ceres SEQ ID NO 15169084 as cited in SEQ ID NO 59115
  misc_feature (1)..(1267): Ortholog of  Ceres SEQ ID NO 12635513 as cited in SEQ ID NO 0
  misc_feature (1)..(1267): Ortholog of  Ceres SEQ ID NO 15179044 as cited in SEQ ID NO 0

SEQ ID NO: 44126 - protein, 251 aa, Arabidopsis thaliana; identical to SEQ ID NO: 26326
  peptide (1)..(251): Ceres Seq. ID no. 12488499

SEQ ID NO: 44127 - protein, 148 aa, Arabidopsis thaliana; identical to SEQ ID NO: 26327
  peptide (1)..(148): Ceres Seq. ID no. 12488500

SEQ ID NO: 44128 - protein, 142 aa, Arabidopsis thaliana; identical to SEQ ID NO: 26328
  peptide (1)..(142): Ceres Seq. ID no. 12488501

SEQ ID NO: 44129 - DNA, 2045 bp, Arabidopsis thaliana
  misc_feature (1)..(2045): Ceres Seq. ID no. 13504748
  misc_feature (1)..(2045): Ortholog of  Ceres SEQ ID NO 15171040 as cited in SEQ ID NO 55332
cggagaaaaagaaagagagagagagaagaagaatcgtggagatggcttcgaccccgaagcttaccagtacaatttcatcatcttctccatctcttcaattcctctgcaaaaaactcccaatcgcaattcatctaccatcatcttcttcctctagctttctctcgcttcctaaaaccctaacctctctctattctctccgtccccgtatcgccctactctcaaaccaccgctattaccactctcgccggttttctgtttgtgccagtaccgataatggagctgaatcagaccgccactacgattttgatctcttcactatcggtgccggaagcggcggcgtccgcgcctctcgcttcgccactagcttcggtgcatccgccgccgtttgcgagcttcctttttccactatctcttccgatactgctggaggcgttggaggaacgtgtgtattgagaggatgtgtaccaaagaagttacttgtgtatgcatccaaatacagtcatgagtttgaagacagtcatggatttggttggaagtatgagactgagccttctcatgattggactactttgattgctaacaagaatgctgagttacagcggttgactggtatttataagaatatactgagcaaagctaatgtcaagttgattgaaggtcgtggaaaggttatagacccacacactgttgatgtagatgggaaaatctatactacgaggaatattctgattgcagttggtggacgtcctttcattcctgacattccaggaaaagagtttgctattgattctgatgccgcgcttgatttgccttccaagcctaagaaaattgcaatagttggtggtggctacatagccctggagtttgcggggatcttcaatggtcttaactgtgaagttcatgtatttataaggcaaaagaaggtgctgaggggatttgatgaagatgtcagggatttcgttggagagcagatgtctttaagaggtattgagtttcacactgaagaatcccctgaagccatcatcaaagctggagatggctcgttctctctgaagaccagcaagggaactgttgagggattttcgcatgttatgtttgcaactggtcgcaagcccaacacaaagaacttagggttggagaatgttggcgttaaaatggcgaaaaatggagcaatagaggttgacgaatattcacagacatctgttccatccatctgggctgttggggatgttactgaccgaatcaatttgactccagttgctttgatggagggaggtgcattggctaaaactttgtttcaaaatgagccaacaaagcctgattatagagctgttccctgcgccgttttctcccagccacctattggaacagttggtctaactgaagagcaggccatagaacaatatggtgatgtggatgtttacacatcgaactttaggccattaaaggctaccctttcaggacttccagaccgagtatttatgaaactcattgtctgtgcaaacaccaataaagttctcggtgttcacatgtgtggagaagattcaccagaaatcatccagggatttggggttgcagttaaagctggtttaactaaggccgactttgatgctacagtgggtgttcaccccacagcagctgaggagtttgtcactatgagggctccaaccaggaaattccgcaaagactcctctgagggaaaggcaagtcctgaagctaaaacagctgctggggtgtagagaaggttgcaaaaaagattgtatttacggcattggagccccctgataaggagaacattgtgtctgtgaagaagaagcttttcttttggcagagaatattttttcataatgtcgtgtgaagatatgatcgctgtcctgcaatacttttgatcgtttgacacacgaccaaattcctcgagagagagaggttgtaactattccgaaagagctctaaaactgaagctttcagttcttgtgacatcataatgaaggctgtatagatataacagtttcgagttttatttggatttgtagtatttttgtttt

SEQ ID NO: 44130 - protein, 578 aa, Arabidopsis thaliana
  peptide (1)..(578): Ceres Seq. ID no. 13504749
EKKKERERRRIVEMASTPKLTSTISSSSPSLQFLCKKLPIAIHLPSSSSSSFLSLPKTLTSLYSLRPRIALLSNHRYYHSRRFSVCASTDNGAESDRHYDFDLFTIGAGSGGVRASRFATSFGASAAVCELPFSTISSDTAGGVGGTCVLRGCVPKKLLVYASKYSHEFEDSHGFGWKYETEPSHDWTTLIANKNAELQRLTGIYKNILSKANVKLIEGRGKVIDPHTVDVDGKIYTTRNILIAVGGRPFIPDIPGKEFAIDSDAALDLPSKPKKIAIVGGGYIALEFAGIFNGLNCEVHVFIRQKKVLRGFDEDVRDFVGEQMSLRGIEFHTEESPEAIIKAGDGSFSLKTSKGTVEGFSHVMFATGRKPNTKNLGLENVGVKMAKNGAIEVDEYSQTSVPSIWAVGDVTDRINLTPVALMEGGALAKTLFQNEPTKPDYRAVPCAVFSQPPIGTVGLTEEQAIEQYGDVDVYTSNFRPLKATLSGLPDRVFMKLIVCANTNKVLGVHMCGEDSPEIIQGFGVAVKAGLTKADFDATVGVHPTAAEEFVTMRAPTRKFRKDSSEGKASPEAKTAAGV

SEQ ID NO: 44131 - protein, 565 aa, Arabidopsis thaliana
  peptide (1)..(565): Ceres Seq. ID no. 13504750
MASTPKLTSTISSSSPSLQFLCKKLPIAIHLPSSSSSSFLSLPKTLTSLYSLRPRIALLSNHRYYHSRRFSVCASTDNGAESDRHYDFDLFTIGAGSGGVRASRFATSFGASAAVCELPFSTISSDTAGGVGGTCVLRGCVPKKLLVYASKYSHEFEDSHGFGWKYETEPSHDWTTLIANKNAELQRLTGIYKNILSKANVKLIEGRGKVIDPHTVDVDGKIYTTRNILIAVGGRPFIPDIPGKEFAIDSDAALDLPSKPKKIAIVGGGYIALEFAGIFNGLNCEVHVFIRQKKVLRGFDEDVRDFVGEQMSLRGIEFHTEESPEAIIKAGDGSFSLKTSKGTVEGFSHVMFATGRKPNTKNLGLENVGVKMAKNGAIEVDEYSQTSVPSIWAVGDVTDRINLTPVALMEGGALAKTLFQNEPTKPDYRAVPCAVFSQPPIGTVGLTEEQAIEQYGDVDVYTSNFRPLKATLSGLPDRVFMKLIVCANTNKVLGVHMCGEDSPEIIQGFGVAVKAGLTKADFDATVGVHPTAAEEFVTMRAPTRKFRKDSSEGKASPEAKTAAGV

SEQ ID NO: 44132 - DNA, 1420 bp, Arabidopsis thaliana
  misc_feature (1)..(1420): Ceres Seq. ID no. 13503804
  misc_feature (1)..(1420): Ortholog of  Ceres SEQ ID NO 14312844 as cited in SEQ ID NO 55601
  misc_feature (1)..(1420): Ortholog of  Ceres SEQ ID NO 13597376 as cited in SEQ ID NO 64002
  misc_feature (1)..(1420): Ortholog of  Ceres SEQ ID NO 13503573 as cited in SEQ ID NO 65402
  misc_feature (1)..(1420): Ortholog of  Ceres SEQ ID NO 13659615 as cited in SEQ ID NO 67248
tgccactcatttttcctatttttcgctttgcgtgccttcttatcaacttgtaaacaaagctacaaatatctttaaataaggacccaactctttttcaattcctcccatcaatcttcttcatttgttcttctgttggtggtggtgatctagttttcaaagaatcgattttgccaagtgggttcttcttgataacctttcttcttctttgaaatgggttcttctgtggagcagaacattcttgttactggtggtgctggctttatcgggacgcatactgttgttcaacttctcaaagatggttttaaggtttcgatcatcgataattttgataactctgttatcgaagctgttgatagagttagggagcttgttggtcctgatctctccaagaagctcgacttcaatctgggtgatctaagaaacaaaggggacattgagaaactattctccaagcagagatttgatgctgtgattcattttgcgggtcttaaagctgtgggtgagagtgttgaaaaccctcgccgctactttgacaataacttggttggaacaatcaatctatatgagaccatggcaaagtacaactgcaaaatgatggtgttttcatcttctgccactgtttatggacaacctgaaaagattccatgcatggaagactttgaattaaaggctatgaatccttatggtcgtactaagctctttcttgaagaaatagctagagatattcaaaaggcagaaccggaatggagaattattctgctgaggtacttcaatcctgtaggagcacatgagagtggcagtattggtgaggatccaaaaggcatccccaataacctcatgccttacatccaacaagtggccgttggacgtttaccggaactcaatgtctatggacatgactatcccaccgaggatggtagtgcggtaagagactacatccatgtgatggatttagcagatggccatatcgctgcgctcaggaagctatttgctgatccaaagattggttgtactgcttacaatctagggactggtcaaggaacgtctgtgttagaaatggttgcagcttttgaaaaagcttccggcaagaaaatcccgattaagctctgtccgagaaggtcaggagatgcaacagcagtttatgcttcaacagagaaggctgagaaagaacttggctggaaggcaaaatatggagtggatgagatgtgcagagatcagtggaaatgggcaaacaataatccatggggttaccagaataagctttgaatttacttcttttgtttggagttaccatttctaattactcaaatctaaaagaaagaaatatacatacatatgatgatatagttgtgctttatattccacatgtatcgaactgatctcttacttcgatgaataaaatggaaagttgatttgattg

SEQ ID NO: 44133 - protein, 351 aa, Arabidopsis thaliana
  peptide (1)..(351): Ceres Seq. ID no. 13503805
MGSSVEQNILVTGGAGFIGTHTVVQLLKDGFKVSIIDNFDNSVIEAVDRVRELVGPDLSKKLDFNLGDLRNKGDIEKLFSKQRFDAVIHFAGLKAVGESVENPRRYFDNNLVGTINLYETMAKYNCKMMVFSSSATVYGQPEKIPCMEDFELKAMNPYGRTKLFLEEIARDIQKAEPEWRIILLRYFNPVGAHESGSIGEDPKGIPNNLMPYIQQVAVGRLPELNVYGHDYPTEDGSAVRDYIHVMDLADGHIAALRKLFADPKIGCTAYNLGTGQGTSVLEMVAAFEKASGKKIPIKLCPRRSGDATAVYASTEKAEKELGWKAKYGVDEMCRDQWKWANNNPWGYQNKL

SEQ ID NO: 44134 - protein, 231 aa, Arabidopsis thaliana
  peptide (1)..(231): Ceres Seq. ID no. 13503806
MAKYNCKMMVFSSSATVYGQPEKIPCMEDFELKAMNPYGRTKLFLEEIARDIQKAEPEWRIILLRYFNPVGAHESGSIGEDPKGIPNNLMPYIQQVAVGRLPELNVYGHDYPTEDGSAVRDYIHVMDLADGHIAALRKLFADPKIGCTAYNLGTGQGTSVLEMVAAFEKASGKKIPIKLCPRRSGDATAVYASTEKAEKELGWKAKYGVDEMCRDQWKWANNNPWGYQNKL

SEQ ID NO: 44135 - protein, 224 aa, Arabidopsis thaliana
  peptide (1)..(224): Ceres Seq. ID no. 13503807
MMVFSSSATVYGQPEKIPCMEDFELKAMNPYGRTKLFLEEIARDIQKAEPEWRIILLRYFNPVGAHESGSIGEDPKGIPNNLMPYIQQVAVGRLPELNVYGHDYPTEDGSAVRDYIHVMDLADGHIAALRKLFADPKIGCTAYNLGTGQGTSVLEMVAAFEKASGKKIPIKLCPRRSGDATAVYASTEKAEKELGWKAKYGVDEMCRDQWKWANNNPWGYQNKL

SEQ ID NO: 44136 - DNA, 1387 bp, Arabidopsis thaliana; identical to SEQ ID NO: 34756
  misc_feature (1)..(1387): Ceres Seq. ID no. 13509801
  misc_feature (1)..(1387): Ortholog of  Ceres SEQ ID NO 13596474 as cited in SEQ ID NO 62169
  misc_feature (1)..(1387): Ortholog of  Ceres SEQ ID NO 13596969 as cited in SEQ ID NO 63375
  misc_feature (1)..(1387): Ortholog of  Ceres SEQ ID NO 13597519 as cited in SEQ ID NO 64759
  misc_feature (1)..(1387): Ortholog of  Ceres SEQ ID NO 13597870 as cited in SEQ ID NO 64982
  misc_feature (1)..(1387): Ortholog of  Ceres SEQ ID NO 13662323 as cited in SEQ ID NO 68305
  misc_feature (1)..(1387): Ortholog of  Ceres SEQ ID NO 12567001 as cited in SEQ ID NO 0

SEQ ID NO: 44137 - protein, 330 aa, Arabidopsis thaliana; identical to SEQ ID NO: 34757
  peptide (1)..(330): Ceres Seq. ID no. 13509802

SEQ ID NO: 44138 - protein, 324 aa, Arabidopsis thaliana; identical to SEQ ID NO: 34758
  peptide (1)..(324): Ceres Seq. ID no. 13509803

SEQ ID NO: 44139 - protein, 323 aa, Arabidopsis thaliana; identical to SEQ ID NO: 34759
  peptide (1)..(323): Ceres Seq. ID no. 13509804

SEQ ID NO: 44140 - DNA, 1403 bp, Arabidopsis thaliana
  misc_feature (1)..(1403): Ceres Seq. ID no. 13509717
  misc_feature (1)..(1403): Ortholog of  Ceres SEQ ID NO 14316532 as cited in SEQ ID NO 57093
  misc_feature (1)..(1403): Ortholog of  Ceres SEQ ID NO 14301482 as cited in SEQ ID NO 63355
gacgaggaaacaacaaaaaggaagaagcgaagaacgaagtagacgaagacgatgaagaaaggtggattcagcaataatctcaagctcgcaattcctgttgctggcgagcaatccatcaccaaattcctgactcaaagcggtacgtttaaggatggagatctacgtgttaacaaggatggagttcgaatcatttctcaattggagcctgaagtcctgtctccaattaagccagctgatgatcagctgagcttgtcggatttggatatggttaaagtcattggcaaaggaagtagtggtgttgttcagctggttcaacacaaatggactggccaatttttcgccttgaaggtcattcaactaaatattgatgaagcaattcgcaaggcaattgcacaagagctcaaaataaatcaatcgtcacagtgtccaaatcttgttacctcgtaccagtcattttatgacaatggcgcaatctcactaatcttggagtacatggacggaggatctctagcagactttctcaagtcagttaaagccatccctgactcctatctttctgccatctttagacaagtgcttcaaggattaatctatcttcatcacgataggcatatcatccatcgtgacttgaaaccatccaatctgttgatcaaccacagaggagaagtcaaaataactgactttggtgtgagtaccgttatgacaaacaccgcaggtttagcaaacacatttgtggggacttacaattatatgtctccagagagaatcgttggaaacaagtacggaaataaaagtgatatatggagcttgggtttagtagtactcgaatgtgcaacaggaaagttcccttatgcacctccgaatcaagaggaaacatggaccagtgttttcgagttgatggaagccattgttgaccaaccgccacccgctcttccttcaggaaatttctcccctgagttatcttcattcatctccacatgtttgcagaaggatccaaacagtcgaagctctgcaaaggaactgatggaacatcctttcttgaacaaatacgactactcggggatcaatctcgcgtcctacttcacagatgcaggatcgccacttgcaacacttgggaacctgtctggtacgttctccgtgtaaactacaagggagacataatatcaccatctggttcctgttatcatctgaagatttcttgttttaccttccagtgataaaatgatctttataatacatatagatatattaaattgctgtattttaagattatagatatataaggtacatgagagtgtttatttaaaaaaattcacttggaattcatgttttgtgatacgttagattggaatccatttgggaaaagaagaatcatctgttcttatgtctcaaattttgacttc

SEQ ID NO: 44141 - protein, 363 aa, Arabidopsis thaliana
  peptide (1)..(363): Ceres Seq. ID no. 13509718
MKKGGFSNNLKLAIPVAGEQSITKFLTQSGTFKDGDLRVNKDGVRIISQLEPEVLSPIKPADDQLSLSDLDMVKVIGKGSSGVVQLVQHKWTGQFFALKVIQLNIDEAIRKAIAQELKINQSSQCPNLVTSYQSFYDNGAISLILEYMDGGSLADFLKSVKAIPDSYLSAIFRQVLQGLIYLHHDRHIIHRDLKPSNLLINHRGEVKITDFGVSTVMTNTAGLANTFVGTYNYMSPERIVGNKYGNKSDIWSLGLVVLECATGKFPYAPPNQEETWTSVFELMEAIVDQPPPALPSGNFSPELSSFISTCLQKDPNSRSSAKELMEHPFLNKYDYSGINLASYFTDAGSPLATLGNLSGTFSV

SEQ ID NO: 44142 - protein, 292 aa, Arabidopsis thaliana
  peptide (1)..(292): Ceres Seq. ID no. 13509719
MVKVIGKGSSGVVQLVQHKWTGQFFALKVIQLNIDEAIRKAIAQELKINQSSQCPNLVTSYQSFYDNGAISLILEYMDGGSLADFLKSVKAIPDSYLSAIFRQVLQGLIYLHHDRHIIHRDLKPSNLLINHRGEVKITDFGVSTVMTNTAGLANTFVGTYNYMSPERIVGNKYGNKSDIWSLGLVVLECATGKFPYAPPNQEETWTSVFELMEAIVDQPPPALPSGNFSPELSSFISTCLQKDPNSRSSAKELMEHPFLNKYDYSGINLASYFTDAGSPLATLGNLSGTFSV

SEQ ID NO: 44143 - protein, 216 aa, Arabidopsis thaliana
  peptide (1)..(216): Ceres Seq. ID no. 13509720
MDGGSLADFLKSVKAIPDSYLSAIFRQVLQGLIYLHHDRHIIHRDLKPSNLLINHRGEVKITDFGVSTVMTNTAGLANTFVGTYNYMSPERIVGNKYGNKSDIWSLGLVVLECATGKFPYAPPNQEETWTSVFELMEAIVDQPPPALPSGNFSPELSSFISTCLQKDPNSRSSAKELMEHPFLNKYDYSGINLASYFTDAGSPLATLGNLSGTFSV

SEQ ID NO: 44144 - DNA, 858 bp, Arabidopsis thaliana
  misc_feature (1)..(858): Ceres Seq. ID no. 12466127
  misc_feature (1)..(858): Ortholog of  Ceres SEQ ID NO 14302764 as cited in SEQ ID NO 67753
  misc_feature (1)..(858): Ortholog of  Ceres SEQ ID NO 14302291 as cited in SEQ ID NO 68180
agatatttgataaatcaatcaacaaaacaaaaaaaactctatagttagtttctctgaaaatgtacggacagtgcaatatagaatccgactacgctttgttggagtcgataacacgtcacttgctaggaggaggaggacatgttggtgtacggactcctcaaagatgccttccattttgacacgtcatcatcggacttgagctgtctttttgattttccggcggttaaagtcgagccaactgagaactttacggcgatggaggagaaaccaaagaaagcgataccggttacggagacggcagtgaaggcgaagcattacagaggagtgaggcagagaccgtgggggaaattcgcggcggagatacgtgatccggcgaagaatggagctagggtttggttagggacgtttgagacggcggaagatgcggctttagcttacgatatagctgcttttaggatgcgtggttcccgcgctttattgaattttccgttgagggttaattccggtgaacctgacccggttcggatcacgtctaagagatcttcttcgtcgtcgtcgtcgtcgtcctcttctacgtcgtcgtctgaaaacgggaagttgaaacgaaggagaaaagcagagaatctgacgtcggaggtggtgcaggtgaagtgtgaggttggtgatgagacacgtgttgatgagttattggtttcataagtttgatcttgtgtgttttgtagttgaatagttttgctataaatgttgaggcaccaagtaaaagtgttcccgtgatgtaaattagttactaaacagagccatatatcttcaatccataaacaaaatagacactttaataaagccgtgagtgttaatttt

SEQ ID NO: 44145 - protein, 186 aa, Arabidopsis thaliana; identical to SEQ ID NO: 26541
  peptide (1)..(186): Ceres Seq. ID no. 12466128

SEQ ID NO: 44146 - protein, 147 aa, Arabidopsis thaliana; identical to SEQ ID NO: 26542
  peptide (1)..(147): Ceres Seq. ID no. 12466129

SEQ ID NO: 44147 - DNA, 771 bp, Arabidopsis thaliana; identical to SEQ ID NO: 25848
  misc_feature (1)..(771): Ceres Seq. ID no. 13503800
  misc_feature (1)..(771): Ortholog of  Ceres SEQ ID NO 15170072 as cited in SEQ ID NO 55533
  misc_feature (1)..(771): Ortholog of  Ceres SEQ ID NO 15173959 as cited in SEQ ID NO 63398
  misc_feature (1)..(771): Ortholog of  Ceres SEQ ID NO 13663564 as cited in SEQ ID NO 66903

SEQ ID NO: 44148 - protein, 158 aa, Arabidopsis thaliana; identical to SEQ ID NO: 25849
  peptide (1)..(158): Ceres Seq. ID no. 13503801

SEQ ID NO: 44149 - protein, 123 aa, Arabidopsis thaliana; identical to SEQ ID NO: 25850
  peptide (1)..(123): Ceres Seq. ID no. 13503802

SEQ ID NO: 44150 - protein, 115 aa, Arabidopsis thaliana; identical to SEQ ID NO: 25851
  peptide (1)..(115): Ceres Seq. ID no. 13503803

SEQ ID NO: 44151 - DNA, 999 bp, Arabidopsis thaliana
  misc_feature (1)..(999): Ceres Seq. ID no. 12580301
  misc_feature (1)..(999): Ortholog of  Ceres SEQ ID NO 14304983 as cited in SEQ ID NO 53862
  misc_feature (1)..(999): Ortholog of  Ceres SEQ ID NO 14310483 as cited in SEQ ID NO 58376
  misc_feature (1)..(999): Ortholog of  Ceres SEQ ID NO 13597528 as cited in SEQ ID NO 64802
  misc_feature (1)..(999): Ortholog of  Ceres SEQ ID NO 13654451 as cited in SEQ ID NO 67881
aaaattcaatgggagaggaagataagaaaatggaggagaagaaatctgaagagccacaagcgaaatcagaagataagaaaccagaagaagagaaaaagaaagaacctcaagagattgtgcttaagatttttatgcattgtgaaggttgtgctaaaaaaatccatagatgtcttaaaggctttgaaggagtggaggatgtaactactgattgtaagactagtaaagttgtggtgaaaggagagaaggcagatccattaaaagtgttgcaaagattgcagaggaagagccatcgtcaagtggagcttatctcaccgattccggagcctaaaccggtttctgataaaccggagaaaaaggagaaggagaaacctaaacctgaggagaaaaaagaagaggtagtgacagtggtgctgagagttcacatgcattgngaagcatgtgccatggagattcaaaagaggatcatgagaatgaaaggagtggagtctgtgganccagattttaaagcatcncnagtgagcgtgaaaggagtttttacgccggaaaagctagttgagttcatttacaagagaatcgggaagcatgccgcggttgtcaagcaagatccgccgccaaaacctccggagaaagaaaaagaaacgaaagncaaagacgagaagaaaaaggaagagggncagcccaaagaaggaaaagaggccaaggaaaacggtggtggaggaggtgctaaaggcgatggtgctgccgcggaggaggggaacaaagtggtagacttgaagaagaacgaatatcagtaccagccnccgaggtaccccgtggagatgtttgcttatccaccgcagatattcagtgatgaaaaccccaatgcttgtaccattatgtaataaaatcgtcggtttaaggggttgtaggatttgttatttttttactttatttctatgcagaattttaatttaaatgtatttttggtaatttttagtttcaaccgaattgaatgatcgc

SEQ ID NO: 44152 - protein, 292 aa, Arabidopsis thaliana
  peptide (1)..(292): Ceres Seq. ID no. 12580302
  misc_feature (143)..(143): Xaa is any aa, unknown or other
  misc_feature (164)..(164): Xaa is any aa, unknown or other
  misc_feature (170)..(170): Xaa is any aa, unknown or other
  misc_feature (171)..(171): Xaa is any aa, unknown or other
  misc_feature (215)..(215): Xaa is any aa, unknown or other
  misc_feature (224)..(224): Xaa is any aa, unknown or other
  misc_feature (266)..(266): Xaa is any aa, unknown or other
NSMGEEDKKMEEKKSEEPQAKSEDKKPEEEKKKEPQEIVLKIFMHCEGCAKKIHRCLKGFEGVEDVTTDCKTSKVVVKGEKADPLKVLQRLQRKSHRQVELISPIPEPKPVSDKPEKKEKEKPKPEEKKEEVVTVVLRVHMHXEACAMEIQKRIMRMKGVESVXPDFKAXXVSVKGVFTPEKLVEFIYKRIGKHAAVVKQDPPPKPPEKEKETKXKDEKKKEEXQPKEGKEAKENGGGGGAKGDGAAAEEGNKVVDLKKNEYQYQXPRYPVEMFAYPPQIFSDENPNACTIM

SEQ ID NO: 44153 - protein, 290 aa, Arabidopsis thaliana
  peptide (1)..(290): Ceres Seq. ID no. 12580303
  misc_feature (141)..(141): Xaa is any aa, unknown or other
  misc_feature (162)..(162): Xaa is any aa, unknown or other
  misc_feature (168)..(168): Xaa is any aa, unknown or other
  misc_feature (169)..(169): Xaa is any aa, unknown or other
  misc_feature (213)..(213): Xaa is any aa, unknown or other
  misc_feature (222)..(222): Xaa is any aa, unknown or other
  misc_feature (264)..(264): Xaa is any aa, unknown or other
MGEEDKKMEEKKSEEPQAKSEDKKPEEEKKKEPQEIVLKIFMHCEGCAKKIHRCLKGFEGVEDVTTDCKTSKVVVKGEKADPLKVLQRLQRKSHRQVELISPIPEPKPVSDKPEKKEKEKPKPEEKKEEVVTVVLRVHMHXEACAMEIQKRIMRMKGVESVXPDFKAXXVSVKGVFTPEKLVEFIYKRIGKHAAVVKQDPPPKPPEKEKETKXKDEKKKEEXQPKEGKEAKENGGGGGAKGDGAAAEEGNKVVDLKKNEYQYQXPRYPVEMFAYPPQIFSDENPNACTIM

SEQ ID NO: 44154 - protein, 283 aa, Arabidopsis thaliana
  peptide (1)..(283): Ceres Seq. ID no. 12580304
  misc_feature (134)..(134): Xaa is any aa, unknown or other
  misc_feature (155)..(155): Xaa is any aa, unknown or other
  misc_feature (161)..(161): Xaa is any aa, unknown or other
  misc_feature (162)..(162): Xaa is any aa, unknown or other
  misc_feature (206)..(206): Xaa is any aa, unknown or other
  misc_feature (215)..(215): Xaa is any aa, unknown or other
  misc_feature (257)..(257): Xaa is any aa, unknown or other
MEEKKSEEPQAKSEDKKPEEEKKKEPQEIVLKIFMHCEGCAKKIHRCLKGFEGVEDVTTDCKTSKVVVKGEKADPLKVLQRLQRKSHRQVELISPIPEPKPVSDKPEKKEKEKPKPEEKKEEVVTVVLRVHMHXEACAMEIQKRIMRMKGVESVXPDFKAXXVSVKGVFTPEKLVEFIYKRIGKHAAVVKQDPPPKPPEKEKETKXKDEKKKEEXQPKEGKEAKENGGGGGAKGDGAAAEEGNKVVDLKKNEYQYQXPRYPVEMFAYPPQIFSDENPNACTIM

SEQ ID NO: 44155 - DNA, 1037 bp, Arabidopsis thaliana
  misc_feature (1)..(1037): Ceres Seq. ID no. 14304439
  misc_feature (1)..(1037): Ortholog of  Ceres SEQ ID NO 13595497 as cited in SEQ ID NO 51127
ctcctttgtctcgcttttttcttttgttctttcacatgtgtatatacacacagaacacacacttacatttctattatcatataaaacttcaactttaccttttatcttccaaaaaaaacactatcttcttcatcaaattctcttgattctgtttctttttatcctcctccatggccctctcacctaattcaagctctttagatttaacaatctcaattccgagcttctctccatctccttcacttggtgatcatcacgggatgagagattttgacataaaccaaacaccaaagacggaagaagatcgtgagtggatgatcggtgcaacaccacatgtcaacgaagatgatagcaactcgggtggccggcggcgcaaaaagctccgtctaacgaaagaacaatcacatcttcttgaagagagtttcatacaaaaccataccttaacccctaagcaaaaaaaagatttggccacctttttgaagcttagtcaaaggcaagttgaggtgtggtttcaaaatcgaagagctcggagtaagctaaagcacacggaaatggaatgtgagtatctaaaaagatggttcggatcgttgaaggaacaaaatcgacggctacaaatagaagttgaagaactacgagcgctaaagccatcatcgacctcggctttaaccatgtgtcctcggtgtgaacgtgtgactgatgcagtagataatgactctaatgccgttcaagagggggcagttcttagcagccggtcacggatgacaatttcctcttcctcttccctctgttgactggtttggtcgaagtcaaaagtcaaaagataaacgcctgtttcggggtaaaaagcaaagatttgatgatgattaggaggattttgtgtatagtttgctaattatttattacaaatttacaaaccagtgaggaaaaaagataatttaattctcgatctttaattagctttttgtgttatttattcataattttatttttcgtgtttaaccaaaaaatagacaaaacaaatattgcttttcgtgttc

SEQ ID NO: 44156 - protein, 206 aa, Arabidopsis thaliana
  peptide (1)..(206): Ceres Seq. ID no. 14304440
MALSPNSSSLDLTISIPSFSPSPSLGDHHGMRDFDINQTPKTEEDREWMIGATPHVNEDDSNSGGRRRKKLRLTKEQSHLLEESFIQNHTLTPKQKKDLATFLKLSQRQVEVWFQNRRARSKLKHTEMECEYLKRWFGSLKEQNRRLQIEVEELRALKPSSTSALTMCPRCERVTDAVDNDSNAVQEGAVLSSRSRMTISSSSSLC

SEQ ID NO: 44157 - protein, 176 aa, Arabidopsis thaliana
  peptide (1)..(176): Ceres Seq. ID no. 14304441
MRDFDINQTPKTEEDREWMIGATPHVNEDDSNSGGRRRKKLRLTKEQSHLLEESFIQNHTLTPKQKKDLATFLKLSQRQVEVWFQNRRARSKLKHTEMECEYLKRWFGSLKEQNRRLQIEVEELRALKPSSTSALTMCPRCERVTDAVDNDSNAVQEGAVLSSRSRMTISSSSSLC

SEQ ID NO: 44158 - protein, 158 aa, Arabidopsis thaliana
  peptide (1)..(158): Ceres Seq. ID no. 14304442
MIGATPHVNEDDSNSGGRRRKKLRLTKEQSHLLEESFIQNHTLTPKQKKDLATFLKLSQRQVEVWFQNRRARSKLKHTEMECEYLKRWFGSLKEQNRRLQIEVEELRALKPSSTSALTMCPRCERVTDAVDNDSNAVQEGAVLSSRSRMTISSSSSLC

SEQ ID NO: 44159 - DNA, 1246 bp, Arabidopsis thaliana
  misc_feature (1)..(1246): Ceres Seq. ID no. 13509786
  misc_feature (1)..(1246): Ortholog of  Ceres SEQ ID NO 14313449 as cited in SEQ ID NO 62735
atagcagaggaaagtgaaatcatgaaagggattctagggtttgaatacgggatagttcaggcgccattaggaccagatatctccggaccagagcttgtagccgccgtcgctaatgcaggagggattggtcttctcagatgtcctgattgggagtgtcctgattacttgagagagcttataagaaagacaaagacattgacagagaaaccatttgggatcggtgttgttcttgcgtttcctcatgatttgaacattaagacaatcttagaagagaaagtggctgtcttgcagctttattggggtgattgttcacaggagcttgtggatgatgctcactttgccggtgtcaaagttattcctcaggtggggaatgtcgaagaagctagaaaggctgttgctgtaggagtagacgccattattgtccaagggcgtgaagcaggtgggcatgttattggcaaggatggtctcttttcattgttgccaagagtggtggatttagttggggaacgcgatattcccgttattgctgctggaggaattgtggatggacgcggttatgttgcagctttgtcacttggggctcaaggggtctgtctaggcacaagatttgtggcgactcatgaaagctatgcacacccaatatacaaaaggaagttgattgaatatgaaaaaaccgaatacacggatgtatttggaagagcaaggtggcctggtgcgcctcaacgtgttctggagacgcctttctttgatgactggaggtctcttccggctcatgagaatgaagttaaccaacctattattggacgttccaccatacatggcgttgaaaaggagataagaagattttcaggaacagtaccaaacatgacgacaacaggcgacttagagagtatggctatgtatgcaggccaaagcgtaggccttatcaaggagattttaccggctggagaggtagtgaaaagtcttgtggaagaagctcaggctctgatcctccaaaagttcaacaatgctactactacatgatgcagtcccagcctcaaatcatgagaaaacataaactttactgcttttggaatcgggatgaaaatagtctcatctaatgtaaataaggtacataaacttctgtatctctcgtgttgttttcaactagaaaaattgtgtccatcatgtgtaatccagcaatagaccttgtgtattggattaagtatacttcttatggttgtttgtttcctgtgaaactttccac

SEQ ID NO: 44160 - protein, 340 aa, Arabidopsis thaliana
  peptide (1)..(340): Ceres Seq. ID no. 13509787
IAEESEIMKGILGFEYGIVQAPLGPDISGPELVAAVANAGGIGLLRCPDWECPDYLRELIRKTKTLTEKPFGIGVVLAFPHDLNIKTILEEKVAVLQLYWGDCSQELVDDAHFAGVKVIPQVGNVEEARKAVAVGVDAIIVQGREAGGHVIGKDGLFSLLPRVVDLVGERDIPVIAAGGIVDGRGYVAALSLGAQGVCLGTRFVATHESYAHPIYKRKLIEYEKTEYTDVFGRARWPGAPQRVLETPFFDDWRSLPAHENEVNQPIIGRSTIHGVEKEIRRFSGTVPNMTTTGDLESMAMYAGQSVGLIKEILPAGEVVKSLVEEAQALILQKFNNATTT

SEQ ID NO: 44161 - protein, 333 aa, Arabidopsis thaliana
  peptide (1)..(333): Ceres Seq. ID no. 13509788
MKGILGFEYGIVQAPLGPDISGPELVAAVANAGGIGLLRCPDWECPDYLRELIRKTKTLTEKPFGIGVVLAFPHDLNIKTILEEKVAVLQLYWGDCSQELVDDAHFAGVKVIPQVGNVEEARKAVAVGVDAIIVQGREAGGHVIGKDGLFSLLPRVVDLVGERDIPVIAAGGIVDGRGYVAALSLGAQGVCLGTRFVATHESYAHPIYKRKLIEYEKTEYTDVFGRARWPGAPQRVLETPFFDDWRSLPAHENEVNQPIIGRSTIHGVEKEIRRFSGTVPNMTTTGDLESMAMYAGQSVGLIKEILPAGEVVKSLVEEAQALILQKFNNATTT

SEQ ID NO: 44162 - DNA, 2002 bp, Arabidopsis thaliana
  misc_feature (1)..(2002): Ceres Seq. ID no. 12489432
  misc_feature (1)..(2002): Ortholog of  Ceres SEQ ID NO 13638136 as cited in SEQ ID NO 58644
  misc_feature (1)..(2002): Ortholog of  Ceres SEQ ID NO 13596868 as cited in SEQ ID NO 62806
  misc_feature (1)..(2002): Ortholog of  Ceres SEQ ID NO 14302836 as cited in SEQ ID NO 65013
  misc_feature (1)..(2002): Ortholog of  Ceres SEQ ID NO 12566239 as cited in SEQ ID NO 0
catttcctccttctttctctcttctatctgtgaacaaggcacattagaactcttcttttcaacttttttaggtgtatatagatgaatctagaaatagttttatagttggaaattaattgaagagagagagatattactacaccaatcttttcaagaggtcctaacgaattacccacaatccaggaaacccttattgaaattcaattcatttctttctttctgtgtttgtgattttcccgggaaatatttttgggtatatgtctctctgtttttgctttcctttttcataggagtcatgtgtttcttcttgtcttcctagcttcttctaataaagtccttctcttgtgaaaatctctcgaattttcatttttgttccattggagctatcttatagatcacaaccagagaaaaagatcaaatctttaccgttaatggaggaagtatctccggcgatcgcaggtcctttcaggccattctccgaaacccagatggatttcaccgggatcagattgggtaaaggttactgcaataaccaatactcaaatcaagattccgagaacggagatctaatggtttcgttaccggagacttcatcatgctctgtttctgggtcacatggttctgaatctaggaaagttttgatttctcggatcaattctcctaatttaaacatgaaggaatcagcagctgctgatatagtcgtcgttgatatctccgccggagatgagatcaacggctcagatattactagcgagaagaagatgatcagcagaacagagagtaggagtttgtttgaattcaagagtgtgcctttgtatggttttacttcgatttgtggaagaagacctgagatggaagatgctgtttcgactataccaagattccttcaatcttcctctggttcgatgttagatggtcggtttgatcctcaatccgccgctcatttcttcggtgtttacgacggccatggcggttctcaggtagcgaactattgtagagagaggatgcatttggctttggcggaggagatagctaaggagaaaccgatgctctgcgatggtgatacgtggctggagaagtggaagaaagctcttttcaactcgttcctgagagttgactcggagattgagtcagttgcgccggagacggttgggtcaacgtcggtggttgccgttgttttcccgtctcacatcttcgtcgctaactgcggtgactctagagccgttctttgccgcggcaaaactgcacttccattatccgttgaccataaaccggatagagaagatgaagctgcgaggattgaagccgcaggagggaaagtgattcagtggaatggagctcgtgttttcggtgttctcgccatgtcgagatccattggcgatagatacttgaaaccatccatcattcctgatccggaagtgacggctgtgaagagagtaaaagaagatgattgtctgattttggcgagtgacggggtttgggatgtaatgacggatgaagaagcgtgtgagatggcaaggaagcggattctcttgtggcacaagaaaaacgcggtggctggggatgcatcgttgctcgcggatgagcggagaaaggaagggaaagatcctgcggcgatgtccgcggctgagtatttgtcaaagctggcgatacagagaggaagcaaagacaacataagtgtggtggtggttgatttgaagcctcggaggaaactcaagagcaaacccttgaactgaggcagagagggtcctttttcttaatttttaaaatgaatatgggtctctccaagaaaaagtatttactattattaatttgtgcttatttttttaactaacaagttataaccatatggagataatgaagcttaatgtgttaagctcttttgtcttgactacattctaaaaagccccttgtatttttcttcccgggctaattgtaatatggttacaacatacattaagatgtagtattattgtttatgcaattactttcaaaactttac

SEQ ID NO: 44163 - protein, 434 aa, Arabidopsis thaliana
  peptide (1)..(434): Ceres Seq. ID no. 12489433
MEEVSPAIAGPFRPFSETQMDFTGIRLGKGYCNNQYSNQDSENGDLMVSLPETSSCSVSGSHGSESRKVLISRINSPNLNMKESAAADIVVVDISAGDEINGSDITSEKKMISRTESRSLFEFKSVPLYGFTSICGRRPEMEDAVSTIPRFLQSSSGSMLDGRFDPQSAAHFFGVYDGHGGSQVANYCRERMHLALAEEIAKEKPMLCDGDTWLEKWKKALFNSFLRVDSEIESVAPETVGSTSVVAVVFPSHIFVANCGDSRAVLCRGKTALPLSVDHKPDREDEAARIEAAGGKVIQWNGARVFGVLAMSRSIGDRYLKPSIIPDPEVTAVKRVKEDDCLILASDGVWDVMTDEEACEMARKRILLWHKKNAVAGDASLLADERRKEGKDPAAMSAAEYLSKLAIQRGSKDNISVVVVDLKPRRKLKSKPLN

SEQ ID NO: 44164 - protein, 415 aa, Arabidopsis thaliana
  peptide (1)..(415): Ceres Seq. ID no. 12489434
MDFTGIRLGKGYCNNQYSNQDSENGDLMVSLPETSSCSVSGSHGSESRKVLISRINSPNLNMKESAAADIVVVDISAGDEINGSDITSEKKMISRTESRSLFEFKSVPLYGFTSICGRRPEMEDAVSTIPRFLQSSSGSMLDGRFDPQSAAHFFGVYDGHGGSQVANYCRERMHLALAEEIAKEKPMLCDGDTWLEKWKKALFNSFLRVDSEIESVAPETVGSTSVVAVVFPSHIFVANCGDSRAVLCRGKTALPLSVDHKPDREDEAARIEAAGGKVIQWNGARVFGVLAMSRSIGDRYLKPSIIPDPEVTAVKRVKEDDCLILASDGVWDVMTDEEACEMARKRILLWHKKNAVAGDASLLADERRKEGKDPAAMSAAEYLSKLAIQRGSKDNISVVVVDLKPRRKLKSKPLN

SEQ ID NO: 44165 - protein, 388 aa, Arabidopsis thaliana
  peptide (1)..(388): Ceres Seq. ID no. 12489435
MVSLPETSSCSVSGSHGSESRKVLISRINSPNLNMKESAAADIVVVDISAGDEINGSDITSEKKMISRTESRSLFEFKSVPLYGFTSICGRRPEMEDAVSTIPRFLQSSSGSMLDGRFDPQSAAHFFGVYDGHGGSQVANYCRERMHLALAEEIAKEKPMLCDGDTWLEKWKKALFNSFLRVDSEIESVAPETVGSTSVVAVVFPSHIFVANCGDSRAVLCRGKTALPLSVDHKPDREDEAARIEAAGGKVIQWNGARVFGVLAMSRSIGDRYLKPSIIPDPEVTAVKRVKEDDCLILASDGVWDVMTDEEACEMARKRILLWHKKNAVAGDASLLADERRKEGKDPAAMSAAEYLSKLAIQRGSKDNISVVVVDLKPRRKLKSKPLN

SEQ ID NO: 44166 - DNA, 1002 bp, Arabidopsis thaliana
  misc_feature (1)..(1002): Ceres Seq. ID no. 13509338
  misc_feature (1)..(1002): Ortholog of  Ceres SEQ ID NO 15225495 as cited in SEQ ID NO 69133
  misc_feature (1)..(1002): Ortholog of  Ceres SEQ ID NO 15179467 as cited in SEQ ID NO 0
aggaactcgaactatcttccacaactcacgaaaatgtttctcttaaagacatggagatcaaccgcttttggggtttatggctacatgaatttcaccaagagtggtttcttagatcattcaaagaagtttaaacctgaagatatgcagttacaaattgaaggaaagaattgtgtagttactggagctaattcaggtattggttttgctgctgcagagggtcttgcttcacgtggagcaactgtttacatggtgtgccggaacaaggaaagaggacaagaggctctttctaagattcaaacctcaacaggaaaccaaaatgtgtacttggaagtatgtgatttgtcttccgttaatgaaatcaaatcatttgcttcgagtttcgcttccaaggatgttccggttcatgtgctggttaataatgctggtttgcttgagaacaaacgtactactacacctgaaggattcgagttaagttttgcggtgaatgtacttgggacatacacaatgacagagttgatgcttccattgttggagaaagcaacaccagacgccaaagtcattacagttgcctctggtggaatgtacacttcgccgcttactacagatcttcagtttagtggtgaaaaatttgatggagtggaacaatacgcacggaacaaaagaatccaggtggctctgacagaaaaatgggctgataagtacaaaaataaaggcatagggttctactcaatgcaccctggctgggctgagacaccaggtgttgccaagagtttaccgagtttcagtgaatcgttcgcgggtaagcttagaacaagcgaacaaggagccgatacaatcgtttggttagcactgcagccaaaagagaagcttgtctctggtgcattctatttcgatagagctgaagcaccaaaacatctaaagcttgcaggtacaagcaagtctcatgaccttattgactcagtcattgattctgtgcattccatggcagctcttaatccttaa

SEQ ID NO: 44167 - protein, 333 aa, Arabidopsis thaliana
  peptide (1)..(333): Ceres Seq. ID no. 13509339
RNSNYLPQLTKMFLLKTWRSTAFGVYGYMNFTKSGFLDHSKKFKPEDMQLQIEGKNCVVTGANSGIGFAAAEGLASRGATVYMVCRNKERGQEALSKIQTSTGNQNVYLEVCDLSSVNEIKSFASSFASKDVPVHVLVNNAGLLENKRTTTPEGFELSFAVNVLGTYTMTELMLPLLEKATPDAKVITVASGGMYTSPLTTDLQFSGEKFDGVEQYARNKRIQVALTEKWADKYKNKGIGFYSMHPGWAETPGVAKSLPSFSESFAGKLRTSEQGADTIVWLALQPKEKLVSGAFYFDRAEAPKHLKLAGTSKSHDLIDSVIDSVHSMAALNP

SEQ ID NO: 44168 - protein, 322 aa, Arabidopsis thaliana
  peptide (1)..(322): Ceres Seq. ID no. 13509340
MFLLKTWRSTAFGVYGYMNFTKSGFLDHSKKFKPEDMQLQIEGKNCVVTGANSGIGFAAAEGLASRGATVYMVCRNKERGQEALSKIQTSTGNQNVYLEVCDLSSVNEIKSFASSFASKDVPVHVLVNNAGLLENKRTTTPEGFELSFAVNVLGTYTMTELMLPLLEKATPDAKVITVASGGMYTSPLTTDLQFSGEKFDGVEQYARNKRIQVALTEKWADKYKNKGIGFYSMHPGWAETPGVAKSLPSFSESFAGKLRTSEQGADTIVWLALQPKEKLVSGAFYFDRAEAPKHLKLAGTSKSHDLIDSVIDSVHSMAALNP

SEQ ID NO: 44169 - protein, 305 aa, Arabidopsis thaliana
  peptide (1)..(305): Ceres Seq. ID no. 13509341
MNFTKSGFLDHSKKFKPEDMQLQIEGKNCVVTGANSGIGFAAAEGLASRGATVYMVCRNKERGQEALSKIQTSTGNQNVYLEVCDLSSVNEIKSFASSFASKDVPVHVLVNNAGLLENKRTTTPEGFELSFAVNVLGTYTMTELMLPLLEKATPDAKVITVASGGMYTSPLTTDLQFSGEKFDGVEQYARNKRIQVALTEKWADKYKNKGIGFYSMHPGWAETPGVAKSLPSFSESFAGKLRTSEQGADTIVWLALQPKEKLVSGAFYFDRAEAPKHLKLAGTSKSHDLIDSVIDSVHSMAALNP

SEQ ID NO: 44170 - DNA, 771 bp, Arabidopsis thaliana
  misc_feature (1)..(771): Ceres Seq. ID no. 12466019
  misc_feature (1)..(771): Ortholog of  Ceres SEQ ID NO 13584646 as cited in SEQ ID NO 60715
agttgaacatataacaacattcataacaatggctggaggtacagctctaactccaacctctgtaggatccaagtctgttccaatgaggaaccatgaagcaacagagagaggcaacaccaacaacaacctgagagcattacccaaagccgtccaaccggtttcatcaatcgaaggagagatggctaagaggccacgtggcagacccgctggctccaagaacaaacccaaaccaccaatcattgtgactcacgacagtccaaattccctcagagctaacgccgttgagatcagctcaggttgtgacatctgtgagactttatcggattttgcaagaaggaaacagagaggtctctgcattctcagtgccaatggttgtgtcaccaatgtgacattaaggcaaccagcttcatcaggagcaattgtcacattacacggacgctacgagatcctctcattgcttggatcaatcttgcctccaccagcaccacttggaataactggtctgaccatttacttagccggacctcaaggacaggttgttggtggaggagtggttggtgggctaatcgcatctggtcctgttgttctcatggctgcatctttcatgaatgctgtttttgatcgtcttcctatggatgatgatgaagctgcctctatgcagaaccagcagtactaccagaatggaagatcccgtcctttagatgacattcatggactgcctcaaaatctgctcactaatggaaactcggcttctgatatctactcttgggg

SEQ ID NO: 44171 - protein, 256 aa, Arabidopsis thaliana
  peptide (1)..(256): Ceres Seq. ID no. 12466020
VEHITTFITMAGGTALTPTSVGSKSVPMRNHEATERGNTNNNLRALPKAVQPVSSIEGEMAKRPRGRPAGSKNKPKPPIIVTHDSPNSLRANAVEISSGCDICETLSDFARRKQRGLCILSANGCVTNVTLRQPASSGAIVTLHGRYEILSLLGSILPPPAPLGITGLTIYLAGPQGQVVGGGVVGGLIASGPVVLMAASFMNAVFDRLPMDDDEAASMQNQQYYQNGRSRPLDDIHGLPQNLLTNGNSASDIYSW

SEQ ID NO: 44172 - protein, 247 aa, Arabidopsis thaliana
  peptide (1)..(247): Ceres Seq. ID no. 12466021
MAGGTALTPTSVGSKSVPMRNHEATERGNTNNNLRALPKAVQPVSSIEGEMAKRPRGRPAGSKNKPKPPIIVTHDSPNSLRANAVEISSGCDICETLSDFARRKQRGLCILSANGCVTNVTLRQPASSGAIVTLHGRYEILSLLGSILPPPAPLGITGLTIYLAGPQGQVVGGGVVGGLIASGPVVLMAASFMNAVFDRLPMDDDEAASMQNQQYYQNGRSRPLDDIHGLPQNLLTNGNSASDIYSW

SEQ ID NO: 44173 - protein, 229 aa, Arabidopsis thaliana
  peptide (1)..(229): Ceres Seq. ID no. 12466022
MRNHEATERGNTNNNLRALPKAVQPVSSIEGEMAKRPRGRPAGSKNKPKPPIIVTHDSPNSLRANAVEISSGCDICETLSDFARRKQRGLCILSANGCVTNVTLRQPASSGAIVTLHGRYEILSLLGSILPPPAPLGITGLTIYLAGPQGQVVGGGVVGGLIASGPVVLMAASFMNAVFDRLPMDDDEAASMQNQQYYQNGRSRPLDDIHGLPQNLLTNGNSASDIYSW

SEQ ID NO: 44174 - DNA, 1434 bp, Arabidopsis thaliana
  misc_feature (1)..(1434): Ceres Seq. ID no. 13593341
  misc_feature (1)..(1434): Ortholog of  Ceres SEQ ID NO 14308080 as cited in SEQ ID NO 55218
actctctcttcttgtgttttttttttcttatcttctttctcataaaaagtctctctcctctctcttccttgcgtcttctctttccccaatctctctcaggtttctctttcctctctcaccagaagggcaaaaaaattcccttaaagagtcccccgtttttgtttaaccccctcttctctcatatctttgaaatggatgacgatgggtttcgtaattggggttactatgaaccagctgctgctacctttaaaggtaatctcggtttgcagctaatgtctaccattgatcggaacactaaaccgtttttacctgggcgggatccgaatctaatgatggggcctaacgggtcatatcaccaccaagagcctcctatccacatgagctacaattggattaaccaacagaaggataagttcttcaatatgttgcctgttacaacagccactcctaactacggtaatgtccttcccgaaacttcgtctgctccgtcgatgcagatgaatctccatcatcatcttcaaaccgaggagaatccggttaagttggaagaagagattgttgttcagactaagaagagaaagaccaatgcaaaagctggctcgactccaaaggctaagaagccaaggaaaccaaaggatgagaacagtaacaacaacaacaacaacaacacgaatgttactcgagttaaacccgctaagaaaagtgttgacttggtgatcaatggagtgagtatggacatttcgggtcttcctgttcctatctgcacttgcactggagctcctcagcaatgctaccgttggggatgtggcggttggcagtctgcttgttgtaccacaaacatctcaatgcatccattaccaatgagtactaaacgccgtggagcgaggatctcgggaaggaagatgagtcaaggcgcgtttaagaaggttcttgagaaacttgcttctgatgggtttaactttgggaatccgattgatcttaagagccattgggcaagacatggaactaacaagttcgtcacaatcagatgattagttgcttgattagtaaaacagaacaagtgagtgtttctcttccgggatggaatctctcaatgatggtgtatgtatatacaacaaatctgaaatctgtgaccttttcaaaaattctgtctgcaatctgagttcgattctgttttcaggtaaaccatcttcgttgtagggtttggaagcagagttctctgttttctttaccacttttttttatcacacttttgctttgttttttgtttgtttgtctatctgtgtgtctgaggaagaagaaggtgtctgagaaaaaatctgcagggaaatttatttttttgtacttttttttttcttccttttgttatctttttataaacattttactgacttgtaacagatattcttttaattaaatgtttttatttttcag

SEQ ID NO: 44175 - protein, 342 aa, Arabidopsis thaliana
  peptide (1)..(342): Ceres Seq. ID no. 15221212
SLFLCFFFLIFFLIKSLSPLSSLRLLFPQSLSGFSFLSHQKGKKIPLKSPPFLFNPLFSHIFEMDDDGFRNWGYYEPAAATFKGNLGLQLMSTIDRNTKPFLPGRDPNLMMGPNGSYHHQEPPIHMSYNWINQQKDKFFNMLPVTTATPNYGNVLPETSSAPSMQMNLHHHLQTEENPVKLEEEIVVQTKKRKTNAKAGSTPKAKKPRKPKDENSNNNNNNNTNVTRVKPAKKSVDLVINGVSMDISGLPVPICTCTGAPQQCYRWGCGGWQSACCTTNISMHPLPMSTKRRGARISGRKMSQGAFKKVLEKLASDGFNFGNPIDLKSHWARHGTNKFVTIR

SEQ ID NO: 44176 - protein, 279 aa, Arabidopsis thaliana
  peptide (1)..(279): Ceres Seq. ID no. 15221213
MDDDGFRNWGYYEPAAATFKGNLGLQLMSTIDRNTKPFLPGRDPNLMMGPNGSYHHQEPPIHMSYNWINQQKDKFFNMLPVTTATPNYGNVLPETSSAPSMQMNLHHHLQTEENPVKLEEEIVVQTKKRKTNAKAGSTPKAKKPRKPKDENSNNNNNNNTNVTRVKPAKKSVDLVINGVSMDISGLPVPICTCTGAPQQCYRWGCGGWQSACCTTNISMHPLPMSTKRRGARISGRKMSQGAFKKVLEKLASDGFNFGNPIDLKSHWARHGTNKFVTIR

SEQ ID NO: 44177 - protein, 252 aa, Arabidopsis thaliana
  peptide (1)..(252): Ceres Seq. ID no. 15221214
MSTIDRNTKPFLPGRDPNLMMGPNGSYHHQEPPIHMSYNWINQQKDKFFNMLPVTTATPNYGNVLPETSSAPSMQMNLHHHLQTEENPVKLEEEIVVQTKKRKTNAKAGSTPKAKKPRKPKDENSNNNNNNNTNVTRVKPAKKSVDLVINGVSMDISGLPVPICTCTGAPQQCYRWGCGGWQSACCTTNISMHPLPMSTKRRGARISGRKMSQGAFKKVLEKLASDGFNFGNPIDLKSHWARHGTNKFVTIR

SEQ ID NO: 44178 - DNA, 1889 bp, Arabidopsis thaliana
  misc_feature (1)..(1889): Ceres Seq. ID no. 13509347
  misc_feature (1)..(1889): Ortholog of  Ceres SEQ ID NO 14306949 as cited in SEQ ID NO 54919
acaaagcaaaagtcataacctttgacacttttttatctcaccatctctatctctctctcactctcacaaagaaacaaacaagacaaatctttctttctctttattttatcctaaaatttcctatctgatttcttcctcttgagctaaatttgttaccttctgggtattcaaaaagatctcattttttcttctagctctaaattttcagggagtttctttcttcttcttttgaagaccctttgtcatgagctaatttttatcctctgtgtgttgagaaagatctcattttttagctttaggattgagggagtttcgatttttacttagcacttttccttggaagtgatttggtggaactcatggtgattggtttcttcctagggttattagagattgagttctggatttttcacgcgccttggatttgatctaatgtactctcttttttcatgtcttaatctggtttagatttttattttgagatcttttgttatataggttgcaagttctgtattttgttaggctttttagtttctgtgttgattatgattctcttggtctaggagagatttgggtgttgttaactgtttgagtttgagaattgtgaaattaggttttttttttttggttctctgatctgaaacttgggtagaagaaaaacatggaggaagttgaagctgctaacagatcagctatagaaagctgtcatggagtgttaaatctcttgtcacaacgaaccagtgatcccaaatccttaacggttgaaacaggagaagtagtttccaagttcaaaagagtagcttctctgttaactagagggttaggccatggaaagtttaggagtaccaacaagtttaggtcatcttttcctcaacacatcttcttagagagtcctatttgctgcggtaatgatctaagtggtgattacactcaagttcttgcaccagagccacttcagatggttccagcttctgctgtttataatgaaatggagccaaaacaccaattgggtcatccttcattaatgcttagtcacaaaatgtgtgttgacaagtcgtttctggagttaaagccacctccttttcgtgctccttatcagttaatccacaaccaccagcagatagcttactccaggagtaatagcggtgtaaaccttaagtttgatggatctggtagtagttgctatactccgagtgtatcaaacggatcaagatcatttgtgtcatctcttagcatggatgctagtgtaacagactacgataggaactcgttccatttgaccggattgtcccgtgggtctgaccaacagcatacccggaagatgtgctctggtagtttgaaatgcggaagtcgaagcaaatgtcactgttccaagaaaaggaaactgagggtaaaacgatcaatcaaggtgcctgcaatcagtaacaagattgcagacattcctccagatgagtattcttggaggaagtatggacagaaaccgataaagggttcaccgcatccacggggatactataaatgcagcagtgtgagaggttgtccagcaaggaagcatgtggagcgatgtattgatgaaacttcaatgttaattgtaacttacgaaggcgagcataaccattcaagaatattgtcttcacaatcagctcacacttgatgatacagagtcaatatgtatgtccttttggcgtctactcttggatttgaagaaagaatgaatttgattcaagaaaccggtctttgtagctctgatttgcaattgtatatttccactctgacagaagttataagagcacttgtgaactcggattatgtggcagaggcagtaccaagaaacatcaacaatttggtttcaactgagctttttcttcaatatatgtatcaatgcatgc

SEQ ID NO: 44179 - protein, 330 aa, Arabidopsis thaliana
  peptide (1)..(330): Ceres Seq. ID no. 13509348
MEEVEAANRSAIESCHGVLNLLSQRTSDPKSLTVETGEVVSKFKRVASLLTRGLGHGKFRSTNKFRSSFPQHIFLESPICCGNDLSGDYTQVLAPEPLQMVPASAVYNEMEPKHQLGHPSLMLSHKMCVDKSFLELKPPPFRAPYQLIHNHQQIAYSRSNSGVNLKFDGSGSSCYTPSVSNGSRSFVSSLSMDASVTDYDRNSFHLTGLSRGSDQQHTRKMCSGSLKCGSRSKCHCSKKRKLRVKRSIKVPAISNKIADIPPDEYSWRKYGQKPIKGSPHPRGYYKCSSVRGCPARKHVERCIDETSMLIVTYEGEHNHSRILSSQSAHT

SEQ ID NO: 44180 - protein, 231 aa, Arabidopsis thaliana
  peptide (1)..(231): Ceres Seq. ID no. 13509349
MVPASAVYNEMEPKHQLGHPSLMLSHKMCVDKSFLELKPPPFRAPYQLIHNHQQIAYSRSNSGVNLKFDGSGSSCYTPSVSNGSRSFVSSLSMDASVTDYDRNSFHLTGLSRGSDQQHTRKMCSGSLKCGSRSKCHCSKKRKLRVKRSIKVPAISNKIADIPPDEYSWRKYGQKPIKGSPHPRGYYKCSSVRGCPARKHVERCIDETSMLIVTYEGEHNHSRILSSQSAHT

SEQ ID NO: 44181 - protein, 221 aa, Arabidopsis thaliana
  peptide (1)..(221): Ceres Seq. ID no. 13509350
MEPKHQLGHPSLMLSHKMCVDKSFLELKPPPFRAPYQLIHNHQQIAYSRSNSGVNLKFDGSGSSCYTPSVSNGSRSFVSSLSMDASVTDYDRNSFHLTGLSRGSDQQHTRKMCSGSLKCGSRSKCHCSKKRKLRVKRSIKVPAISNKIADIPPDEYSWRKYGQKPIKGSPHPRGYYKCSSVRGCPARKHVERCIDETSMLIVTYEGEHNHSRILSSQSAHT

SEQ ID NO: 44182 - DNA, 1529 bp, Arabidopsis thaliana
  misc_feature (1)..(1529): Ceres Seq. ID no. 13646297
  misc_feature (1)..(1529): Ortholog of  Ceres SEQ ID NO 14311870 as cited in SEQ ID NO 51574
  misc_feature (1)..(1529): Ortholog of  Ceres SEQ ID NO 15174583 as cited in SEQ ID NO 53693
  misc_feature (1)..(1529): Ortholog of  Ceres SEQ ID NO 13581563 as cited in SEQ ID NO 58942
  misc_feature (1)..(1529): Ortholog of  Ceres SEQ ID NO 13658707 as cited in SEQ ID NO 66286
  misc_feature (1)..(1529): Ortholog of  Ceres SEQ ID NO 13654528 as cited in SEQ ID NO 68080
atcaaaccatttagcctctccacactcacaaagggctcacaagtctcaaatacaaaaccatgaagaacatactagcttgcatagttaccatcataaccctctcaaacctcataaccatttctcaaggaagaagggtatcacagtcatttgaaacatttgagtacacagcaattatttgcagatcccacagtgcctccataacagagtacggtggtgtaggagacggcaagacgctaaacacaaaggccttccagagcgccgttgatcatctcagccaatactcatctgaaggcggagcacagctctttgtacccgccgggaaatggctcaccggaagtttcaacctcacaagccatttcactctgtttcttcacaaagacgcaattcttctcgctgctcaagacttaaacgaatacccaattctaaaggctttgccttcgtacggacgaggacgtgacgccgccggtggaagattcgctagtctcatcttcggcactaatctctccgacgtaattatcaccgggaacaacggcacaatcgacggtcaaggatcgttttggtggcaaaagttccacggtggcaagctaaaatacactcgcccgtacctgattgagttaatgttctcagatacaattcagatttcaaatctaacgttccttgattctccatcgtggaacatccacccagtgtatagtagcaatatcatcgtaaaaggcgttacgatcatcgccccggtaaaatctccgaacaccgacggaatcaatccagattcttgcacgaacacgaggatcgaagactgttacatcatatccggcgacgattgcatcgccgtgaaaagcggatgggacgaatacggaatctcattcggaatgccgacgaagcacctcgtgatccgtagattaacctgtatctcaccgtacagcgccgcgatcgctctcggaagcgaaatgtccggcggaatcgaagacgtgagagcggaagatatcaccgcataccaaacagaatccggcgtacggataaaaaccgccgtaggaagaggagctttcgtgaagaacatatacgtaaaaggaatgaatctacacacgatgaaatgggttttttggatgaccggaaattacaaagctcatgctgattctcattacgatcctcacgctctaccggagataaccgggattaattacagagatattgtagctgagaatgtttctatggctggaaggttagagggaatctctggagatccttttactgggatttgtatttcgaatgcaacgatttctatggcggctaagcataagaaagcgatttggatgtgtagtgatgttgaaggagttacgagtggtgttgatcctaagccttgtgatttgcttgatggacaagaatcagagacgacgaagaagaagatgattgacggtggatgtgattttcctactgatgtgttggagattgataatgttgagcttaagacttgtagttatcaaatgagttagcaatcttgtaatctttttctttaacctaatttcatattt

SEQ ID NO: 44183 - protein, 476 aa, Arabidopsis thaliana
  peptide (1)..(476): Ceres Seq. ID no. 15218696
MKNILACIVTIITLSNLITISQGRRVSQSFETFEYTAIICRSHSASITEYGGVGDGKTLNTKAFQSAVDHLSQYSSEGGAQLFVPAGKWLTGSFNLTSHFTLFLHKDAILLAAQDLNEYPILKALPSYGRGRDAAGGRFASLIFGTNLSDVIITGNNGTIDGQGSFWWQKFHGGKLKYTRPYLIELMFSDTIQISNLTFLDSPSWNIHPVYSSNIIVKGVTIIAPVKSPNTDGINPDSCTNTRIEDCYIISGDDCIAVKSGWDEYGISFGMPTKHLVIRRLTCISPYSAAIALGSEMSGGIEDVRAEDITAYQTESGVRIKTAVGRGAFVKNIYVKGMNLHTMKWVFWMTGNYKAHADSHYDPHALPEITGINYRDIVAENVSMAGRLEGISGDPFTGICISNATISMAAKHKKAIWMCSDVEGVTSGVDPKPCDLLDGQESETTKKKMIDGGCDFPTDVLEIDNVELKTCSYQMS

SEQ ID NO: 44184 - protein, 290 aa, Arabidopsis thaliana
  peptide (1)..(290): Ceres Seq. ID no. 15218697
MFSDTIQISNLTFLDSPSWNIHPVYSSNIIVKGVTIIAPVKSPNTDGINPDSCTNTRIEDCYIISGDDCIAVKSGWDEYGISFGMPTKHLVIRRLTCISPYSAAIALGSEMSGGIEDVRAEDITAYQTESGVRIKTAVGRGAFVKNIYVKGMNLHTMKWVFWMTGNYKAHADSHYDPHALPEITGINYRDIVAENVSMAGRLEGISGDPFTGICISNATISMAAKHKKAIWMCSDVEGVTSGVDPKPCDLLDGQESETTKKKMIDGGCDFPTDVLEIDNVELKTCSYQMS

SEQ ID NO: 44185 - DNA, 1610 bp, Arabidopsis thaliana
  misc_feature (1)..(1610): Ceres Seq. ID no. 13509351
  misc_feature (1)..(1610): Ortholog of  Ceres SEQ ID NO 13659971 as cited in SEQ ID NO 67565
tccaatcctcagcccaaacccaaacccgctcctcctcctcctccgtcaacatcctccggttcacaaatcggtccaatcctaaaccgaccaatgatcgatctctcagctctctacgacctccacaaagaactcggccgtggccaattcggaatcacttacaaatgcacggacaaatccaacggtcgagaatacgcctgcaaatccatctcaaaacgtaaactcatacgtcgcaaagacatcgaagacgtgagacgtgaggtcatgatcttgcaacaccttactggtcaaccaaacatagtcgagtttcgaggcgcgtatgaagacaaagacaatcttcatttggttatggagctctgttctggaggagagctttttgatcgtattatcaagaaaggaagttactctgagaaagaagctgctaatatcttcagacagatcgttaatgttgttcatgtttgtcacttcatgggcgttgttcatagagacttaaagcctgagaatttcttgcttgttagtaacgaagaagattctccaatcaaagcaacagattttggactctctgttttcatcgaagaaggtaaagtgtatagagatatagttgggagcgcatactacgttgcacctgaagttctacatcgaaactacgggaaagaaatcgatgtatggagcgcgggtgttatgctttacattcttctcagtggtgttcctccattttggggagagaccgagaagactatatttgaggcgatcttagaaggaaagctggatcttgaaacttctccttggcctactatatcggaaagcgcaaaagatttgataagaaagatgttgataagagatcctaaaaaaaggataaccgcagctgaagcacttgagcatccatggatgacagacaccaaaatttctgataaaccaatcaatagtgctgttcttgttaggatgaagcaattccgcgcgatgaacaagctcaagaaacttgccttgaaggtgatagcggaaaacttatcggaagaagagataaaaggattaaagcaaacgtttaagaacatggatacagatgaaagtggcaccatcacttttgatgaactaagaaacgggttacatcgtcttggatctaagcttacggagtctgaaatcaaacaactcatggaagctgctgatgtggacaaaagtgggacgattgattacattgagtttgtaactgcaacaatgcatcgtcatagattggagaaagaagagaatttgatagaagcatttaaatacttcgacaaagacagaagcggttttatcacaagggacgagcttaaacactccatgactgagtatggcatgggtgatgatgcgaccatagatgaagttatcaatgatgttgataccgacaatgatgggaggataaactacgaggaatttgtggcgatgatgaggaaaggaactacagattcagatccaaagctgatcagatgatatatattcaactacagtgacgaatgcttttgcttcatatataataattaaaataaactaataataaacacgaatncaatgagaattaatgcattcctatgttttttcccttnagatgtataaataataaatatgatgnattgcgc

SEQ ID NO: 44186 - protein, 487 aa, Arabidopsis thaliana
  peptide (1)..(487): Ceres Seq. ID no. 13509352
SNPQPKPKPAPPPPPSTSSGSQIGPILNRPMIDLSALYDLHKELGRGQFGITYKCTDKSNGREYACKSISKRKLIRRKDIEDVRREVMILQHLTGQPNIVEFRGAYEDKDNLHLVMELCSGGELFDRIIKKGSYSEKEAANIFRQIVNVVHVCHFMGVVHRDLKPENFLLVSNEEDSPIKATDFGLSVFIEEGKVYRDIVGSAYYVAPEVLHRNYGKEIDVWSAGVMLYILLSGVPPFWGETEKTIFEAILEGKLDLETSPWPTISESAKDLIRKMLIRDPKKRITAAEALEHPWMTDTKISDKPINSAVLVRMKQFRAMNKLKKLALKVIAENLSEEEIKGLKQTFKNMDTDESGTITFDELRNGLHRLGSKLTESEIKQLMEAADVDKSGTIDYIEFVTATMHRHRLEKEENLIEAFKYFDKDRSGFITRDELKHSMTEYGMGDDATIDEVINDVDTDNDGRINYEEFVAMMRKGTTDSDPKLIR

SEQ ID NO: 44187 - protein, 457 aa, Arabidopsis thaliana
  peptide (1)..(457): Ceres Seq. ID no. 13509353
MIDLSALYDLHKELGRGQFGITYKCTDKSNGREYACKSISKRKLIRRKDIEDVRREVMILQHLTGQPNIVEFRGAYEDKDNLHLVMELCSGGELFDRIIKKGSYSEKEAANIFRQIVNVVHVCHFMGVVHRDLKPENFLLVSNEEDSPIKATDFGLSVFIEEGKVYRDIVGSAYYVAPEVLHRNYGKEIDVWSAGVMLYILLSGVPPFWGETEKTIFEAILEGKLDLETSPWPTISESAKDLIRKMLIRDPKKRITAAEALEHPWMTDTKISDKPINSAVLVRMKQFRAMNKLKKLALKVIAENLSEEEIKGLKQTFKNMDTDESGTITFDELRNGLHRLGSKLTESEIKQLMEAADVDKSGTIDYIEFVTATMHRHRLEKEENLIEAFKYFDKDRSGFITRDELKHSMTEYGMGDDATIDEVINDVDTDNDGRINYEEFVAMMRKGTTDSDPKLIR

SEQ ID NO: 44188 - protein, 400 aa, Arabidopsis thaliana
  peptide (1)..(400): Ceres Seq. ID no. 13509354
MILQHLTGQPNIVEFRGAYEDKDNLHLVMELCSGGELFDRIIKKGSYSEKEAANIFRQIVNVVHVCHFMGVVHRDLKPENFLLVSNEEDSPIKATDFGLSVFIEEGKVYRDIVGSAYYVAPEVLHRNYGKEIDVWSAGVMLYILLSGVPPFWGETEKTIFEAILEGKLDLETSPWPTISESAKDLIRKMLIRDPKKRITAAEALEHPWMTDTKISDKPINSAVLVRMKQFRAMNKLKKLALKVIAENLSEEEIKGLKQTFKNMDTDESGTITFDELRNGLHRLGSKLTESEIKQLMEAADVDKSGTIDYIEFVTATMHRHRLEKEENLIEAFKYFDKDRSGFITRDELKHSMTEYGMGDDATIDEVINDVDTDNDGRINYEEFVAMMRKGTTDSDPKLIR

SEQ ID NO: 44189 - DNA, 953 bp, Arabidopsis thaliana
  misc_feature (1)..(953): Ceres Seq. ID no. 12482261
  misc_feature (1)..(953): Ortholog of  Ceres SEQ ID NO 13662725 as cited in SEQ ID NO 64628
aagctctcgcatcactttcatcgatttttcctctctgcgtcgatccttcagacatcggcgtcggagtttccgacaggaatctaaaaatgtcacgtggaagaggagttcctatgatggacctgaaacgaagttatgatgttgaagacagggtggtgtccgtgtctataccatcaataatcgaagctgatgaggctgatctgtggccactacctgagattgataccaagaagtcgaaatttccttgctgtatagtttggactcctcttcctgttgtctcttggttggctcctttcattggtcatattggactttgcagagaagatggagtcattttggactttgctggatctaacttcatcaatgttgatgattttgcatttggtcctcctgctcgctatctccaactcgatagaaccaagtgttgcttaccaccaaatatgggtggacatacttgcaagtatggattcaaacacaccgactttggaacagcgcgtacatgggataatgcactgagctcgagcacacgtagctttgagcataaaacctacaacatcttcacttgtaactgccattcgtttgttgcaaactgtttgaaccgtctttgctatggtggctcaatggagtggaatatggtgaatgttgctattttacttatgatcaaagggaaatggatcaatggttcatcagtagtccgctcgtttctgccatgtgctgtggtcacgtctttgggggtggtgcttgtcggctggccattcctcatcggtctctcttcgttctcgctactactctttgcctggttcataattgctacttactgttttaagaacataattacttgaagcagtatgagagaaatataaatatgatgtatcaccaaaattatgttaatcttaagaattgttctcttttcctttcggcaccatctagctttcaactccaaaattatgttaatc

SEQ ID NO: 44190 - protein, 278 aa, Arabidopsis thaliana
  peptide (1)..(278): Ceres Seq. ID no. 12482262
ALASLSSIFPLCVDPSDIGVGVSDRNLKMSRGRGVPMMDLKRSYDVEDRVVSVSIPSIIEADEADLWPLPEIDTKKSKFPCCIVWTPLPVVSWLAPFIGHIGLCREDGVILDFAGSNFINVDDFAFGPPARYLQLDRTKCCLPPNMGGHTCKYGFKHTDFGTARTWDNALSSSTRSFEHKTYNIFTCNCHSFVANCLNRLCYGGSMEWNMVNVAILLMIKGKWINGSSVVRSFLPCAVVTSLGVVLVGWPFLIGLSSFSLLLFAWFIIATYCFKNIIT

SEQ ID NO: 44191 - protein, 250 aa, Arabidopsis thaliana
  peptide (1)..(250): Ceres Seq. ID no. 12482263
MSRGRGVPMMDLKRSYDVEDRVVSVSIPSIIEADEADLWPLPEIDTKKSKFPCCIVWTPLPVVSWLAPFIGHIGLCREDGVILDFAGSNFINVDDFAFGPPARYLQLDRTKCCLPPNMGGHTCKYGFKHTDFGTARTWDNALSSSTRSFEHKTYNIFTCNCHSFVANCLNRLCYGGSMEWNMVNVAILLMIKGKWINGSSVVRSFLPCAVVTSLGVVLVGWPFLIGLSSFSLLLFAWFIIATYCFKNIIT

SEQ ID NO: 44192 - protein, 242 aa, Arabidopsis thaliana
  peptide (1)..(242): Ceres Seq. ID no. 12482264
MMDLKRSYDVEDRVVSVSIPSIIEADEADLWPLPEIDTKKSKFPCCIVWTPLPVVSWLAPFIGHIGLCREDGVILDFAGSNFINVDDFAFGPPARYLQLDRTKCCLPPNMGGHTCKYGFKHTDFGTARTWDNALSSSTRSFEHKTYNIFTCNCHSFVANCLNRLCYGGSMEWNMVNVAILLMIKGKWINGSSVVRSFLPCAVVTSLGVVLVGWPFLIGLSSFSLLLFAWFIIATYCFKNIIT

SEQ ID NO: 44193 - DNA, 598 bp, Arabidopsis thaliana
  misc_feature (1)..(598): Ceres Seq. ID no. 13503058
  misc_feature (1)..(598): Ortholog of  Ceres SEQ ID NO 12593692 as cited in SEQ ID NO 0
aagaagaagagcaatcgaagaaaagagggatttgtgtttgtttgttgttcttcgattgaaaatggtgaaatcgacgagtaaggatgctcaggatctatttcgatctcttcggtctgcttattctgctactccgactaatcttaagatcatcgacttgtatgtcgttttcgctgtcttcaccgctctgattcaggtggtttatatggctttggtgggatcatttccatttaactcgttcctatctggagttctctcttgtatcgggacagcagttcttgctgtttgcctccggattcaagtgaacaaagaaaacaaggaattcaaggatttagcacctgagagagcttttgctgattttgttctctgcaacttagtcctccatttggtgatcatcaacttcctcggatagaggtttcactctcctgtctacaagttgctttcatgctttaatgtactggagtttttaggtgtcacttggaatcaaaactctagtttgagatatttttgttgttgtcgaagtatcaaacttttattagtgtctctctcactcaataacagagtctcctgcagtaatggcctaatgggaccctttgattcg

SEQ ID NO: 44194 - protein, 135 aa, Arabidopsis thaliana
  peptide (1)..(135): Ceres Seq. ID no. 13503059
RRRAIEEKRDLCLFVVLRLKMVKSTSKDAQDLFRSLRSAYSATPTNLKIIDLYVVFAVFTALIQVVYMALVGSFPFNSFLSGVLSCIGTAVLAVCLRIQVNKENKEFKDLAPERAFADFVLCNLVLHLVIINFLG

SEQ ID NO: 44195 - protein, 115 aa, Arabidopsis thaliana
  peptide (1)..(115): Ceres Seq. ID no. 13503060
MVKSTSKDAQDLFRSLRSAYSATPTNLKIIDLYVVFAVFTALIQVVYMALVGSFPFNSFLSGVLSCIGTAVLAVCLRIQVNKENKEFKDLAPERAFADFVLCNLVLHLVIINFLG

SEQ ID NO: 44196 - protein, 68 aa, Arabidopsis thaliana
  peptide (1)..(68): Ceres Seq. ID no. 13503061
MALVGSFPFNSFLSGVLSCIGTAVLAVCLRIQVNKENKEFKDLAPERAFADFVLCNLVLHLVIINFLG

SEQ ID NO: 44197 - DNA, 892 bp, Arabidopsis thaliana
  misc_feature (1)..(892): Ceres Seq. ID no. 13509761
  misc_feature (1)..(892): Ortholog of  Ceres SEQ ID NO 13648488 as cited in SEQ ID NO 20419
aaaaagcaaaccaaacatgattcaagacaagtctaaaggtgcaaagcaaacgcttctagagcggccatggttcctcgctgtggctctagctggtcttataggtggcgcaatgctcatcacaagcttcatccgagctacggacaacaccttgtcactctgctccacggctaagaacacagctgcgtctatagccaaatacacagccaccccaatccaactccaatccatcgtccactacgccacttcacacaccgtccctcaacaatctttcgaggagatctcgatctctttaaacgtcctcaaggagcgtctcccttgtaactttctagtctttggcctcggccgcgactccctcatgtgggcctccctcaatccaggtggcacaactgtgttcttggaagaggatcctgagtggatagaggccgtcctcaaggacgccccatccctcagggcccaccatgttcagtaccggacccacctttctgaggccggccgccttctctcgacttacaagaacgaacccatgtgtttaccagctaaagctttcccgatccgctacaacgaaaagtgtcccttggcgttgacttctctccctgatgagttctatgataccgagtgggatctgatcatggtggacgcaccaaaagggtacttcccagaggcgccaggaaggatggcggcgatattttcctcggccatcatggcacgtaaccggaaaggtgatggcacgactcacgtcttccttcatgacgttaaccgcaaagtggagaacgcttttgccaatgagttcctttgtgagaagtataaggtcaactccgtaggtaggctctggcacttcgagatacctaacgccgctaacatgaccgaccagcctggtgaccggttttgctag

SEQ ID NO: 44198 - protein, 296 aa, Arabidopsis thaliana
  peptide (1)..(296): Ceres Seq. ID no. 13509762
KSKPNMIQDKSKGAKQTLLERPWFLAVALAGLIGGAMLITSFIRATDNTLSLCSTAKNTAASIAKYTATPIQLQSIVHYATSHTVPQQSFEEISISLNVLKERLPCNFLVFGLGRDSLMWASLNPGGTTVFLEEDPEWIEAVLKDAPSLRAHHVQYRTHLSEAGRLLSTYKNEPMCLPAKAFPIRYNEKCPLALTSLPDEFYDTEWDLIMVDAPKGYFPEAPGRMAAIFSSAIMARNRKGDGTTHVFLHDVNRKVENAFANEFLCEKYKVNSVGRLWHFEIPNAANMTDQPGDRFC

SEQ ID NO: 44199 - protein, 291 aa, Arabidopsis thaliana
  peptide (1)..(291): Ceres Seq. ID no. 13509763
MIQDKSKGAKQTLLERPWFLAVALAGLIGGAMLITSFIRATDNTLSLCSTAKNTAASIAKYTATPIQLQSIVHYATSHTVPQQSFEEISISLNVLKERLPCNFLVFGLGRDSLMWASLNPGGTTVFLEEDPEWIEAVLKDAPSLRAHHVQYRTHLSEAGRLLSTYKNEPMCLPAKAFPIRYNEKCPLALTSLPDEFYDTEWDLIMVDAPKGYFPEAPGRMAAIFSSAIMARNRKGDGTTHVFLHDVNRKVENAFANEFLCEKYKVNSVGRLWHFEIPNAANMTDQPGDRFC

SEQ ID NO: 44200 - protein, 260 aa, Arabidopsis thaliana
  peptide (1)..(260): Ceres Seq. ID no. 13509764
MLITSFIRATDNTLSLCSTAKNTAASIAKYTATPIQLQSIVHYATSHTVPQQSFEEISISLNVLKERLPCNFLVFGLGRDSLMWASLNPGGTTVFLEEDPEWIEAVLKDAPSLRAHHVQYRTHLSEAGRLLSTYKNEPMCLPAKAFPIRYNEKCPLALTSLPDEFYDTEWDLIMVDAPKGYFPEAPGRMAAIFSSAIMARNRKGDGTTHVFLHDVNRKVENAFANEFLCEKYKVNSVGRLWHFEIPNAANMTDQPGDRFC

SEQ ID NO: 44201 - DNA, 649 bp, Arabidopsis thaliana
  misc_feature (1)..(649): Ceres Seq. ID no. 13646229
  misc_feature (1)..(649): Ortholog of  Ceres SEQ ID NO 15176141 as cited in SEQ ID NO 0
atcgcttctataaactttttcgatctaaggttcgtgatctccttcttctctacgaagtttacactttttcttcaaaggaaacaatgmgcttctagtacaactttttcrayctmmsgttsgtgwtcctccttcctyrakgttmtccaccggtaakggatatccaaaagatgcttatccaccacaaggatatcctcctcagggatatcctcagcaaggctatccacctcagggatatcctcaacaaggttatcctcagcaaggatatcctccaccgtacgcgcctcaatatcctccaccaccgcagcatcagcaacaacagagcagtcctggctttctagaaggatgtcttgctgctctgtgttgttgctgtctcttggatgcttgcttctgattggagtctctctctctctgcataaagcttcgggatttatttgtaagagggttttggttaaacaaaaaccttaattgatttgtggggcattaaaaatgaatctctcgatgattctctttcgttttatgtgtaatgttcttcggttcataacattttaactattgtctatcgacgttctgccttagtttgtatttgattatgggaatgtaaattggttgggagacactattctatgccatagtttattgcttggatctc

SEQ ID NO: 44202 - protein, 56 aa, Arabidopsis thaliana
  peptide (1)..(56): Ceres Seq. ID no. 15218735
MLIHHKDILLRDILSKAIHLRDILNKVILSKDILHRTRLNILHHRSISNNRAVLAF

SEQ ID NO: 44203 - protein, 50 aa, Arabidopsis thaliana
  peptide (1)..(50): Ceres Seq. ID no. 15218736
  misc_feature (29)..(29): Xaa is any aa, unknown or other
  misc_feature (36)..(36): Xaa is any aa, unknown or other
  misc_feature (37)..(37): Xaa is any aa, unknown or other
  misc_feature (38)..(38): Xaa is any aa, unknown or other
  misc_feature (39)..(39): Xaa is any aa, unknown or other
  misc_feature (40)..(40): Xaa is any aa, unknown or other
  misc_feature (41)..(41): Xaa is any aa, unknown or other
  misc_feature (45)..(45): Xaa is any aa, unknown or other
  misc_feature (46)..(46): Xaa is any aa, unknown or other
  misc_feature (48)..(48): Xaa is any aa, unknown or other
IASINFFDLRFVISFFSTKFTLFLQRKQXASSTTFXXXXXXSSFXXVXHR

SEQ ID NO: 44204 - protein, 40 aa, Arabidopsis thaliana
  peptide (1)..(40): Ceres Seq. ID no. 15218737
MSCCSVLLLSLGCLLLIGVSLSLHKASGFICKRVLVKQKP

SEQ ID NO: 44205 - DNA, 1775 bp, Arabidopsis thaliana
  misc_feature (1)..(1775): Ceres Seq. ID no. 13575443
  misc_feature (1)..(1775): Ortholog of  Ceres SEQ ID NO 13599900 as cited in SEQ ID NO 531
  misc_feature (1)..(1775): Ortholog of  Ceres SEQ ID NO 13596509 as cited in SEQ ID NO 62004
  misc_feature (1)..(1775): Ortholog of  Ceres SEQ ID NO 13659971 as cited in SEQ ID NO 67565
  misc_feature (1)..(1775): Ortholog of  Ceres SEQ ID NO 13500385 as cited in SEQ ID NO 67583
acaattcctagactgtttctctttactctgtttttttgctctgttttttttgtttgtttgttaatggccgaagactctaattcttccgaatcaatcattgttaacgtcaccggagatgataataagtcggctttgttcggtaagtacgatctcggtaagctcctcggtagcggcgcgtttgccaaagtctaccaagcggaggatcttcaaaacggcggcgaaagcgttgcgatcaaagtcgtacaaaaaaaacgtttgaaagacggtttaacggcgcacgttaagagagaaatatctgtcatgcgccgcctccgtcatcctcatatcgtgctcctctccgaagtcctcgccacaaagacgaagatctacttcgtcatggagctagccaaaggtggtgagctcttctcaagagtcaccagcaaccgtttcacagagagtcttagccggaaatatttccggcaattgatctccgccgtgagatactgccacgcaagaggagttttccaccgtgatttgaagccggagaatctcctcctcgacgagaatcgagatctgaaggtttcagacttcggtctcagtgcgatgaaggagcagatccaccccgacggaatgctacatacgctctgtggaactccggcttacgtagcaccggagcttcttttgaagaaaggctacgacggttctaaagctgatatttggtcatgcggcgtcgttttgtttcttctcaacgcaggctacttgccgtttcgtgatccaaacatcatgggactctaccggaaaatccacaaggctcaatacaagttaccggattggacatcttcagatctgcggaaactcctccgccgtctcttggagccaaatccggaactgcgaatcaccgtggaggagattctaaaggatccgtggttcaatcatggagtagatccaagcgaaatcatcggaatccaagccgatgattacgatctggaagaaaacggtaaaattctaaacgcgttcgatttgatttcttcggcgtcgagctcgaatctctccggtttgtttggaaatttcgtgacgccggatcattgcgaccagtttgtatccgatgagagtacggccgttattatgaggaaggtcgaggaagttgcgaagcagttaaatttgagaatcgcgaagaagaaggagagagcgataaagcttgaaggtccacatggagtagctaatgtcgtcgttaaagttcgccggctaacaaatgaactagtgatggtggagatgaagaacaagcaaagagacgtgggcttggtttgggccgatgctcttagacaaaagttacgtcgtttgattaaccaaccggtttataaagttcctgacaaaccgtaaaacggtttcaacactaaaccaacaatccgtgcgttttacttttagaattttcaacgtactacactcgggatcgagacgcattgtggttaaccggttcggtttacattggagcagggagagtaatgggacgatccgcctctttgtatataaaaatgacaagaagaaagaaaaaaacaaaccgggattcaattatttttgtttatttattttcggagtataatttaaacacaaaaattatttgctttattcatcggagagaatttgaataaaactctgatttgaactttgtagccttttatgtgtgaccgtgtgtgtttgcaaacttgggccttattttgcgctaagggacatgctacaccgtttgtaatatttatcgttgttgattttgtttggcaatcgtacgaagtatttcagga

SEQ ID NO: 44206 - protein, 452 aa, Arabidopsis thaliana
  peptide (1)..(452): Ceres Seq. ID no. 13575444
TIPRLFLFTLFFCSVFFVCLLMAEDSNSSESIIVNVTGDDNKSALFGKYDLGKLLGSGAFAKVYQAEDLQNGGESVAIKVVQKKRLKDGLTAHVKREISVMRRLRHPHIVLLSEVLATKTKIYFVMELAKGGELFSRVTSNRFTESLSRKYFRQLISAVRYCHARGVFHRDLKPENLLLDENRDLKVSDFGLSAMKEQIHPDGMLHTLCGTPAYVAPELLLKKGYDGSKADIWSCGVVLFLLNAGYLPFRDPNIMGLYRKIHKAQYKLPDWTSSDLRKLLRRLLEPNPELRITVEEILKDPWFNHGVDPSEIIGIQADDYDLEENGKILNAFDLISSASSSNLSGLFGNFVTPDHCDQFVSDESTAVIMRKVEEVAKQLNLRIAKKKERAIKLEGPHGVANVVVKVRRLTNELVMVEMKNKQRDVGLVWADALRQKLRRLINQPVYKVPDKP

SEQ ID NO: 44207 - protein, 431 aa, Arabidopsis thaliana
  peptide (1)..(431): Ceres Seq. ID no. 13575445
MAEDSNSSESIIVNVTGDDNKSALFGKYDLGKLLGSGAFAKVYQAEDLQNGGESVAIKVVQKKRLKDGLTAHVKREISVMRRLRHPHIVLLSEVLATKTKIYFVMELAKGGELFSRVTSNRFTESLSRKYFRQLISAVRYCHARGVFHRDLKPENLLLDENRDLKVSDFGLSAMKEQIHPDGMLHTLCGTPAYVAPELLLKKGYDGSKADIWSCGVVLFLLNAGYLPFRDPNIMGLYRKIHKAQYKLPDWTSSDLRKLLRRLLEPNPELRITVEEILKDPWFNHGVDPSEIIGIQADDYDLEENGKILNAFDLISSASSSNLSGLFGNFVTPDHCDQFVSDESTAVIMRKVEEVAKQLNLRIAKKKERAIKLEGPHGVANVVVKVRRLTNELVMVEMKNKQRDVGLVWADALRQKLRRLINQPVYKVPDKP

SEQ ID NO: 44208 - protein, 352 aa, Arabidopsis thaliana
  peptide (1)..(352): Ceres Seq. ID no. 13575446
MRRLRHPHIVLLSEVLATKTKIYFVMELAKGGELFSRVTSNRFTESLSRKYFRQLISAVRYCHARGVFHRDLKPENLLLDENRDLKVSDFGLSAMKEQIHPDGMLHTLCGTPAYVAPELLLKKGYDGSKADIWSCGVVLFLLNAGYLPFRDPNIMGLYRKIHKAQYKLPDWTSSDLRKLLRRLLEPNPELRITVEEILKDPWFNHGVDPSEIIGIQADDYDLEENGKILNAFDLISSASSSNLSGLFGNFVTPDHCDQFVSDESTAVIMRKVEEVAKQLNLRIAKKKERAIKLEGPHGVANVVVKVRRLTNELVMVEMKNKQRDVGLVWADALRQKLRRLINQPVYKVPDKP

SEQ ID NO: 44209 - DNA, 1319 bp, Arabidopsis thaliana
  misc_feature (1)..(1319): Ceres Seq. ID no. 14304366
  misc_feature (1)..(1319): Ortholog of  Ceres SEQ ID NO 13495070 as cited in SEQ ID NO 53216
  misc_feature (1)..(1319): Ortholog of  Ceres SEQ ID NO 15176717 as cited in SEQ ID NO 0
  misc_feature (1)..(1319): Ortholog of  Ceres SEQ ID NO 15179618 as cited in SEQ ID NO 0
acttaacgtctctctctattcctctccttctctctttctccctgtgaaaaaatggactcggtggctctctactgcaccgctggtctcattgccggcgccgtctactggttcatatgcgtcctaggtccagcagaacgaaaaggcaaacgagcctctgatctctccggcggctcaatctccgcagaaaaagtcaaagacaactataaccaatactggtctttcttccgcaaaccaaaagagatcgaatcagccgagaaagtacctgacttcgtcgacacgttctacaatcttgtcactgatatctacgagtggggatggggacaatctttccatttctctcctcatgtccctggaaaatccgacaaagacgccacaagaatccacgaagaaatggccgtcgatctcatcaaagtgaaaccgggacaaaagattcttgacgctggttgcggcgtgggtgggccgatgagagccatcgcggcccattccaaggcccaagtcactggaatcactatcaacgagtaccaagtgcaacgagccaagcttcacaacaagaaagctggacttgattctctctgcaacgtcgtttgtggtaactttttaaagatgccgttcgatgaaaacacgtttgacggagcttactcgatcgaagctacgtgtcacgctcctaagctcgaagaagtatactcggagatcttcagagtgatgaaaccaggatctttgttcgtgtcctacgaatgggtcaccactgaaaaatacagagacgatgacgaagaacacaaggacgtgattcaagggatcgagagaggagacgcacttcctggactaagaagctacgctgatatagccgtgacggcgaagaaagttgggtttgaggtagtgaaggagaaagatttggctaaaccaccgtctaaaccgtggtggaaccggttaaagatgggaaggattgcttattggagaaaccatgttgtggttgtgattctttctgctattggggttgctcctaaaggaactgttgatgttcataagatgttgtttaagactgctgattatttgaccagaggtggtgagactggaatcttctctccgatgcatatgattctctgtagaaaaccagagaaagcttctgaatgaatgattgagaatcttcttccttgttctcgtttttcttcttctttctttctaagttcatgttttgccccttaagaatctctttgtcgtcgtattaatgttatcactttgttgtttattgtatttttttttttttcaatttgatttgtttaaattgatgatggatcactggaaattagtttttcgctctt

SEQ ID NO: 44210 - protein, 359 aa, Arabidopsis thaliana; identical to SEQ ID NO: 38169
  peptide (1)..(359): Ceres Seq. ID no. 14304367

SEQ ID NO: 44211 - protein, 246 aa, Arabidopsis thaliana; identical to SEQ ID NO: 38170
  peptide (1)..(246): Ceres Seq. ID no. 14304368

SEQ ID NO: 44212 - protein, 222 aa, Arabidopsis thaliana; identical to SEQ ID NO: 38171
  peptide (1)..(222): Ceres Seq. ID no. 14304369

SEQ ID NO: 44213 - DNA, 1115 bp, Arabidopsis thaliana
  misc_feature (1)..(1115): Ceres Seq. ID no. 13509363
  misc_feature (1)..(1115): Ortholog of  Ceres SEQ ID NO 13585382 as cited in SEQ ID NO 63889
atgtgtgtgaacatttcttgtctgagtaaagatggctaatactccattgatagtttcctttggtgaaatgcttatcgactttgtccctgacacttctggtgtttctttagctgagtccaccggttttctcaaagcccctggtggtgctcctgctaatgttgcttgtgccatcaccaaactcggtggcaaatcagctttcatcggcaagtttggtgatgatgagtttggacacatgttggttaacatattgaagaagaacggtgtgaacagtgaaggtgtttgctttgataccaatgcaagaaccgcgttggcctttgtgactttgaagaaagatggtgagagagagtttatgttttacaggaaccctagtgcggacatgctcttgaaagaatctgaactcaacaaggatcttatcaagaaagctaagattttccactatggttccattagcttgatctctgagccatgtagaacagctcacatggctgcgatgaaaaccgctaaagatgcgggagtcttactctcttatgacccgaacgttcggttgcctctttggccttctactgaagctgctatagaaggcatcaaaagtatttggaatgaggctgatattatcaaggtaagcgatgatgaggtaacgtttctaacgcgtggagatgcggagaaggatgatgttgttttgtctcttatgcatgataagcttaagctgcttattgttactgatggagagaaaggttgcagatactacacaaagaaattcaaagggagagtgcctggatacgctgtgaaagcagttgacacaactggagctggtgattcatttgttggtgcatttcttgtctcattgggaaaagatggctccatactcgatgatgaagggaagctgaaggaagcacttgcctttgcaaatgcatgtggagcagtgtgtactactcagaaaggagctattcctgcacttcccactccagctgatgctcaaaagctcatgaaatctaagtctaaatagtttcaatcttgttctgttctgtttctgtttctttactcttgtcaatttccttggttttcacagagtattttctctgttatctgaataaatctagtttcaagtttctgcc

SEQ ID NO: 44214 - protein, 324 aa, Arabidopsis thaliana
  peptide (1)..(324): Ceres Seq. ID no. 13509364
MANTPLIVSFGEMLIDFVPDTSGVSLAESTGFLKAPGGAPANVACAITKLGGKSAFIGKFGDDEFGHMLVNILKKNGVNSEGVCFDTNARTALAFVTLKKDGEREFMFYRNPSADMLLKESELNKDLIKKAKIFHYGSISLISEPCRTAHMAAMKTAKDAGVLLSYDPNVRLPLWPSTEAAIEGIKSIWNEADIIKVSDDEVTFLTRGDAEKDDVVLSLMHDKLKLLIVTDGEKGCRYYTKKFKGRVPGYAVKAVDTTGAGDSFVGAFLVSLGKDGSILDDEGKLKEALAFANACGAVCTTQKGAIPALPTPADAQKLMKSKSK

SEQ ID NO: 44215 - protein, 312 aa, Arabidopsis thaliana
  peptide (1)..(312): Ceres Seq. ID no. 13509365
MLIDFVPDTSGVSLAESTGFLKAPGGAPANVACAITKLGGKSAFIGKFGDDEFGHMLVNILKKNGVNSEGVCFDTNARTALAFVTLKKDGEREFMFYRNPSADMLLKESELNKDLIKKAKIFHYGSISLISEPCRTAHMAAMKTAKDAGVLLSYDPNVRLPLWPSTEAAIEGIKSIWNEADIIKVSDDEVTFLTRGDAEKDDVVLSLMHDKLKLLIVTDGEKGCRYYTKKFKGRVPGYAVKAVDTTGAGDSFVGAFLVSLGKDGSILDDEGKLKEALAFANACGAVCTTQKGAIPALPTPADAQKLMKSKSK

SEQ ID NO: 44216 - protein, 257 aa, Arabidopsis thaliana
  peptide (1)..(257): Ceres Seq. ID no. 13509366
MLVNILKKNGVNSEGVCFDTNARTALAFVTLKKDGEREFMFYRNPSADMLLKESELNKDLIKKAKIFHYGSISLISEPCRTAHMAAMKTAKDAGVLLSYDPNVRLPLWPSTEAAIEGIKSIWNEADIIKVSDDEVTFLTRGDAEKDDVVLSLMHDKLKLLIVTDGEKGCRYYTKKFKGRVPGYAVKAVDTTGAGDSFVGAFLVSLGKDGSILDDEGKLKEALAFANACGAVCTTQKGAIPALPTPADAQKLMKSKSK

SEQ ID NO: 44217 - DNA, 1045 bp, Arabidopsis thaliana
  misc_feature (1)..(1045): Ceres Seq. ID no. 13646241
  misc_feature (1)..(1045): Ortholog of  Ceres SEQ ID NO 12612333 as cited in SEQ ID NO 56421
atccactctactcaacatggactcctccaaactctcatctctctctctttgcctcttcctcatttgcattatctatctcccccaacattctctcgcatgcggctcttgcaacccacggaagggcggaaagcactcccctaaagcccctaagctaccagttcctccggtgaccgtccctaagctaccagttcctccggtgaccgtccccaagctacccgttcctccagtgacagtccctaagctacccgttcccccggtaactgtacctaagctacccgttcctccagtgaccgtccctaagctaccccttcctccgatttcagggctacccatacctccagtggtaggtcccaatctgccattgccacctttgccaattgtaggtcctattcttccaccgggaacaaccccaccagccacaggagggaaggactgtcctccaccgccagggagcgtaaagccaccatcagggggcgggaaggcgacatgtccaatagacacgctgaagttaggtgcttgcgtcgacttgttgggaggtttagtaaagatagggcttggggatccagcagttaacaaatgttgtccgttacttaaaggcctcgttgaaatcgaagccgcggcttgtctctgcactaccctcaagctcaaagctcttgacctcaatctttatgtccctgttgctcttcagcttctccttacctgtggcaaaaatccacctccgggctacacttgttccatatgataaactcactccacttataaaggatgctttggagaaaaaagtgagaagagaatggcagagctccaatctttcctgtcttggtttaccaaatacatcatatcaaatcctatccctttgattctttcctctatcgttcccttatgcttgtatcattaattaatgtgtgctttttagattaatgattcttctcttgtattaaagtatgatttgaaatcctttttttttctcmaaaaaaaaaaaaaaaaaaaaaaaaaaaaaaaaaaaaaaycgaaaaaaaaaaaaaaaaaagcttatcgataccgt

SEQ ID NO: 44218 - protein, 246 aa, Arabidopsis thaliana
  peptide (1)..(246): Ceres Seq. ID no. 15218685
STLLNMDSSKLSSLSLCLFLICIIYLPQHSLACGSCNPRKGGKHSPKAPKLPVPPVTVPKLPVPPVTVPKLPVPPVTVPKLPVPPVTVPKLPVPPVTVPKLPLPPISGLPIPPVVGPNLPLPPLPIVGPILPPGTTPPATGGKDCPPPPGSVKPPSGGGKATCPIDTLKLGACVDLLGGLVKIGLGDPAVNKCCPLLKGLVEIEAAACLCTTLKLKALDLNLYVPVALQLLLTCGKNPPPGYTCSI

SEQ ID NO: 44219 - protein, 241 aa, Arabidopsis thaliana
  peptide (1)..(241): Ceres Seq. ID no. 15218686
MDSSKLSSLSLCLFLICIIYLPQHSLACGSCNPRKGGKHSPKAPKLPVPPVTVPKLPVPPVTVPKLPVPPVTVPKLPVPPVTVPKLPVPPVTVPKLPLPPISGLPIPPVVGPNLPLPPLPIVGPILPPGTTPPATGGKDCPPPPGSVKPPSGGGKATCPIDTLKLGACVDLLGGLVKIGLGDPAVNKCCPLLKGLVEIEAAACLCTTLKLKALDLNLYVPVALQLLLTCGKNPPPGYTCSI

SEQ ID NO: 44220 - DNA, 1950 bp, Arabidopsis thaliana
  misc_feature (1)..(1950): Ceres Seq. ID no. 12489291
  misc_feature (1)..(1950): Ortholog of  Ceres SEQ ID NO 13594037 as cited in SEQ ID NO 55666
  misc_feature (1)..(1950): Ortholog of  Ceres SEQ ID NO 13657707 as cited in SEQ ID NO 66407
actggcccaagtcattcaacaacttggcttttatctaataaagcccctccctctccgataaaccttaaataaaaccggagggagagcaaaaaataaaaacaaaaatatacaaaaacaaaaacaaaaaatcataaaaaatgattggaaaagttgtggtctcggtggcctccatcctcttaatagttggagttgccataggagtcgttgcctacataaacaaaaatggtgatgctaatctgtctccccaaatgaaagcggtccgaggaatttgcgaggcgacttccgacaaagcctcatgtgtcaaaactctcgagccggtcaagagcgatgacccaaacaagctgatcaaggctttcatgctcgctaccagagatgctataacccaatcatcaaacttcacgggtaaaaccgaaggaaacttgggttcgggcatctcgccaaacaacaaagccgttcttgattactgcaagaaagttttcatgtacgcgcttgaggatctcagcaccattgttgaggaaatgggtgaagatcttaaccagatcgggagcaaaatcgaccagcttaaacaatggttaaccggtgtttacaattaccaaactgattgtcttgacgatatcgaagaagatgatttaagaaagactattggagagggcattgcaagctccaagattctcactagcaacgctattgacatcttccacactgtcgttagcgccatggccaagcttaacttgaaggtcgaggacttcaagaacatgacaggcggaatcttcgctccttcagacaaaggagcagctcccgtcaacaaaggaacccctcctgttgctgatgattctcccgtggccgatccagatggtcctgctcgccgtcttcttgaagacattgacgagaccggaatcccaacatgggtttcaggtgctgacaggaagctcatgactaaggctggacgtggcagtaatgacggtggtgctaggatcagagcaacctttgtggtggctaaggacggaagtggacagtttaagactgttcaacaagccgttaatgcttgtcctgagaaaaacccaggccgttgcatcatccacatcaaggctggtatctacagagagcaagtgatcatccctaagaagaagaacaacatcttcatgttcggagatggtgcaagaaagaccgtcatttcttacaacagaagtgttaaactcagccctggaaccaccacttcccttagtggcacagtccaggttgagtccgaaggattcatggcaaaatggatcggattcaagaacaccgccggtccaatgggacaccaagctgtggctatcagagtgaacggagaccgtgccgtgatcttcaactgcaggttcgacggttaccaagacaccttgtacgtcaacaatggtcgtcagttctacagaaacattgtcgtgtcaggaacagtcgacttcatcttcggcaaatccgcaaccgtgatccaaaactcactcattgttgtccgtaaaggaaacaagggacaattcaacacggtcacagccgatggaaacgaaaagggtctagcgatgaaaatcggtatcgtcctccaaaactgtcgcatcgttcccgacaagaaactagcggcagagagattaatcgtggagtcatacttgggaaggccatggaagaaattctctaccaccgtgattatcaactccgagataggagatgtgattagaccagaaggttggaagatttgggatggggaaagtttccacaagtcatgtaggtacgttgagtacaacaaccgtggaccaggagctatcactaaccgaagagttaactgggttaagatcgccaggtctgcagctgaggtcaatgacttcactgttgctaactggttaggtcctattaactggattcaagaagccaatgttcccgtcacgcttggattataaggcgtataaatcaaatcaaatcaaa

SEQ ID NO: 44221 - protein, 595 aa, Arabidopsis thaliana
  peptide (1)..(595): Ceres Seq. ID no. 12489292
MIGKVVVSVASILLIVGVAIGVVAYINKNGDANLSPQMKAVRGICEATSDKASCVKTLEPVKSDDPNKLIKAFMLATRDAITQSSNFTGKTEGNLGSGISPNNKAVLDYCKKVFMYALEDLSTIVEEMGEDLNQIGSKIDQLKQWLTGVYNYQTDCLDDIEEDDLRKTIGEGIASSKILTSNAIDIFHTVVSAMAKLNLKVEDFKNMTGGIFAPSDKGAAPVNKGTPPVADDSPVADPDGPARRLLEDIDETGIPTWVSGADRKLMTKAGRGSNDGGARIRATFVVAKDGSGQFKTVQQAVNACPEKNPGRCIIHIKAGIYREQVIIPKKKNNIFMFGDGARKTVISYNRSVKLSPGTTTSLSGTVQVESEGFMAKWIGFKNTAGPMGHQAVAIRVNGDRAVIFNCRFDGYQDTLYVNNGRQFYRNIVVSGTVDFIFGKSATVIQNSLIVVRKGNKGQFNTVTADGNEKGLAMKIGIVLQNCRIVPDKKLAAERLIVESYLGRPWKKFSTTVIINSEIGDVIRPEGWKIWDGESFHKSCRYVEYNNRGPGAITNRRVNWVKIARSAAEVNDFTVANWLGPINWIQEANVPVTLGL

SEQ ID NO: 44222 - protein, 558 aa, Arabidopsis thaliana
  peptide (1)..(558): Ceres Seq. ID no. 12489293
MKAVRGICEATSDKASCVKTLEPVKSDDPNKLIKAFMLATRDAITQSSNFTGKTEGNLGSGISPNNKAVLDYCKKVFMYALEDLSTIVEEMGEDLNQIGSKIDQLKQWLTGVYNYQTDCLDDIEEDDLRKTIGEGIASSKILTSNAIDIFHTVVSAMAKLNLKVEDFKNMTGGIFAPSDKGAAPVNKGTPPVADDSPVADPDGPARRLLEDIDETGIPTWVSGADRKLMTKAGRGSNDGGARIRATFVVAKDGSGQFKTVQQAVNACPEKNPGRCIIHIKAGIYREQVIIPKKKNNIFMFGDGARKTVISYNRSVKLSPGTTTSLSGTVQVESEGFMAKWIGFKNTAGPMGHQAVAIRVNGDRAVIFNCRFDGYQDTLYVNNGRQFYRNIVVSGTVDFIFGKSATVIQNSLIVVRKGNKGQFNTVTADGNEKGLAMKIGIVLQNCRIVPDKKLAAERLIVESYLGRPWKKFSTTVIINSEIGDVIRPEGWKIWDGESFHKSCRYVEYNNRGPGAITNRRVNWVKIARSAAEVNDFTVANWLGPINWIQEANVPVTLGL

SEQ ID NO: 44223 - protein, 522 aa, Arabidopsis thaliana
  peptide (1)..(522): Ceres Seq. ID no. 12489294
MLATRDAITQSSNFTGKTEGNLGSGISPNNKAVLDYCKKVFMYALEDLSTIVEEMGEDLNQIGSKIDQLKQWLTGVYNYQTDCLDDIEEDDLRKTIGEGIASSKILTSNAIDIFHTVVSAMAKLNLKVEDFKNMTGGIFAPSDKGAAPVNKGTPPVADDSPVADPDGPARRLLEDIDETGIPTWVSGADRKLMTKAGRGSNDGGARIRATFVVAKDGSGQFKTVQQAVNACPEKNPGRCIIHIKAGIYREQVIIPKKKNNIFMFGDGARKTVISYNRSVKLSPGTTTSLSGTVQVESEGFMAKWIGFKNTAGPMGHQAVAIRVNGDRAVIFNCRFDGYQDTLYVNNGRQFYRNIVVSGTVDFIFGKSATVIQNSLIVVRKGNKGQFNTVTADGNEKGLAMKIGIVLQNCRIVPDKKLAAERLIVESYLGRPWKKFSTTVIINSEIGDVIRPEGWKIWDGESFHKSCRYVEYNNRGPGAITNRRVNWVKIARSAAEVNDFTVANWLGPINWIQEANVPVTLGL

SEQ ID NO: 44224 - DNA, 1585 bp, Arabidopsis thaliana
  misc_feature (1)..(1585): Ceres Seq. ID no. 13509266
  misc_feature (1)..(1585): Ortholog of  Ceres SEQ ID NO 15172237 as cited in SEQ ID NO 55116
  misc_feature (1)..(1585): Ortholog of  Ceres SEQ ID NO 13657258 as cited in SEQ ID NO 66023
aggcatcttttaggtcatatcaatacaaaatacacatatacatatttttcaacacctgaggtgcgcgaagatagacacttcttcatcctctccgtgattctcaaaattagggttttcttccggcagctctctcagttgtactgcaagcattcttttctagatatttaagatgtcaaggacgaggactgctgcttctgaggctcatgactccatggaatctgaggaaagggtagaccttgatggtgacaatgatcctgaggagattctggaggaggaagttgaatacgaagaagttgaagaggaggagattgaagagatagaagaggagatagaggaggaggttgaagtggaagaagaggaggaggaggaggatgctgttgcaacggaagaggaagaagaaaagaaaaggcatgttgaacttcttgcacttcctccacatggttcagaggtttatcttggagggattcctactgatgctactgaaggggacttaaagggcttctgtggatctataggagaagttactgaggttaggataatgagggaaaaggattctggtgatggaaaggggtatgcatttgtaacattcagaagtaaggacttagctgctgaagcaattgatactctaaataacactgacttcagaggtaaaaggataaaatgttcgactacccaagcaaagcatcgtctctttcttggtaatgtccctagaaattggatggagtcagacattaagaaagcagcaaatagaattggtccaggcgttcaaattgtcgaactcccaaaggaaccacaaaatatgggccggaatcgtggatttgctttcatcgagtattacaaccatgcatgtgctgaatactcgaaacaaaaaatgtcaaatccgagttttaagcttgatgataatgccccaactgtaagctgggctgaatcaaggagtggaggaggaggagattcttcggcttcccaggtcaaggcattgtacatcaagaacttacctagagatataacacaagagcgtctaaaggcattatttgaacatcacgggaaaatactgaaagtggtgatcccaccagcaaaaccaggaaaggaagacagtagatacggatttgtgcattatgcagagaggacaagtgtcatgcgagctttgaaaaacactgaaagatatgagattgatggtcatatgttggattgtactctggcaaagcctcaagctgatcaaaagacgaatacaaatacagttcagaatgtgcagaaatcacaattgcaaccaaactatcctcctcttcttagttatggcatggctcctagtccctttggtgctctcggtggatttggagcttctgcctactcacaaccattaatgcatgccggaggtcacgcagccggtggaatgtcgatgatgccaatcatgttacccgatgggagaatcggatacgtcttgcaacagcctggactagcagctatgccgcaaccaccaccaaggcattctccaccgtataggggaggcagcggttcgagcagcagcagcggcagcaaacgaagtagtgacaacggtagaggacgaagccgttacaatccttattag

SEQ ID NO: 44225 - protein, 471 aa, Arabidopsis thaliana
  peptide (1)..(471): Ceres Seq. ID no. 13509267
MSRTRTAASEAHDSMESEERVDLDGDNDPEEILEEEVEYEEVEEEEIEEIEEEIEEEVEVEEEEEEEDAVATEEEEEKKRHVELLALPPHGSEVYLGGIPTDATEGDLKGFCGSIGEVTEVRIMREKDSGDGKGYAFVTFRSKDLAAEAIDTLNNTDFRGKRIKCSTTQAKHRLFLGNVPRNWMESDIKKAANRIGPGVQIVELPKEPQNMGRNRGFAFIEYYNHACAEYSKQKMSNPSFKLDDNAPTVSWAESRSGGGGDSSASQVKALYIKNLPRDITQERLKALFEHHGKILKVVIPPAKPGKEDSRYGFVHYAERTSVMRALKNTERYEIDGHMLDCTLAKPQADQKTNTNTVQNVQKSQLQPNYPPLLSYGMAPSPFGALGGFGASAYSQPLMHAGGHAAGGMSMMPIMLPDGRIGYVLQQPGLAAMPQPPPRHSPPYRGGSGSSSSSGSKRSSDNGRGRSRYNPY

SEQ ID NO: 44226 - protein, 457 aa, Arabidopsis thaliana
  peptide (1)..(457): Ceres Seq. ID no. 13509268
MESEERVDLDGDNDPEEILEEEVEYEEVEEEEIEEIEEEIEEEVEVEEEEEEEDAVATEEEEEKKRHVELLALPPHGSEVYLGGIPTDATEGDLKGFCGSIGEVTEVRIMREKDSGDGKGYAFVTFRSKDLAAEAIDTLNNTDFRGKRIKCSTTQAKHRLFLGNVPRNWMESDIKKAANRIGPGVQIVELPKEPQNMGRNRGFAFIEYYNHACAEYSKQKMSNPSFKLDDNAPTVSWAESRSGGGGDSSASQVKALYIKNLPRDITQERLKALFEHHGKILKVVIPPAKPGKEDSRYGFVHYAERTSVMRALKNTERYEIDGHMLDCTLAKPQADQKTNTNTVQNVQKSQLQPNYPPLLSYGMAPSPFGALGGFGASAYSQPLMHAGGHAAGGMSMMPIMLPDGRIGYVLQQPGLAAMPQPPPRHSPPYRGGSGSSSSSGSKRSSDNGRGRSRYNPY

SEQ ID NO: 44227 - protein, 348 aa, Arabidopsis thaliana
  peptide (1)..(348): Ceres Seq. ID no. 13509269
MREKDSGDGKGYAFVTFRSKDLAAEAIDTLNNTDFRGKRIKCSTTQAKHRLFLGNVPRNWMESDIKKAANRIGPGVQIVELPKEPQNMGRNRGFAFIEYYNHACAEYSKQKMSNPSFKLDDNAPTVSWAESRSGGGGDSSASQVKALYIKNLPRDITQERLKALFEHHGKILKVVIPPAKPGKEDSRYGFVHYAERTSVMRALKNTERYEIDGHMLDCTLAKPQADQKTNTNTVQNVQKSQLQPNYPPLLSYGMAPSPFGALGGFGASAYSQPLMHAGGHAAGGMSMMPIMLPDGRIGYVLQQPGLAAMPQPPPRHSPPYRGGSGSSSSSGSKRSSDNGRGRSRYNPY

SEQ ID NO: 44228 - DNA, 1307 bp, Arabidopsis thaliana; identical to SEQ ID NO: 41421
  misc_feature (1)..(1307): Ceres Seq. ID no. 13580557
  misc_feature (1)..(1307): Ortholog of  Ceres SEQ ID NO 15177654 as cited in SEQ ID NO 59933
  misc_feature (1)..(1307): Ortholog of  Ceres SEQ ID NO 14303600 as cited in SEQ ID NO 64632
  misc_feature (1)..(1307): Ortholog of  Ceres SEQ ID NO 14302776 as cited in SEQ ID NO 66919

SEQ ID NO: 44229 - protein, 306 aa, Arabidopsis thaliana; identical to SEQ ID NO: 41422
  peptide (1)..(306): Ceres Seq. ID no. 15222731

SEQ ID NO: 44230 - protein, 212 aa, Arabidopsis thaliana; identical to SEQ ID NO: 41423
  peptide (1)..(212): Ceres Seq. ID no. 15222732

SEQ ID NO: 44231 - protein, 177 aa, Arabidopsis thaliana; identical to SEQ ID NO: 41424
  peptide (1)..(177): Ceres Seq. ID no. 15222733

SEQ ID NO: 44232 - DNA, 1639 bp, Arabidopsis thaliana
  misc_feature (1)..(1639): Ceres Seq. ID no. 13509375
  misc_feature (1)..(1639): Ortholog of  Ceres SEQ ID NO 13659033 as cited in SEQ ID NO 66372
  misc_feature (1)..(1639): Ortholog of  Ceres SEQ ID NO 13655724 as cited in SEQ ID NO 68973
  misc_feature (1)..(1639): Ortholog of  Ceres SEQ ID NO 12625899 as cited in SEQ ID NO 69079
gctgtgtcttttttataatgatgaagttcctcgctttcaacgccaaccaaaaacctccagaaagctaattagggaaacatttgaaaaaactcagtgatctgctcttctctctaattgcaatggattcattgagattaatatctaagagcatcaagattgaaggaaccccatttggttcctctcaccaacgcaatcaaattttcctcaaatccgtcgctttcttccttttgatcggtctcgcttaccgttttctcatcactaattccaccgtctctccggttcccaccgttcgatcctcgccggaatctctcccgccggatccttcaggtctcactgccatcactcaaacttcagcctctgtcgattccccagcaaacatcacaaccattgcttcacagaatgtttcaaccaagtgtgatatctttatcgggaattgggtaccagacccatcagggccaatctacaccaatgtctcttgccgtcatatccaagattaccaaaattgcttgaaaaacggaaggccagatgtgaattaccttcgatggagatggcaacctcgcgattgcgatctcccgaggtttaaccctgagcaattccttgacaatatgaggaacaaatggttggcttttatcggtgattccatctctcgtaaccatgtccaatccctcctctgcattctctctcaggtagaagaagtagaagatatcttccatgacaaggaatacaaatcaaggatctggagattcccttcttacaacttcacactctctgtcatttggtctcctttccttgtaaaagctgaaacctttgagaacggagttcctttctcagacattcgagtacacctcgacaagctagaccagaaatggactgatcagtacatcaatttcgactacgttgtcatctccggtggaaaatggttcctcaaaacaacaatcttccatgaaaacaacaccgtaaccggatgccattactgccaagggaagaacaatatgaccgaactcggttatctatactcgtaccgaaaggttcttcatttggttttagactttgtcgctgaaccgaaccataaagctcaggttctcttcagaacaacaacacctgatcatttcgagaatggagagtgggactctggtggtttctgtaaccgaacaatgccgtttacggaaggcagcgaaggagagatgaagagcgaggatgtatcgatgcgtgatatcgagcttgaagagttctataagactactactacacaacaagaaggttccaattcaaacattgtattacttgacacaacttcaatgtcgcttctccgaccagatggacatccgggaccgtaccggtatccaaatcctttcgctgggctgaagaacaaggagctgaatcaggttcagaacgattgtcttcattggtgcttacccggtccgattgattcatggaatgatctaatggtcgaggtgatgcttaaccgggaacggcaaagacgagaatagcctctcgacttcacgtgctgttgttttctaattagtttgtttgtttgctcgtaaaaaagcccatttattattggaccttccgtgggtccaaatacaagcactgtcgttttttgatgtgggaatgaaacgccgtgtcgttttacttcctc

SEQ ID NO: 44233 - protein, 456 aa, Arabidopsis thaliana
  peptide (1)..(456): Ceres Seq. ID no. 13509376
MDSLRLISKSIKIEGTPFGSSHQRNQIFLKSVAFFLLIGLAYRFLITNSTVSPVPTVRSSPESLPPDPSGLTAITQTSASVDSPANITTIASQNVSTKCDIFIGNWVPDPSGPIYTNVSCRHIQDYQNCLKNGRPDVNYLRWRWQPRDCDLPRFNPEQFLDNMRNKWLAFIGDSISRNHVQSLLCILSQVEEVEDIFHDKEYKSRIWRFPSYNFTLSVIWSPFLVKAETFENGVPFSDIRVHLDKLDQKWTDQYINFDYVVISGGKWFLKTTIFHENNTVTGCHYCQGKNNMTELGYLYSYRKVLHLVLDFVAEPNHKAQVLFRTTTPDHFENGEWDSGGFCNRTMPFTEGSEGEMKSEDVSMRDIELEEFYKTTTTQQEGSNSNIVLLDTTSMSLLRPDGHPGPYRYPNPFAGLKNKELNQVQNDCLHWCLPGPIDSWNDLMVEVMLNRERQRRE

SEQ ID NO: 44234 - protein, 294 aa, Arabidopsis thaliana
  peptide (1)..(294): Ceres Seq. ID no. 13509377
MRNKWLAFIGDSISRNHVQSLLCILSQVEEVEDIFHDKEYKSRIWRFPSYNFTLSVIWSPFLVKAETFENGVPFSDIRVHLDKLDQKWTDQYINFDYVVISGGKWFLKTTIFHENNTVTGCHYCQGKNNMTELGYLYSYRKVLHLVLDFVAEPNHKAQVLFRTTTPDHFENGEWDSGGFCNRTMPFTEGSEGEMKSEDVSMRDIELEEFYKTTTTQQEGSNSNIVLLDTTSMSLLRPDGHPGPYRYPNPFAGLKNKELNQVQNDCLHWCLPGPIDSWNDLMVEVMLNRERQRRE

SEQ ID NO: 44235 - DNA, 1236 bp, Arabidopsis thaliana
  misc_feature (1)..(1236): Ceres Seq. ID no. 13509797
  misc_feature (1)..(1236): Ortholog of  Ceres SEQ ID NO 15176254 as cited in SEQ ID NO 55147
  misc_feature (1)..(1236): Ortholog of  Ceres SEQ ID NO 13599254 as cited in SEQ ID NO 0
gattgaccacgttctcgtcttcccccaaatctaaaaccctaaattctcaattgctcgtcacacttcgtcactccaccagcgacaatcgccgcagaaacctctacgaaacttgctacaatggagttttcatcacaagacgacgattttggaggagacgattccgctgctaatgccaccagggcttcaggtaatagaagaagcttcggtgatcttgaagacgatgaagatgatattttcggatcaacaacggtagcgcctggtgttagaactgggatgattttgtctctccgaggaagtcttaagaattgtaaagatgatcttgcttcatgtcaaaatgagctcgagtcagcaaaaacagagattcagaagtggaagtcagcgtttcagaatgagtcctttgttcccgctggaaaatctcctgaaccaagatttttgattgattatattcaaaacctaaaatcttctgagaaatctttgaaagaacagttagaaatcgcaaagagaaaagaagcgtcatgcattgtacaatatgcgaaacgggaacaagaaatggcagaattgaagtcagctgttcgcgatttgaaatctcaactcaagccagcgtcaatgcaggcgaggaggttgttactggatccagcaattcatgaagaattttcacgtctgaagaatctagtagaggaaaaagacaagaagatcaaggaactccaggacaacattgcagcagttacttttactcctcaaagcaagaatggaaagatgcttatggcaaagtgcagaaccctgcaagaggaaaatgaggagattgggcaccaagctgccgaaggaaagattcatgaactagcaataaagcttgcaatgcagaagtctcaaaacgcggaacttagaagtcaatttgaaggactgtacaaacacatggaggaattaactaatgatgttgagagatcaaatgaaacggtgataatattgcaagagaaactggaagagaaagagaaggagatagagagagtaaagaaaggactggaaattgtgtctgagctagtaggtgacaagaaagatgaagttgatgaaattgatgaagatgcaaaagaagaaattgctggtggagaataggaatttgtagctttcaaaaaatgttttgtacattttgaagttcaaaatcacatttcttcattcgttatctgtttcatgaaacagaaagttctaatcttcatcttctattaatatgttttaattcgc

SEQ ID NO: 44236 - protein, 330 aa, Arabidopsis thaliana
  peptide (1)..(330): Ceres Seq. ID no. 13509798
MEFSSQDDDFGGDDSAANATRASGNRRSFGDLEDDEDDIFGSTTVAPGVRTGMILSLRGSLKNCKDDLASCQNELESAKTEIQKWKSAFQNESFVPAGKSPEPRFLIDYIQNLKSSEKSLKEQLEIAKRKEASCIVQYAKREQEMAELKSAVRDLKSQLKPASMQARRLLLDPAIHEEFSRLKNLVEEKDKKIKELQDNIAAVTFTPQSKNGKMLMAKCRTLQEENEEIGHQAAEGKIHELAIKLAMQKSQNAELRSQFEGLYKHMEELTNDVERSNETVIILQEKLEEKEKEIERVKKGLEIVSELVGDKKDEVDEIDEDAKEEIAGGE

SEQ ID NO: 44237 - protein, 278 aa, Arabidopsis thaliana
  peptide (1)..(278): Ceres Seq. ID no. 13509799
MILSLRGSLKNCKDDLASCQNELESAKTEIQKWKSAFQNESFVPAGKSPEPRFLIDYIQNLKSSEKSLKEQLEIAKRKEASCIVQYAKREQEMAELKSAVRDLKSQLKPASMQARRLLLDPAIHEEFSRLKNLVEEKDKKIKELQDNIAAVTFTPQSKNGKMLMAKCRTLQEENEEIGHQAAEGKIHELAIKLAMQKSQNAELRSQFEGLYKHMEELTNDVERSNETVIILQEKLEEKEKEIERVKKGLEIVSELVGDKKDEVDEIDEDAKEEIAGGE

SEQ ID NO: 44238 - protein, 186 aa, Arabidopsis thaliana
  peptide (1)..(186): Ceres Seq. ID no. 13509800
MAELKSAVRDLKSQLKPASMQARRLLLDPAIHEEFSRLKNLVEEKDKKIKELQDNIAAVTFTPQSKNGKMLMAKCRTLQEENEEIGHQAAEGKIHELAIKLAMQKSQNAELRSQFEGLYKHMEELTNDVERSNETVIILQEKLEEKEKEIERVKKGLEIVSELVGDKKDEVDEIDEDAKEEIAGGE

SEQ ID NO: 44239 - DNA, 1476 bp, Arabidopsis thaliana
  misc_feature (1)..(1476): Ceres Seq. ID no. 12481742
  misc_feature (1)..(1476): Ortholog of  Ceres SEQ ID NO 14314054 as cited in SEQ ID NO 56939
ataacacatcatggtgaacgaagaaatggagtcatcacttaaagtcatcgacgtggcacgagtcacaccatcaaactccgactcgtccgagtcactcactctcccactcaccttcttcgacctcctctggtacaaacttcacgccgtcgaacgagtcatcttctacaaactcaccgacgcaagtcgtcctttctttgactcagtcatcgtcccaaacctcaaaacatctctctcctcatccctctctcactacctcccactcgccggaaaactcgtgtgggaaccacttgatcccaaaccgaaaatcgtctacaccccaaacgacgccgtttcattcaccgtcgccgagtcaaacgcagacttctcacgtttaaccggcaaagaaccgttccccaccaccgagttatacccgttagtccccgagttacatgtctccgacgactcagcttccgccgtgtcgtttcaagtcacgttatttccaaaccaagggttttgcatcagcgttaatgcacatcatgccgttttagatggaaaaacgacaaccaactttctcaaatcttgggcacgcacatgtaaaaaccaagattcttttctaccgcaggatctaatcccagtttacgatcgtacggtcataaaagatccaatggatttagatacaaagatcttaaacgcttggcacagagtagccaaagtgttcaccggtggtaaagaaccagaaaaccccaagagtttaaagcttttatggtcgccggagattggtcctgacgttttccgatacactctcaatctcactagagaagatatccaaaagcttcgagagagactcaagaaagagtcttcttcttcctctgtttcctcatcacccaaagagcttcgtttatcaacgtttgtgattgtttactcttatgctttaacgtgtttaatcaaagctcgaggcggtgatccgagtagaccagtcgggtacggattcgctgtggattgtcgaagccttatggttccaccggttccatcgagttattttggtaattgtgtatctgcttgtttaaaatgtcgttaacggcagagacttttatgagtgaagaagggtttttagctgctgcgagaatggttagtgattctgttgaggcattggatgagaatgttgcattgaagattccagagattttggaagggtttacgactctttcaccaggaacacaggttttgtctgttgccgggtcgacccggttcggagtttacgggttggattttgggtggggtagaccggagaaagtggtggttgtgtcaattgaccaaggtgaagcgatttcttttgcggagagtagagatgggagtggtggtgtagagcttggcttctccctcaagaaacatgaaatggatgttcttgttgatttgcttcacaagggactagaaaattaaatcatttttttctttcttcagaagagtaaaataatataagaaataaaatttattgtg

SEQ ID NO: 44240 - protein, 348 aa, Arabidopsis thaliana
  peptide (1)..(348): Ceres Seq. ID no. 12481743
MVNEEMESSLKVIDVARVTPSNSDSSESLTLPLTFFDLLWYKLHAVERVIFYKLTDASRPFFDSVIVPNLKTSLSSSLSHYLPLAGKLVWEPLDPKPKIVYTPNDAVSFTVAESNADFSRLTGKEPFPTTELYPLVPELHVSDDSASAVSFQVTLFPNQGFCISVNAHHAVLDGKTTTNFLKSWARTCKNQDSFLPQDLIPVYDRTVIKDPMDLDTKILNAWHRVAKVFTGGKEPENPKSLKLLWSPEIGPDVFRYTLNLTREDIQKLRERLKKESSSSSVSSSPKELRLSTFVIVYSYALTCLIKARGGDPSRPVGYGFAVDCRSLMVPPVPSSYFGNCVSACLKCR

SEQ ID NO: 44241 - protein, 343 aa, Arabidopsis thaliana
  peptide (1)..(343): Ceres Seq. ID no. 12481744
MESSLKVIDVARVTPSNSDSSESLTLPLTFFDLLWYKLHAVERVIFYKLTDASRPFFDSVIVPNLKTSLSSSLSHYLPLAGKLVWEPLDPKPKIVYTPNDAVSFTVAESNADFSRLTGKEPFPTTELYPLVPELHVSDDSASAVSFQVTLFPNQGFCISVNAHHAVLDGKTTTNFLKSWARTCKNQDSFLPQDLIPVYDRTVIKDPMDLDTKILNAWHRVAKVFTGGKEPENPKSLKLLWSPEIGPDVFRYTLNLTREDIQKLRERLKKESSSSSVSSSPKELRLSTFVIVYSYALTCLIKARGGDPSRPVGYGFAVDCRSLMVPPVPSSYFGNCVSACLKCR

SEQ ID NO: 44242 - DNA, 1605 bp, Arabidopsis thaliana
  misc_feature (1)..(1605): Ceres Seq. ID no. 12481720
  misc_feature (1)..(1605): Ortholog of  Ceres SEQ ID NO 14310736 as cited in SEQ ID NO 52901
  misc_feature (1)..(1605): Ortholog of  Ceres SEQ ID NO 13594345 as cited in SEQ ID NO 58043
  misc_feature (1)..(1605): Ortholog of  Ceres SEQ ID NO 14308594 as cited in SEQ ID NO 60384
  misc_feature (1)..(1605): Ortholog of  Ceres SEQ ID NO 13597574 as cited in SEQ ID NO 64677
  misc_feature (1)..(1605): Ortholog of  Ceres SEQ ID NO 13662880 as cited in SEQ ID NO 65422
  misc_feature (1)..(1605): Ortholog of  Ceres SEQ ID NO 12779098 as cited in SEQ ID NO 67698
  misc_feature (1)..(1605): Ortholog of  Ceres SEQ ID NO 13596180 as cited in SEQ ID NO 67941
  misc_feature (1)..(1605): Ortholog of  Ceres SEQ ID NO 13591190 as cited in SEQ ID NO 68044
  misc_feature (1)..(1605): Ortholog of  Ceres SEQ ID NO 13595961 as cited in SEQ ID NO 68223
  misc_feature (1)..(1605): Ortholog of  Ceres SEQ ID NO 13596089 as cited in SEQ ID NO 68373
aaaactcacatttgttcattacaaaaagaggaaactgacaactgatttcgcgcaagagaaagaaaaatgggatctcagatcattcataactcacaaaaaccacatgtagtttgtgttccatatccggctcaaggccacatcaaccctatgatgagagtggctaaactcctccacgccagaggcttctacgtcaccttcgtcaacaccgtctacaaccacaatcgtttccttcgttctcgtgggtccaatgccctagatggacttccttcgttccgatttgagtccattgctgacggtctaccagagacagacatggatgccacgcaggacatcacagctctttgcgagtccaccatgaagaactgtctcgctccgttcagagagcttctccagcggatcaacgctggagataatgttcctccggtaagctgtattgtatctgacggttgtatgagctttactcttgatgttgcggaggagcttggagtcccggaggttcttttttggacaaccagtggctgtgcgttcctggcttatctacacttttatctcttcatcgagaagggcttatgtccgctaaaagatgagagttacttgacgaaggagtacttagaagacacggttatagattttataccaaccatgaagaatgtgaaactaaaggatattcctagcttcatacgtaccactaatcctgatgatgttatgattagtttcgccctccgcgagaccgagcgagccaaacgtgcttctgctatcattctaaacacatttgatgaccttgagcatgatgttgttcatgctatgcaatctatcttacctccggtttattcagttggaccgcttcatctcttagcaaaccgggagattgaagaaggtagtgagattggaatgatgagttcgaatttatggaaagaggagatggagtgtttggattggcttgatactaagactcaaaatagtgtcatttatatcaactttgggagcataacggttttgagtgtgaagcagcttgtggagtttgcttggggtttggcgggaagtgggaaagagtttttatgggtgatccggccagatttagtagcgggagaggaggctatggttccgccggactttttaatggagactaaagaccgcagtatgctagcgagttggtgtcctcaagagaaagtactttctcatcctgctattggagggtttttgacgcattgcgggtggaactcgatattggaaagtctttcgtgtggagttccgatggtgtgttggccattttttgctgaccagcaaatgaattgtaagttttgttgtgacgagtgggatgttgggattgagataggtggagatgtgaagagagaggaagttgaggcggtggttagagagctcatggatggagagaagggaaagaaaatgagagaaaaggcggtagagtggcagcgcttagccgagaaagcgacggaacataaacttggttcttccgttatgaattttgagacggttgttagcaagtttcttttgggacaaaaatcacaggattaactaaaatataagatgatcatcgaaatgtattattttttctataatgattactaagtaagtgtttatttt

SEQ ID NO: 44243 - protein, 489 aa, Arabidopsis thaliana
  peptide (1)..(489): Ceres Seq. ID no. 12481721
MGSQIIHNSQKPHVVCVPYPAQGHINPMMRVAKLLHARGFYVTFVNTVYNHNRFLRSRGSNALDGLPSFRFESIADGLPETDMDATQDITALCESTMKNCLAPFRELLQRINAGDNVPPVSCIVSDGCMSFTLDVAEELGVPEVLFWTTSGCAFLAYLHFYLFIEKGLCPLKDESYLTKEYLEDTVIDFIPTMKNVKLKDIPSFIRTTNPDDVMISFALRETERAKRASAIILNTFDDLEHDVVHAMQSILPPVYSVGPLHLLANREIEEGSEIGMMSSNLWKEEMECLDWLDTKTQNSVIYINFGSITVLSVKQLVEFAWGLAGSGKEFLWVIRPDLVAGEEAMVPPDFLMETKDRSMLASWCPQEKVLSHPAIGGFLTHCGWNSILESLSCGVPMVCWPFFADQQMNCKFCCDEWDVGIEIGGDVKREEVEAVVRELMDGEKGKKMREKAVEWQRLAEKATEHKLGSSVMNFETVVSKFLLGQKSQD

SEQ ID NO: 44244 - protein, 462 aa, Arabidopsis thaliana
  peptide (1)..(462): Ceres Seq. ID no. 12481722
MMRVAKLLHARGFYVTFVNTVYNHNRFLRSRGSNALDGLPSFRFESIADGLPETDMDATQDITALCESTMKNCLAPFRELLQRINAGDNVPPVSCIVSDGCMSFTLDVAEELGVPEVLFWTTSGCAFLAYLHFYLFIEKGLCPLKDESYLTKEYLEDTVIDFIPTMKNVKLKDIPSFIRTTNPDDVMISFALRETERAKRASAIILNTFDDLEHDVVHAMQSILPPVYSVGPLHLLANREIEEGSEIGMMSSNLWKEEMECLDWLDTKTQNSVIYINFGSITVLSVKQLVEFAWGLAGSGKEFLWVIRPDLVAGEEAMVPPDFLMETKDRSMLASWCPQEKVLSHPAIGGFLTHCGWNSILESLSCGVPMVCWPFFADQQMNCKFCCDEWDVGIEIGGDVKREEVEAVVRELMDGEKGKKMREKAVEWQRLAEKATEHKLGSSVMNFETVVSKFLLGQKSQD

SEQ ID NO: 44245 - protein, 461 aa, Arabidopsis thaliana
  peptide (1)..(461): Ceres Seq. ID no. 12481723
MRVAKLLHARGFYVTFVNTVYNHNRFLRSRGSNALDGLPSFRFESIADGLPETDMDATQDITALCESTMKNCLAPFRELLQRINAGDNVPPVSCIVSDGCMSFTLDVAEELGVPEVLFWTTSGCAFLAYLHFYLFIEKGLCPLKDESYLTKEYLEDTVIDFIPTMKNVKLKDIPSFIRTTNPDDVMISFALRETERAKRASAIILNTFDDLEHDVVHAMQSILPPVYSVGPLHLLANREIEEGSEIGMMSSNLWKEEMECLDWLDTKTQNSVIYINFGSITVLSVKQLVEFAWGLAGSGKEFLWVIRPDLVAGEEAMVPPDFLMETKDRSMLASWCPQEKVLSHPAIGGFLTHCGWNSILESLSCGVPMVCWPFFADQQMNCKFCCDEWDVGIEIGGDVKREEVEAVVRELMDGEKGKKMREKAVEWQRLAEKATEHKLGSSVMNFETVVSKFLLGQKSQD

SEQ ID NO: 44246 - DNA, 1879 bp, Arabidopsis thaliana; identical to SEQ ID NO: 21108
  misc_feature (1)..(1879): Ceres Seq. ID no. 13509253
  misc_feature (1)..(1879): Ortholog of  Ceres SEQ ID NO 15224709 as cited in SEQ ID NO 68627

SEQ ID NO: 44247 - protein, 399 aa, Arabidopsis thaliana; identical to SEQ ID NO: 21109
  peptide (1)..(399): Ceres Seq. ID no. 13509254

SEQ ID NO: 44248 - protein, 367 aa, Arabidopsis thaliana; identical to SEQ ID NO: 21110
  peptide (1)..(367): Ceres Seq. ID no. 13509255

SEQ ID NO: 44249 - protein, 297 aa, Arabidopsis thaliana; identical to SEQ ID NO: 21111
  peptide (1)..(297): Ceres Seq. ID no. 13509256

SEQ ID NO: 44250 - DNA, 1235 bp, Arabidopsis thaliana
  misc_feature (1)..(1235): Ceres Seq. ID no. 15174473
  misc_feature (1)..(1235): Ortholog of  Ceres SEQ ID NO 14309755 as cited in SEQ ID NO 20741
  misc_feature (1)..(1235): Ortholog of  Ceres SEQ ID NO 14310369 as cited in SEQ ID NO 54765
  misc_feature (1)..(1235): Ortholog of  Ceres SEQ ID NO 13596474 as cited in SEQ ID NO 62169
  misc_feature (1)..(1235): Ortholog of  Ceres SEQ ID NO 13598714 as cited in SEQ ID NO 62656
  misc_feature (1)..(1235): Ortholog of  Ceres SEQ ID NO 14302434 as cited in SEQ ID NO 63410
  misc_feature (1)..(1235): Ortholog of  Ceres SEQ ID NO 15225685 as cited in SEQ ID NO 63616
  misc_feature (1)..(1235): Ortholog of  Ceres SEQ ID NO 13597519 as cited in SEQ ID NO 64759
  misc_feature (1)..(1235): Ortholog of  Ceres SEQ ID NO 14302388 as cited in SEQ ID NO 65655
  misc_feature (1)..(1235): Ortholog of  Ceres SEQ ID NO 15170183 as cited in SEQ ID NO 65667
  misc_feature (1)..(1235): Ortholog of  Ceres SEQ ID NO 13587054 as cited in SEQ ID NO 0
accatatacccacactcacaagtcacaactcaaataatctttgtcttcctcctacaaatatggggttttctccttcattttcttgcagtgctattggagccctaattttgggttgccttctgcttcaagcatcaaactctaatgctcagttgaggcctgatttctacttcgggacgtgcccatttgtttttgatatcattggaaatatcatcgtcgatgaactgcaaactgatcctcgtattgccgcgagcctccttcgtcttcactttcacgactgctttgttcgtggttgtgatgcatcgatcttgcttgacaattccacatcattccggactgagaaagatgctgctccgaacgcaaattcggctcgagggtttaatgtcatagatagaatgaaagtagcccttgagagagcttgcccaggaagagtctcttgtgcagatattctcaccatcgcctctcaaatatcagtgcttttgtcgggaggtccatggtggccggttccgttggggaggagagacagtgtagaagctttcttcgctctggctaatacagctctgccctctccgtttttcaatcttactcaacttaaaacagcctttgctgacgttggcctaaaccgcacttccgatctagttgctctttccggtggtcacacatttggaagagcacaatgccagttcgtgacgcctcgtctctacaacttcaatggtacaaacagtccagacccaagtctgaacccaacttaccttgtcgaactccgtcgattgtgtcctcaaaacggaaacggcaccgttctggtcaacttcgatgtcgtgactccagatgctttcgatagtcaatactacaccaaccttcgtaatgggaaaggtcttattcagagtgaccaggaactcttttcgactccaggagccgatacgatccctttagtaaaccaatacagcagcgacatgtccgtgttctttcgagcattcattgacgcaatgattaggatgggaaatcttagacctttgactggaactcaaggagagattagacaaaattgtagggttgtgaatccacgaattagggttgtggagaacgacgatggtgttgtgagttctatctgattatgcatgttgccatgttgggatatatatatggatatgtaagaaagtataaaatgcgcacgtgagaacaatttcgactaataaaagttctcacgagttatgagatttatgaaattggtattaagc

SEQ ID NO: 44251 - protein, 368 aa, Arabidopsis thaliana
  peptide (1)..(368): Ceres Seq. ID no. 15174474
HIPTLTSHNSNNLCLPPTNMGFSPSFSCSAIGALILGCLLLQASNSNAQLRPDFYFGTCPFVFDIIGNIIVDELQTDPRIAASLLRLHFHDCFVRGCDASILLDNSTSFRTEKDAAPNANSARGFNVIDRMKVALERACPGRVSCADILTIASQISVLLSGGPWWPVPLGRRDSVEAFFALANTALPSPFFNLTQLKTAFADVGLNRTSDLVALSGGHTFGRAQCQFVTPRLYNFNGTNSPDPSLNPTYLVELRRLCPQNGNGTVLVNFDVVTPDAFDSQYYTNLRNGKGLIQSDQELFSTPGADTIPLVNQYSSDMSVFFRAFIDAMIRMGNLRPLTGTQGEIRQNCRVVNPRIRVVENDDGVVSSI

SEQ ID NO: 44252 - protein, 349 aa, Arabidopsis thaliana
  peptide (1)..(349): Ceres Seq. ID no. 15174475
MGFSPSFSCSAIGALILGCLLLQASNSNAQLRPDFYFGTCPFVFDIIGNIIVDELQTDPRIAASLLRLHFHDCFVRGCDASILLDNSTSFRTEKDAAPNANSARGFNVIDRMKVALERACPGRVSCADILTIASQISVLLSGGPWWPVPLGRRDSVEAFFALANTALPSPFFNLTQLKTAFADVGLNRTSDLVALSGGHTFGRAQCQFVTPRLYNFNGTNSPDPSLNPTYLVELRRLCPQNGNGTVLVNFDVVTPDAFDSQYYTNLRNGKGLIQSDQELFSTPGADTIPLVNQYSSDMSVFFRAFIDAMIRMGNLRPLTGTQGEIRQNCRVVNPRIRVVENDDGVVSSI

SEQ ID NO: 44253 - protein, 238 aa, Arabidopsis thaliana
  peptide (1)..(238): Ceres Seq. ID no. 15174476
MKVALERACPGRVSCADILTIASQISVLLSGGPWWPVPLGRRDSVEAFFALANTALPSPFFNLTQLKTAFADVGLNRTSDLVALSGGHTFGRAQCQFVTPRLYNFNGTNSPDPSLNPTYLVELRRLCPQNGNGTVLVNFDVVTPDAFDSQYYTNLRNGKGLIQSDQELFSTPGADTIPLVNQYSSDMSVFFRAFIDAMIRMGNLRPLTGTQGEIRQNCRVVNPRIRVVENDDGVVSSI

SEQ ID NO: 44254 - DNA, 1233 bp, Arabidopsis thaliana; identical to SEQ ID NO: 36532
  misc_feature (1)..(1233): Ceres Seq. ID no. 13509427
  misc_feature (1)..(1233): Ortholog of  Ceres SEQ ID NO 14316365 as cited in SEQ ID NO 60135

SEQ ID NO: 44255 - protein, 283 aa, Arabidopsis thaliana; identical to SEQ ID NO: 36533
  peptide (1)..(283): Ceres Seq. ID no. 13509428

SEQ ID NO: 44256 - protein, 256 aa, Arabidopsis thaliana; identical to SEQ ID NO: 36534
  peptide (1)..(256): Ceres Seq. ID no. 13509429

SEQ ID NO: 44257 - DNA, 1280 bp, Arabidopsis thaliana
  misc_feature (1)..(1280): Ceres Seq. ID no. 14306842
  misc_feature (1)..(1280): Ortholog of  Ceres SEQ ID NO 14303366 as cited in SEQ ID NO 54418
  misc_feature (1)..(1280): Ortholog of  Ceres SEQ ID NO 13503610 as cited in SEQ ID NO 62416
  misc_feature (1)..(1280): Ortholog of  Ceres SEQ ID NO 13657610 as cited in SEQ ID NO 66165
  misc_feature (1)..(1280): Ortholog of  Ceres SEQ ID NO 13598312 as cited in SEQ ID NO 68448
  misc_feature (1)..(1280): Ortholog of  Ceres SEQ ID NO 13596100 as cited in SEQ ID NO 68573
atcataggcatagcaaaactcttccaaaatgtctgatttctcgagctccgtgaagcttaaatatgttaaactcggttaccaataccttatcaacaacttccttactcttcttttgattccagtcatagcaaccgtcgccatcgagcttctccgaatgggtcctcgagcgatcaggtctaggagaagagacttgtctccctccagctattcattacatccctccaactccaaccatggaatccgcaagaaacgaggcccaaatggttatcttcaccgccatggaagatctcttcaagaatacaggtcttaaacctaaagacatcgacatcctcattgttaattgctctctgttctcaccaacgccgtctctctccgctatgattatcaacaagtacaagcttaggagtaacatcaaaagctataacctttccgggatgggatgcagcgctagtcttatctcagttgatgtagcacgtaatttgttacaagtccatcctaactccaacgcaatcataattagcactgagatcattactcctaattactataagggtaatgagagagccatgttgctcccaaactgcctcttccgtatgggaggcgccgccattctcctctctaaccgcagatccgacaggtggcgagctaagtacaagttatgccaccttgttaggacccatcgcggtgcggatgacaaatcctacaactgtgttatggaacaggaagacaaaaatggtaacgtgggaatcaacttgtctaaagatctcatgaccattgccggagaagccttgaaagctaatatcactaccataggtcctttggtccttccggcatcggagcagcttctcttcctctcatcccttatcggacgtaaaatcttcaatccaaagtggaagccgtacataccagatttcaagcaggccttcgagcatttctgcatccacgcaggaggaagagcggtgattgatgagctgcaaaagaatctacagctgtcgggagaacacgtggaagcttcaagaatgacactacataggtttggtaatacatcgtcgtcatcattatggtatgagcttagctacatagaggctcaagggaggatgaagagaaacgatagggtttggcagatcgctttcggaagtggattcaagtgtaactccgccgtttggaaatgtaaccgtacgatcaagacaccaacggatggagcgtggtcggattgtatcgaacgataccctgtctttatccctgaagttgttaaactatgaaaatactttttttttacc

SEQ ID NO: 44258 - protein, 342 aa, Arabidopsis thaliana
  peptide (1)..(342): Ceres Seq. ID no. 14306843
MESARNEAQMVIFTAMEDLFKNTGLKPKDIDILIVNCSLFSPTPSLSAMIINKYKLRSNIKSYNLSGMGCSASLISVDVARNLLQVHPNSNAIIISTEIITPNYYKGNERAMLLPNCLFRMGGAAILLSNRRSDRWRAKYKLCHLVRTHRGADDKSYNCVMEQEDKNGNVGINLSKDLMTIAGEALKANITTIGPLVLPASEQLLFLSSLIGRKIFNPKWKPYIPDFKQAFEHFCIHAGGRAVIDELQKNLQLSGEHVEASRMTLHRFGNTSSSSLWYELSYIEAQGRMKRNDRVWQIAFGSGFKCNSAVWKCNRTIKTPTDGAWSDCIERYPVFIPEVVKL

SEQ ID NO: 44259 - protein, 333 aa, Arabidopsis thaliana
  peptide (1)..(333): Ceres Seq. ID no. 14306844
MVIFTAMEDLFKNTGLKPKDIDILIVNCSLFSPTPSLSAMIINKYKLRSNIKSYNLSGMGCSASLISVDVARNLLQVHPNSNAIIISTEIITPNYYKGNERAMLLPNCLFRMGGAAILLSNRRSDRWRAKYKLCHLVRTHRGADDKSYNCVMEQEDKNGNVGINLSKDLMTIAGEALKANITTIGPLVLPASEQLLFLSSLIGRKIFNPKWKPYIPDFKQAFEHFCIHAGGRAVIDELQKNLQLSGEHVEASRMTLHRFGNTSSSSLWYELSYIEAQGRMKRNDRVWQIAFGSGFKCNSAVWKCNRTIKTPTDGAWSDCIERYPVFIPEVVKL

SEQ ID NO: 44260 - protein, 327 aa, Arabidopsis thaliana
  peptide (1)..(327): Ceres Seq. ID no. 14306845
MEDLFKNTGLKPKDIDILIVNCSLFSPTPSLSAMIINKYKLRSNIKSYNLSGMGCSASLISVDVARNLLQVHPNSNAIIISTEIITPNYYKGNERAMLLPNCLFRMGGAAILLSNRRSDRWRAKYKLCHLVRTHRGADDKSYNCVMEQEDKNGNVGINLSKDLMTIAGEALKANITTIGPLVLPASEQLLFLSSLIGRKIFNPKWKPYIPDFKQAFEHFCIHAGGRAVIDELQKNLQLSGEHVEASRMTLHRFGNTSSSSLWYELSYIEAQGRMKRNDRVWQIAFGSGFKCNSAVWKCNRTIKTPTDGAWSDCIERYPVFIPEVVKL

SEQ ID NO: 44261 - DNA, 1144 bp, Arabidopsis thaliana
  misc_feature (1)..(1144): Ceres Seq. ID no. 13646268
  misc_feature (1)..(1144): Ortholog of  Ceres SEQ ID NO 15168492 as cited in SEQ ID NO 58104
atcaaacacaaaccaaagacaacttgagtaaccaaaccaaagactaaaaatggccaaagctcttcacataaccatctttctcttcctcatatcctccaatctcctcgcatttatcaactccgccagacttcttgacgagatccaacctcagcctcagttagtccctaccggccaaatccccactgtggctccaaccgaagctgaggaggaggatggaaccgatgacaacccaggactagcaaccacaaccacaactgcatcagcagttacagtcccagccggtccagcagaggctacagagccattactagagttctttatgcatgacgtgctaggcggatctcacccatcagctcgtgtggttacaggtatagtagctcaaactgaagtgaacggaataccattctcaaaggccagtaacagcattttcccggttgacaatggagtcccactggtcaactcaaacaacatcaacagtgtcattaacccaaacacagctccacttctcaccggacttggcggtgctcaaacctccaccgtcatccaaaacactaacggaaattccaacgatgcccttagcgccaacagtctcccttttgtaactgccgggaaccttcctcccggtgctgccctccagcatctcatgttcggaaccataaccgttgtagatgatgagctaaccgaaagccacgagcttggctcagccgttatagggagagctcaaggcttttacttggccagttccctggacggaacaagtcagactctttctctgactgtattgctacatggtgagcatgaccagcatgacactttagacgatgccattagtttctttggggttcacagaaccgcctctcatgcctcccagatcgcggttataggcgggaccgggaagtttgaacacgccaaagggtatgccatagtggaaactctgcataaccaggacaaccagcatatcactgatggtcaagacaccatcctccatttcagtgtataccttacctacaaagcttgaagagaaaatgagtgttaaaacaagaaaagattgcttttttataagtttttgctcactagattccccttggggcctttttcctttgttgcgcaaatttgatttttaaagaaattttttttgttgggg

SEQ ID NO: 44262 - protein, 322 aa, Arabidopsis thaliana
  peptide (1)..(322): Ceres Seq. ID no. 13646269
MAKALHITIFLFLISSNLLAFINSARLLDEIQPQPQLVPTGQIPTVAPTEAEEEDGTDDNPGLATTTTTASAVTVPAGPAEATEPLLEFFMHDVLGGSHPSARVVTGIVAQTEVNGIPFSKASNSIFPVDNGVPLVNSNNINSVINPNTAPLLTGLGGAQTSTVIQNTNGNSNDALSANSLPFVTAGNLPPGAALQHLMFGTITVVDDELTESHELGSAVIGRAQGFYLASSLDGTSQTLSLTVLLHGEHDQHDTLDDAISFFGVHRTASHASQIAVIGGTGKFEHAKGYAIVETLHNQDNQHITDGQDTILHFSVYLTYKA

SEQ ID NO: 44263 - protein, 232 aa, Arabidopsis thaliana
  peptide (1)..(232): Ceres Seq. ID no. 13646270
MHDVLGGSHPSARVVTGIVAQTEVNGIPFSKASNSIFPVDNGVPLVNSNNINSVINPNTAPLLTGLGGAQTSTVIQNTNGNSNDALSANSLPFVTAGNLPPGAALQHLMFGTITVVDDELTESHELGSAVIGRAQGFYLASSLDGTSQTLSLTVLLHGEHDQHDTLDDAISFFGVHRTASHASQIAVIGGTGKFEHAKGYAIVETLHNQDNQHITDGQDTILHFSVYLTYKA

SEQ ID NO: 44264 - DNA, 1969 bp, Arabidopsis thaliana
  misc_feature (1)..(1969): Ceres Seq. ID no. 12603622
  misc_feature (1)..(1969): Ortholog of  Ceres SEQ ID NO 14315290 as cited in SEQ ID NO 50908
cttcaatagagaaccaaaaaaaatggcaacagaaggaaaaaaccccatcaacatgaactctatgtcttcaagtcttgcaagaaccggtcaatgggttttttctcaagatattccgaccgatgttgttgttgaagtcggagaagccaatttctctcttcataagttcatgttagtggctaagagtaactacataaggaagctaataatggaatccaaagatagcgacgtgacaagaatcaatctctcggatatacccggaggtcctgagatatttgagaaagctgccaagttctgttacggtgttaacttcgagatcaccgttcagaacgtggcggctcttcattgcgcagccgagtttcttcagatgaccgataagtactgcgacaacaaccttgctggtcggacacaagacttcctttctcaagtagctctctctagcctctctggagctatcgttgtcctcaagtcttgcgagattctccttcctatttctcgtgatcttggtattgtccgccgttgtgtcgacgtcgtcggtgctaaggcttgcaacgaggcaatgtttccatgtcgaacaccaccaaattggtggacagaggaactctgtatcttagacgtcgacttcttctccgatgtcgtatcttcaatgaagcagagaggtgtcaaaccttcttccttagcctctgcaatcatcacctacacagagaaatccttaagagatctcgtcagagaccattcaggcagaggagtcaaatattccgatcccggagataacgaatccgacgaaagatcccaacagagagatcttgttcaatctatcgtctctcttttaccttcagacaaagggctgttcccagtcaatttcctctgttctctcctccgttgcgcggtcttcttagacacttccttgacctgcaagaacgagctcgagaagcgaatctcagtcgttctagaacacgtctccgtcgacgatcttttgatcccgtctttcacctacgacggcgaacggttactagatctcgatagtgtcagaagaatcatctctgctttcgtggaaaaagagaaaaacgttggtgttttcaacggtggagacttcaacagaggagtctgctctgtttcactacaaagagtagctaaaacagttgattcttacttagcggagatcgctacttacggagacctaacaatctccaaattcaacgcgattgcgaatcttgtcccgaaatccgctagaaaatcagacgacgatctctacagagctatagacatcttcttgaaagctcatccgaatctagacgagatcgaaagggaaaaagtgtgtagctcaatggatcccttaaagctttcttacgacgcacgtcttcacgcttcacagaacaagagattaccagtaaacattgttcttcacgctctttactacgatcagttaaagctaagaagtggagtcgcagaacaagaagaaagagcagtagttgttctccctgaagctttaaagacacgtagccaactgcaagctgatactacgttagctaaagaaaacgaagcgttgagaagtgagctgatgaagatgaaaatgtatgtttcggatatgcagaagaataagaacggtgcaggagcttcttcttcgaattcgtcgtcgttggtgagtagtaagaagagcaaacatactttcttctcttctgtttccaagaaacttgggaagttaaatccgtttaaaaatgggtctaaggatacttcgcacatagatgaagatcttggaggtgttgacattactaagccaaggagacgaagattctcaatctcttaaaagaaaacgtttgatctaagtgcttttgtgtgttgtgtataactcttttagactagtgtgcttattgttcccttcttgatgcgtgatttttttttttgggtgtgtgtgtttattgtttaatgagcttggttaataaaatgaaaatcgaaaccagattgatttact

SEQ ID NO: 44265 - protein, 600 aa, Arabidopsis thaliana
  peptide (1)..(600): Ceres Seq. ID no. 12603623
FNREPKKMATEGKNPINMNSMSSSLARTGQWVFSQDIPTDVVVEVGEANFSLHKFMLVAKSNYIRKLIMESKDSDVTRINLSDIPGGPEIFEKAAKFCYGVNFEITVQNVAALHCAAEFLQMTDKYCDNNLAGRTQDFLSQVALSSLSGAIVVLKSCEILLPISRDLGIVRRCVDVVGAKACNEAMFPCRTPPNWWTEELCILDVDFFSDVVSSMKQRGVKPSSLASAIITYTEKSLRDLVRDHSGRGVKYSDPGDNESDERSQQRDLVQSIVSLLPSDKGLFPVNFLCSLLRCAVFLDTSLTCKNELEKRISVVLEHVSVDDLLIPSFTYDGERLLDLDSVRRIISAFVEKEKNVGVFNGGDFNRGVCSVSLQRVAKTVDSYLAEIATYGDLTISKFNAIANLVPKSARKSDDDLYRAIDIFLKAHPNLDEIEREKVCSSMDPLKLSYDARLHASQNKRLPVNIVLHALYYDQLKLRSGVAEQEERAVVVLPEALKTRSQLQADTTLAKENEALRSELMKMKMYVSDMQKNKNGAGASSSNSSSLVSSKKSKHTFFSSVSKKLGKLNPFKNGSKDTSHIDEDLGGVDITKPRRRRFSIS

SEQ ID NO: 44266 - protein, 593 aa, Arabidopsis thaliana
  peptide (1)..(593): Ceres Seq. ID no. 12603624
MATEGKNPINMNSMSSSLARTGQWVFSQDIPTDVVVEVGEANFSLHKFMLVAKSNYIRKLIMESKDSDVTRINLSDIPGGPEIFEKAAKFCYGVNFEITVQNVAALHCAAEFLQMTDKYCDNNLAGRTQDFLSQVALSSLSGAIVVLKSCEILLPISRDLGIVRRCVDVVGAKACNEAMFPCRTPPNWWTEELCILDVDFFSDVVSSMKQRGVKPSSLASAIITYTEKSLRDLVRDHSGRGVKYSDPGDNESDERSQQRDLVQSIVSLLPSDKGLFPVNFLCSLLRCAVFLDTSLTCKNELEKRISVVLEHVSVDDLLIPSFTYDGERLLDLDSVRRIISAFVEKEKNVGVFNGGDFNRGVCSVSLQRVAKTVDSYLAEIATYGDLTISKFNAIANLVPKSARKSDDDLYRAIDIFLKAHPNLDEIEREKVCSSMDPLKLSYDARLHASQNKRLPVNIVLHALYYDQLKLRSGVAEQEERAVVVLPEALKTRSQLQADTTLAKENEALRSELMKMKMYVSDMQKNKNGAGASSSNSSSLVSSKKSKHTFFSSVSKKLGKLNPFKNGSKDTSHIDEDLGGVDITKPRRRRFSIS

SEQ ID NO: 44267 - protein, 583 aa, Arabidopsis thaliana
  peptide (1)..(583): Ceres Seq. ID no. 12603625
MNSMSSSLARTGQWVFSQDIPTDVVVEVGEANFSLHKFMLVAKSNYIRKLIMESKDSDVTRINLSDIPGGPEIFEKAAKFCYGVNFEITVQNVAALHCAAEFLQMTDKYCDNNLAGRTQDFLSQVALSSLSGAIVVLKSCEILLPISRDLGIVRRCVDVVGAKACNEAMFPCRTPPNWWTEELCILDVDFFSDVVSSMKQRGVKPSSLASAIITYTEKSLRDLVRDHSGRGVKYSDPGDNESDERSQQRDLVQSIVSLLPSDKGLFPVNFLCSLLRCAVFLDTSLTCKNELEKRISVVLEHVSVDDLLIPSFTYDGERLLDLDSVRRIISAFVEKEKNVGVFNGGDFNRGVCSVSLQRVAKTVDSYLAEIATYGDLTISKFNAIANLVPKSARKSDDDLYRAIDIFLKAHPNLDEIEREKVCSSMDPLKLSYDARLHASQNKRLPVNIVLHALYYDQLKLRSGVAEQEERAVVVLPEALKTRSQLQADTTLAKENEALRSELMKMKMYVSDMQKNKNGAGASSSNSSSLVSSKKSKHTFFSSVSKKLGKLNPFKNGSKDTSHIDEDLGGVDITKPRRRRFSIS

SEQ ID NO: 44268 - DNA, 1488 bp, Arabidopsis thaliana; identical to SEQ ID NO: 38995
  misc_feature (1)..(1488): Ceres Seq. ID no. 13509260
  misc_feature (1)..(1488): Ortholog of  Ceres SEQ ID NO 15179641 as cited in SEQ ID NO 56414
  misc_feature (1)..(1488): Ortholog of  Ceres SEQ ID NO 14316049 as cited in SEQ ID NO 67036
  misc_feature (1)..(1488): Ortholog of  Ceres SEQ ID NO 14313252 as cited in SEQ ID NO 67134
  misc_feature (1)..(1488): Ortholog of  Ceres SEQ ID NO 14302220 as cited in SEQ ID NO 69121

SEQ ID NO: 44269 - protein, 338 aa, Arabidopsis thaliana; identical to SEQ ID NO: 22717
  peptide (1)..(338): Ceres Seq. ID no. 13509261

SEQ ID NO: 44270 - protein, 294 aa, Arabidopsis thaliana; identical to SEQ ID NO: 22718
  peptide (1)..(294): Ceres Seq. ID no. 13509262

SEQ ID NO: 44271 - protein, 291 aa, Arabidopsis thaliana; identical to SEQ ID NO: 22719
  peptide (1)..(291): Ceres Seq. ID no. 13509263

SEQ ID NO: 44272 - DNA, 1195 bp, Arabidopsis thaliana
  misc_feature (1)..(1195): Ceres Seq. ID no. 12466103
  misc_feature (1)..(1195): Ortholog of  Ceres SEQ ID NO 13581804 as cited in SEQ ID NO 51424
  misc_feature (1)..(1195): Ortholog of  Ceres SEQ ID NO 14310890 as cited in SEQ ID NO 54290
  misc_feature (1)..(1195): Ortholog of  Ceres SEQ ID NO 15169703 as cited in SEQ ID NO 59628
  misc_feature (1)..(1195): Ortholog of  Ceres SEQ ID NO 13663874 as cited in SEQ ID NO 67003
atcaagttcccatctttgtacacatctcttcattcaaaaactctacatttatatctctatatatgcagattccaagcttgtaataattcttgtcatcatgggtttttttcttgccttgtctctccagaaaacttaattttcacaattatgaattattttccttatttttgttactttcttctgtttgatgctctttccccatgaaagaaagaaagagaaagaaagatcacaagggttttatttggtcaccagattaagaattaggatgggaagaggaaagatagaaataaagaggatagagaactcaacaaatcgacaagtgacgttttgcaaaagaagaaatggacttctgaagaaagcctatgagctttcggtcctttgcgatgcagaagttgcgctcattgttttctccactcgtggccgtctctatgaatacgccaataacaacataagatcaaccattgagaggtacaagaaagcttgttctgatagcaccaacactagcactgtccaagaaatcaatgccgcgtactatcaacaagaatctgctaagctgagacaacagatccaaacgattcaaaactccaacaggaatctgatgggagactctttgagttccttaagtgtcaaggaactaaaacaagttgagaatcgccttgagaaagctatctctaggatcaggtccaagaagcatgagttgcttttagttgaaatcgaaaacgcgcagaaaagggagattgagcttgacaatgagaacatctatctaagaactaaggtagcagaagtggagaggtatcaacaacaccatcatcaaatggttagtggttcagagattaatgcaattgaagctttagcctcacgcaattactttgctcatagcattatgactgctggttctggatctggtaatggaggttcttactctgatcccgacaagaaaattcttcatctcggataatctcgtctgcgaaaaaccgagctgcaataactctctgcatgcatctggggattctttgctcagatttatctctacataaaatatgttttggtgcaaaataattcaaagtacaatgaaggtattggtccttcaagactcattgcaatttgtgttgtgtaatgattaagacatactctagtttttattgcttcgtatcatagtatctattctatggtatcttatttagtgattcatatg

SEQ ID NO: 44273 - protein, 256 aa, Arabidopsis thaliana
  peptide (1)..(256): Ceres Seq. ID no. 12466104
MLFPHERKKEKERSQGFYLVTRLRIRMGRGKIEIKRIENSTNRQVTFCKRRNGLLKKAYELSVLCDAEVALIVFSTRGRLYEYANNNIRSTIERYKKACSDSTNTSTVQEINAAYYQQESAKLRQQIQTIQNSNRNLMGDSLSSLSVKELKQVENRLEKAISRIRSKKHELLLVEIENAQKREIELDNENIYLRTKVAEVERYQQHHHQMVSGSEINAIEALASRNYFAHSIMTAGSGSGNGGSYSDPDKKILHLG

SEQ ID NO: 44274 - protein, 230 aa, Arabidopsis thaliana
  peptide (1)..(230): Ceres Seq. ID no. 12466105
MGRGKIEIKRIENSTNRQVTFCKRRNGLLKKAYELSVLCDAEVALIVFSTRGRLYEYANNNIRSTIERYKKACSDSTNTSTVQEINAAYYQQESAKLRQQIQTIQNSNRNLMGDSLSSLSVKELKQVENRLEKAISRIRSKKHELLLVEIENAQKREIELDNENIYLRTKVAEVERYQQHHHQMVSGSEINAIEALASRNYFAHSIMTAGSGSGNGGSYSDPDKKILHLG

SEQ ID NO: 44275 - DNA, 703 bp, Arabidopsis thaliana; identical to SEQ ID NO: 40829
  misc_feature (1)..(703): Ceres Seq. ID no. 12580344
  misc_feature (1)..(703): Ortholog of  Ceres SEQ ID NO 13582619 as cited in SEQ ID NO 56520
  misc_feature (1)..(703): Ortholog of  Ceres SEQ ID NO 12611392 as cited in SEQ ID NO 56826
  misc_feature (1)..(703): Ortholog of  Ceres SEQ ID NO 13660872 as cited in SEQ ID NO 60830
  misc_feature (1)..(703): Ortholog of  Ceres SEQ ID NO 12616221 as cited in SEQ ID NO 63291

SEQ ID NO: 44276 - protein, 179 aa, Arabidopsis thaliana; identical to SEQ ID NO: 40830
  peptide (1)..(179): Ceres Seq. ID no. 12580345

SEQ ID NO: 44277 - DNA, 816 bp, Arabidopsis thaliana
  misc_feature (1)..(816): Ceres Seq. ID no. 12466099
  misc_feature (1)..(816): Ortholog of  Ceres SEQ ID NO 13599568 as cited in SEQ ID NO 509
  misc_feature (1)..(816): Ortholog of  Ceres SEQ ID NO 15172903 as cited in SEQ ID NO 51839
  misc_feature (1)..(816): Ortholog of  Ceres SEQ ID NO 15177108 as cited in SEQ ID NO 52015
  misc_feature (1)..(816): Ortholog of  Ceres SEQ ID NO 13638595 as cited in SEQ ID NO 52050
  misc_feature (1)..(816): Ortholog of  Ceres SEQ ID NO 13594748 as cited in SEQ ID NO 52114
  misc_feature (1)..(816): Ortholog of  Ceres SEQ ID NO 15173596 as cited in SEQ ID NO 63267
  misc_feature (1)..(816): Ortholog of  Ceres SEQ ID NO 12583993 as cited in SEQ ID NO 68098
  misc_feature (1)..(816): Ortholog of  Ceres SEQ ID NO 13654535 as cited in SEQ ID NO 68227
atcattctcatcaaaagctatggctactctccaaataccttctgctcttttaagatctttccttcttatgttttgtctctttgtaatcccatctctctcatctgattctgatcctttacaagacttctgcgttggcgatctcaaagcttctgcttccatcaatggctttccatgcaaatcagccgtttctgcttctgacttcttctactccggtttaggtggccccttagacacgtcaaaccctaacggagtaaccgttgctcccgccaacgtcttaaccttcccgggtctaaacactttaggaatctcgatgaataacgttgagctagctccaggaggtgtaaatccgcctcacttgcacccgcgtgcaaccgaagtaggaactgtgatcgaaggctcggtgtttgtcggattcttgagtaccaacaacactttgttctcaaaagttttgaatgcaggagaggcgtttgttatccctagaggattggttcatttccaatggaacgttggccaagtgaaagcgcgaatgataaccgcttttaacagccagctcccaggagcagttgttttgcctagtactctgttcggctcgaaacctgagattccaaacgcagtcctgaccagagcgtttaggactgatgatacaactgtgcagaatctcaagtccaagtttgctgtttgaatctttttatttatgttttctaaaataatttttcacaataagctttatagcaatattggtatacacttgtctctgtaataatcggtatgaatattcgaaacaaaacaataataagattgatctctttctctctc

SEQ ID NO: 44278 - protein, 226 aa, Arabidopsis thaliana
  peptide (1)..(226): Ceres Seq. ID no. 12466100
SFSSKAMATLQIPSALLRSFLLMFCLFVIPSLSSDSDPLQDFCVGDLKASASINGFPCKSAVSASDFFYSGLGGPLDTSNPNGVTVAPANVLTFPGLNTLGISMNNVELAPGGVNPPHLHPRATEVGTVIEGSVFVGFLSTNNTLFSKVLNAGEAFVIPRGLVHFQWNVGQVKARMITAFNSQLPGAVVLPSTLFGSKPEIPNAVLTRAFRTDDTTVQNLKSKFAV

SEQ ID NO: 44279 - protein, 220 aa, Arabidopsis thaliana
  peptide (1)..(220): Ceres Seq. ID no. 12466101
MATLQIPSALLRSFLLMFCLFVIPSLSSDSDPLQDFCVGDLKASASINGFPCKSAVSASDFFYSGLGGPLDTSNPNGVTVAPANVLTFPGLNTLGISMNNVELAPGGVNPPHLHPRATEVGTVIEGSVFVGFLSTNNTLFSKVLNAGEAFVIPRGLVHFQWNVGQVKARMITAFNSQLPGAVVLPSTLFGSKPEIPNAVLTRAFRTDDTTVQNLKSKFAV

SEQ ID NO: 44280 - protein, 204 aa, Arabidopsis thaliana
  peptide (1)..(204): Ceres Seq. ID no. 12466102
MFCLFVIPSLSSDSDPLQDFCVGDLKASASINGFPCKSAVSASDFFYSGLGGPLDTSNPNGVTVAPANVLTFPGLNTLGISMNNVELAPGGVNPPHLHPRATEVGTVIEGSVFVGFLSTNNTLFSKVLNAGEAFVIPRGLVHFQWNVGQVKARMITAFNSQLPGAVVLPSTLFGSKPEIPNAVLTRAFRTDDTTVQNLKSKFAV

SEQ ID NO: 44281 - DNA, 1182 bp, Arabidopsis thaliana
  misc_feature (1)..(1182): Ceres Seq. ID no. 13509408
  misc_feature (1)..(1182): Ortholog of  Ceres SEQ ID NO 12610699 as cited in SEQ ID NO 55926
atgcaattaaaagccaatttcctccgcttcaaaatctcagtcgtgtgcgcacataaacctttaccaaaatcccagcaatcgatgattttccggcgattctccgggagatttctaactgcgatccccgactcttgtaaacttaaattcgaagctaaacggagtttccgatctgatgcggcgctcgaagccatagctaatgcattagaagagaaagtaccaaacttagtgttatacaattatccttccttctccggcgctttttcagctctcttcgctcatctctaccactatcgactccgtcttccttgtctcatcttacccttttcttccctcataccctttagggttgaagatttgtgtttggaggggtttgagaggtgttaccttctcgattttgttgttccaaaagattttgcttgccagaaaacagcttgcgagatcgtttgctttgatcatcggaactccgcattgaaaaggattggcttaataaaggaagagcacaagaagaggcttaagatttatgttgatactgaaactagtagctcaaaggctgtgtataaatatttctctagtaaactcacagatcaaagatcttctgaggtagaagctctcagtttgctaagtgtagaagacaaaactcgggttgaatcggttcttgattacattgaggatatcgatcttcggcgatggatgttaccagatatcaaagctttcagctttggtcttaaggattggcgctcaaggatcaattgtatcatcaatccttacatgtacgaacagttgttgaaaataagttcagcggatctcattgcgtatgggaattcgtatttttcatctcgtcttattgatgcaaagaaactgctaaagctgaataaagctttcaagattagattgggaagagggttatatggagagtgcctgggaatgcgcgcagatggtaaccatcaactaagcgatgaacttggcaagcttcttagtctacaaagttctgcagctggtctgaggcctataggagctgttacatttgtgcaaaggaataatctcaaaatgtgcttgagaagtaccgatgctataaccaatacatccgaagttgctaaggcttatggaggaggtggaacgtctagttcaagctcgtttatcataagaatggatgaatataatcaatggatttcgaagctttga

SEQ ID NO: 44282 - protein, 393 aa, Arabidopsis thaliana
  peptide (1)..(393): Ceres Seq. ID no. 13509409
MQLKANFLRFKISVVCAHKPLPKSQQSMIFRRFSGRFLTAIPDSCKLKFEAKRSFRSDAALEAIANALEEKVPNLVLYNYPSFSGAFSALFAHLYHYRLRLPCLILPFSSLIPFRVEDLCLEGFERCYLLDFVVPKDFACQKTACEIVCFDHRNSALKRIGLIKEEHKKRLKIYVDTETSSSKAVYKYFSSKLTDQRSSEVEALSLLSVEDKTRVESVLDYIEDIDLRRWMLPDIKAFSFGLKDWRSRINCIINPYMYEQLLKISSADLIAYGNSYFSSRLIDAKKLLKLNKAFKIRLGRGLYGECLGMRADGNHQLSDELGKLLSLQSSAAGLRPIGAVTFVQRNNLKMCLRSTDAITNTSEVAKAYGGGGTSSSSSFIIRMDEYNQWISKL

SEQ ID NO: 44283 - protein, 366 aa, Arabidopsis thaliana
  peptide (1)..(366): Ceres Seq. ID no. 13509410
MIFRRFSGRFLTAIPDSCKLKFEAKRSFRSDAALEAIANALEEKVPNLVLYNYPSFSGAFSALFAHLYHYRLRLPCLILPFSSLIPFRVEDLCLEGFERCYLLDFVVPKDFACQKTACEIVCFDHRNSALKRIGLIKEEHKKRLKIYVDTETSSSKAVYKYFSSKLTDQRSSEVEALSLLSVEDKTRVESVLDYIEDIDLRRWMLPDIKAFSFGLKDWRSRINCIINPYMYEQLLKISSADLIAYGNSYFSSRLIDAKKLLKLNKAFKIRLGRGLYGECLGMRADGNHQLSDELGKLLSLQSSAAGLRPIGAVTFVQRNNLKMCLRSTDAITNTSEVAKAYGGGGTSSSSSFIIRMDEYNQWISKL

SEQ ID NO: 44284 - DNA, 1332 bp, Arabidopsis thaliana; identical to SEQ ID NO: 25100
  misc_feature (1)..(1332): Ceres Seq. ID no. 12488506
  misc_feature (1)..(1332): Ortholog of  Ceres SEQ ID NO 15177676 as cited in SEQ ID NO 52631
  misc_feature (1)..(1332): Ortholog of  Ceres SEQ ID NO 14314212 as cited in SEQ ID NO 57401

SEQ ID NO: 44285 - protein, 386 aa, Arabidopsis thaliana; identical to SEQ ID NO: 25101
  peptide (1)..(386): Ceres Seq. ID no. 12488507

SEQ ID NO: 44286 - protein, 249 aa, Arabidopsis thaliana; identical to SEQ ID NO: 25102
  peptide (1)..(249): Ceres Seq. ID no. 12488508

SEQ ID NO: 44287 - protein, 215 aa, Arabidopsis thaliana; identical to SEQ ID NO: 25103
  peptide (1)..(215): Ceres Seq. ID no. 12488509

SEQ ID NO: 44288 - DNA, 546 bp, Arabidopsis thaliana; identical to SEQ ID NO: 43233
  misc_feature (1)..(546): Ceres Seq. ID no. 12481728
  misc_feature (1)..(546): Ortholog of  Ceres SEQ ID NO 13594525 as cited in SEQ ID NO 51190
  misc_feature (1)..(546): Ortholog of  Ceres SEQ ID NO 13596039 as cited in SEQ ID NO 62117

SEQ ID NO: 44289 - protein, 137 aa, Arabidopsis thaliana; identical to SEQ ID NO: 43234
  peptide (1)..(137): Ceres Seq. ID no. 12481729

SEQ ID NO: 44290 - protein, 128 aa, Arabidopsis thaliana; identical to SEQ ID NO: 26134
  peptide (1)..(128): Ceres Seq. ID no. 12481730

SEQ ID NO: 44291 - DNA, 1429 bp, Arabidopsis thaliana
  misc_feature (1)..(1429): Ceres Seq. ID no. 13646310
  misc_feature (1)..(1429): Ortholog of  Ceres SEQ ID NO 15176911 as cited in SEQ ID NO 54868
  misc_feature (1)..(1429): Ortholog of  Ceres SEQ ID NO 13596433 as cited in SEQ ID NO 68721
  misc_feature (1)..(1429): Ortholog of  Ceres SEQ ID NO 13599169 as cited in SEQ ID NO 0
ataaatattgattccagtgaatctcttaatgtcatcaagatcagaagacaatttttatttttcatcaagtttcttagatcatcaggttgattggtactctaatcagtgtgattgtaaatggcgtctaattcttctaacgggacgacgacgacaaagccaccacctatgccgtctcctctgcgtaattccaagttttttcagtcgaatatgaggatcttggtgaccggaggagctggattcattggttcacatctcgttgataaattgatccaaaacgaaaagaatgaagtaatcgttgcggataattacttcacaggatcaaaagacaatctcaagaaatggattggtcatccaagatttgagctaattcgtcatgatgtgactgaacctcttttcgtcgaggttgatcaaatctaccatttagcatgtcccgcttctccaattttctacaaatacaaccccgttaagacgataaaaacaaatgtgattggcacacttaacatgttaggactagctaagcgagttggagcaagaattttacttacttccacatctgaagtgtatggtgatcctttggttcaccctcaaaccgagagctattggggaaatgtaaacccgatcggtgttagaagctgttatgatgaaggaaaacgtgttgccgagactcttatgtttgattaccataggcaacatgggattgagatacgcatagcgaggatattcaacacatatggtcctcgtatgaacattgatgatggtcgcgttgtgagcaacttcattgctcaggctctcaggggagaagctctgactgttcagaaaccgggaacacaaacccgcagtttctgttatgtttcggacatggtggaaggtctaatgcgtttgatggaaggagaccaaaccggaccgataaacataggcaatccaggcgaattcacgatggttgagctcgctgagacggttaaagagcttattaaaccggacgtggagataaagatggtagagaacacacctgatgatccaaggcagaggaaaccagacataagcaaagctaaagaagttcttggttgggaaccaaaggtgaagctacgtgaggggcttcctcttatggaagaagattttcgtctaaggcttggtgttccgaagaagtaaaacttattttccaaaaaaaagaagaagaaaaataattgctattttaatttcatggaattgtgtggtcttatcattttgtttgtttgtttgaaatcggggttccaagtcgaagcaagtgcacacatatccccggaacatgtggagcatgtcttttaatctttctctttgcattttgagtttgtaggaaataagcgtcctaacgaggaacattttagggaagtgatgttacgttactacttgaattttattatgaatgtaatcagtgagatgttttaagctt

SEQ ID NO: 44292 - protein, 343 aa, Arabidopsis thaliana
  peptide (1)..(343): Ceres Seq. ID no. 13646311
MASNSSNGTTTTKPPPMPSPLRNSKFFQSNMRILVTGGAGFIGSHLVDKLIQNEKNEVIVADNYFTGSKDNLKKWIGHPRFELIRHDVTEPLFVEVDQIYHLACPASPIFYKYNPVKTIKTNVIGTLNMLGLAKRVGARILLTSTSEVYGDPLVHPQTESYWGNVNPIGVRSCYDEGKRVAETLMFDYHRQHGIEIRIARIFNTYGPRMNIDDGRVVSNFIAQALRGEALTVQKPGTQTRSFCYVSDMVEGLMRLMEGDQTGPINIGNPGEFTMVELAETVKELIKPDVEIKMVENTPDDPRQRKPDISKAKEVLGWEPKVKLREGLPLMEEDFRLRLGVPKK

SEQ ID NO: 44293 - protein, 327 aa, Arabidopsis thaliana
  peptide (1)..(327): Ceres Seq. ID no. 13646312
MPSPLRNSKFFQSNMRILVTGGAGFIGSHLVDKLIQNEKNEVIVADNYFTGSKDNLKKWIGHPRFELIRHDVTEPLFVEVDQIYHLACPASPIFYKYNPVKTIKTNVIGTLNMLGLAKRVGARILLTSTSEVYGDPLVHPQTESYWGNVNPIGVRSCYDEGKRVAETLMFDYHRQHGIEIRIARIFNTYGPRMNIDDGRVVSNFIAQALRGEALTVQKPGTQTRSFCYVSDMVEGLMRLMEGDQTGPINIGNPGEFTMVELAETVKELIKPDVEIKMVENTPDDPRQRKPDISKAKEVLGWEPKVKLREGLPLMEEDFRLRLGVPKK

SEQ ID NO: 44294 - protein, 313 aa, Arabidopsis thaliana
  peptide (1)..(313): Ceres Seq. ID no. 13646313
MRILVTGGAGFIGSHLVDKLIQNEKNEVIVADNYFTGSKDNLKKWIGHPRFELIRHDVTEPLFVEVDQIYHLACPASPIFYKYNPVKTIKTNVIGTLNMLGLAKRVGARILLTSTSEVYGDPLVHPQTESYWGNVNPIGVRSCYDEGKRVAETLMFDYHRQHGIEIRIARIFNTYGPRMNIDDGRVVSNFIAQALRGEALTVQKPGTQTRSFCYVSDMVEGLMRLMEGDQTGPINIGNPGEFTMVELAETVKELIKPDVEIKMVENTPDDPRQRKPDISKAKEVLGWEPKVKLREGLPLMEEDFRLRLGVPKK

SEQ ID NO: 44295 - DNA, 1959 bp, Arabidopsis thaliana
  misc_feature (1)..(1959): Ceres Seq. ID no. 12488810
  misc_feature (1)..(1959): Ortholog of  Ceres SEQ ID NO 14308221 as cited in SEQ ID NO 60363
aaaaaattacataataaatagagaagagattttggaagagagaaaatgcaatttagctcctcacgtattagcaatttaagttcttgtcttggtcttccctcgatttcaaacgacattaaccaaaaccagagaactacgaattattcgctaaaaaaagatggattcttgttgcaactttagcttggggacaaaaactgtcttggccaaagacagtttcaagaatgtagagaacaaatttttgggtgagaagatcaaaggaagcgtcttgaagcctttttcttcagatttgagttccaagaagttcagaaatcgaaaattgaggcccggtgttgcttacgctattgctacctcaaagaatgctaaagaggctttgaaaaatcaaccttccatgtttgagagaagaagagcagatcctaaaaatgtggctgcaatcattctaggaggaggcgatggagctaaactctttcctcttaccaagcgagcagcaacacctgctgttcctgtgggtggatgctataggatgatcgatatcccgatgagtaattgcattaacagttgcataaacaagattttcgtgctgactcagtttaactcggcttccctcaatcgccatttggctcgtacttattttgggaatggcataaactttggagatggttttgttgaggttctggctgctacacaaactcctggtgaagccgggaaaaagtggtttcaaggcacagctgatgctgtgagaaaatttctgtgggtgtttgaggatgctaagaacaggaacattgagaatataatcatcttgtctggagatcacctatatagaatgaactatatggactttgttcagcaccatgtcgatagtaaagccgatattactctttcgtgcgcgccggttgatgagagccgtgcgtcggagtatggactggtcaatattgatcgaagcgggcgtgtagtccatttctctgagaaaccaactggcatcgatctgaaatcaatgcaaaccgatactactatgcatggactgtctcatcaagaagcagcaaaatctccatacattgcgtcaatgggagtttattgtttcaaaaccgaagctttactgaagcttctgacatggcggtatccgagttccaatgactttgggtctgaaattattcctgcagctataaaagatcacaatgttcaaggatacatctacagagactattgggaagacatcggaactattaagagtttctatgaagctaatattgctcttgtcgaggagcatcccaagtttgagttttacgatcagaatacacctttctacacttctcctcggtttctaccacccaccaaaaccgagaagtgccggattgtaaattcggtaatctcacacggatgtttcttgggagaatgcagcatccaacgttccattattggtgaaagatcacgtcttgactatggtgttgagcttcaggatactcttatgttaggagcggatagttaccaaaccgaatctgagatcgcgtctctgcttgcggaaggaaatgttccaattggcattggccgagatacaaagatcaggaaatgcatcattgacaagaatgcaaagatcgggaaaaacgtggtgatcatgaacaaagatgatgttaaggaggctgataggccagaggaaggattctacattcgatctggaatcactgtggttgtcgaaaaggccaccattaaagacggtactgtgatatgaacaaaacgatctcaagaccgccgtggtgattttgaggtgtttggccggaagttaaaaagagagaccgttgtgattttgtcatgtaaattagaagaggagatagaagaatcatacaatttagaagcaaaagcaagtttaagctttacaataagagtgatcagccgatcacctatagctataatagtcactctcttttcataatgatcaataaataaagctatctatcttcttctgtt

SEQ ID NO: 44296 - protein, 521 aa, Arabidopsis thaliana
  peptide (1)..(521): Ceres Seq. ID no. 12488811
MDSCCNFSLGTKTVLAKDSFKNVENKFLGEKIKGSVLKPFSSDLSSKKFRNRKLRPGVAYAIATSKNAKEALKNQPSMFERRRADPKNVAAIILGGGDGAKLFPLTKRAATPAVPVGGCYRMIDIPMSNCINSCINKIFVLTQFNSASLNRHLARTYFGNGINFGDGFVEVLAATQTPGEAGKKWFQGTADAVRKFLWVFEDAKNRNIENIIILSGDHLYRMNYMDFVQHHVDSKADITLSCAPVDESRASEYGLVNIDRSGRVVHFSEKPTGIDLKSMQTDTTMHGLSHQEAAKSPYIASMGVYCFKTEALLKLLTWRYPSSNDFGSEIIPAAIKDHNVQGYIYRDYWEDIGTIKSFYEANIALVEEHPKFEFYDQNTPFYTSPRFLPPTKTEKCRIVNSVISHGCFLGECSIQRSIIGERSRLDYGVELQDTLMLGADSYQTESEIASLLAEGNVPIGIGRDTKIRKCIIDKNAKIGKNVVIMNKDDVKEADRPEEGFYIRSGITVVVEKATIKDGTVI

SEQ ID NO: 44297 - protein, 444 aa, Arabidopsis thaliana
  peptide (1)..(444): Ceres Seq. ID no. 12488812
MFERRRADPKNVAAIILGGGDGAKLFPLTKRAATPAVPVGGCYRMIDIPMSNCINSCINKIFVLTQFNSASLNRHLARTYFGNGINFGDGFVEVLAATQTPGEAGKKWFQGTADAVRKFLWVFEDAKNRNIENIIILSGDHLYRMNYMDFVQHHVDSKADITLSCAPVDESRASEYGLVNIDRSGRVVHFSEKPTGIDLKSMQTDTTMHGLSHQEAAKSPYIASMGVYCFKTEALLKLLTWRYPSSNDFGSEIIPAAIKDHNVQGYIYRDYWEDIGTIKSFYEANIALVEEHPKFEFYDQNTPFYTSPRFLPPTKTEKCRIVNSVISHGCFLGECSIQRSIIGERSRLDYGVELQDTLMLGADSYQTESEIASLLAEGNVPIGIGRDTKIRKCIIDKNAKIGKNVVIMNKDDVKEADRPEEGFYIRSGITVVVEKATIKDGTVI

SEQ ID NO: 44298 - protein, 400 aa, Arabidopsis thaliana
  peptide (1)..(400): Ceres Seq. ID no. 12488813
MIDIPMSNCINSCINKIFVLTQFNSASLNRHLARTYFGNGINFGDGFVEVLAATQTPGEAGKKWFQGTADAVRKFLWVFEDAKNRNIENIIILSGDHLYRMNYMDFVQHHVDSKADITLSCAPVDESRASEYGLVNIDRSGRVVHFSEKPTGIDLKSMQTDTTMHGLSHQEAAKSPYIASMGVYCFKTEALLKLLTWRYPSSNDFGSEIIPAAIKDHNVQGYIYRDYWEDIGTIKSFYEANIALVEEHPKFEFYDQNTPFYTSPRFLPPTKTEKCRIVNSVISHGCFLGECSIQRSIIGERSRLDYGVELQDTLMLGADSYQTESEIASLLAEGNVPIGIGRDTKIRKCIIDKNAKIGKNVVIMNKDDVKEADRPEEGFYIRSGITVVVEKATIKDGTVI

SEQ ID NO: 44299 - DNA, 1642 bp, Arabidopsis thaliana
  misc_feature (1)..(1642): Ceres Seq. ID no. 14304412
  misc_feature (1)..(1642): Ortholog of  Ceres SEQ ID NO 14308003 as cited in SEQ ID NO 65919
  misc_feature (1)..(1642): Ortholog of  Ceres SEQ ID NO 14303087 as cited in SEQ ID NO 66569
aagtattccaaaagaagaagaagaaataccttctcaattttctctaatggctctgataaccttacttgaagtctcaatttctttactctttttctccttcctttacggatatttcttgattagcaagaaacctcaccgttcgtttctcaccaactggccatttctcggtatgcttccgggtttactcgtggagatccctcgtgtttacgactttgtaaccgagcttctcgaggcctcaaacttaacttatcctttcaaaggtccatgtttagggggccttgacatgttgatcaccgttgatccggctaatatccatcacatcatgagctcaaacttcgcgaattacccgaaaggaaccgagttcaagaagatattcgatgttttgggagatgggattttcaacgcggattcggagttatggaaagatctgaggaaatcagctcaaagcatgatgactcatcaagattttcaaaggtttacactaagaacaatcatgagtaagctagagaaagggcttgtcccacttcttgattacgttgctgaaaagaaacaagtcgttgacttacaagatgtgttccaaagatttacgttcgacacttcgtttgttttagcgaccggggttgacccgggttgtctctcgactgaaatgccgcaaatcgagtttgctagagctttagacgaagcagaggaagcaattttcttcaggcatgtgaagccagagattgtttggaagatgcagaggtttattgggtttggagatgagttgaaaatgaagaaagctcactcgacattcgaccgagtttgctctaaatgcatagcttctaagagagatgaaataaccaatggggttataaacattgactcttcttctaaagatttgttgatgtgctacatgaatgtggatacaaccaagtacaagttgttgaatccaagtgatgacaaattccttagagacatgatcttaagcttcatgttagctggtagagacaccacaagctctgctctcacttggttcttttggcttctctctaagaacccaaaagccataaccaagattcgtcaagaaatcaacacacaactatctccaagaaccaatgattttgattcattcaatgctcaagagttaaacaagttggtgtatttacatggagcattgtgtgaagcccttaggctatatccaccggttccatttcagcacaagtctcctacaaaatccgacgttcttccaagtggacacagagtcgatgcgagttcgaagattgtgttctgtctttactcattagggagaatgaaatcagtttggggagaagatgcatcggaatttaaaccggagagatggatttcagagagtggaaggttgattcacgtgccttcttttaagttcttatcgtttaatgccggtccaaggacttgtttggggaaagaagtggctatgacacagatgaagacagtggctgtgaaaattatacaaaactatgagataaaggtcgttgaaggacacaagatcgagccagttccttctattattcttcacatgaagcatggtcttaaagttacagtcactaagagatctaatttgctctgaatattatgcattactattgtactacatttagtatgaaaataattattagaattttac

SEQ ID NO: 44300 - protein, 527 aa, Arabidopsis thaliana
  peptide (1)..(527): Ceres Seq. ID no. 14304413
SIPKEEEEIPSQFSLMALITLLEVSISLLFFSFLYGYFLISKKPHRSFLTNWPFLGMLPGLLVEIPRVYDFVTELLEASNLTYPFKGPCLGGLDMLITVDPANIHHIMSSNFANYPKGTEFKKIFDVLGDGIFNADSELWKDLRKSAQSMMTHQDFQRFTLRTIMSKLEKGLVPLLDYVAEKKQVVDLQDVFQRFTFDTSFVLATGVDPGCLSTEMPQIEFARALDEAEEAIFFRHVKPEIVWKMQRFIGFGDELKMKKAHSTFDRVCSKCIASKRDEITNGVINIDSSSKDLLMCYMNVDTTKYKLLNPSDDKFLRDMILSFMLAGRDTTSSALTWFFWLLSKNPKAITKIRQEINTQLSPRTNDFDSFNAQELNKLVYLHGALCEALRLYPPVPFQHKSPTKSDVLPSGHRVDASSKIVFCLYSLGRMKSVWGEDASEFKPERWISESGRLIHVPSFKFLSFNAGPRTCLGKEVAMTQMKTVAVKIIQNYEIKVVEGHKIEPVPSIILHMKHGLKVTVTKRSNLL

SEQ ID NO: 44301 - protein, 512 aa, Arabidopsis thaliana
  peptide (1)..(512): Ceres Seq. ID no. 14304414
MALITLLEVSISLLFFSFLYGYFLISKKPHRSFLTNWPFLGMLPGLLVEIPRVYDFVTELLEASNLTYPFKGPCLGGLDMLITVDPANIHHIMSSNFANYPKGTEFKKIFDVLGDGIFNADSELWKDLRKSAQSMMTHQDFQRFTLRTIMSKLEKGLVPLLDYVAEKKQVVDLQDVFQRFTFDTSFVLATGVDPGCLSTEMPQIEFARALDEAEEAIFFRHVKPEIVWKMQRFIGFGDELKMKKAHSTFDRVCSKCIASKRDEITNGVINIDSSSKDLLMCYMNVDTTKYKLLNPSDDKFLRDMILSFMLAGRDTTSSALTWFFWLLSKNPKAITKIRQEINTQLSPRTNDFDSFNAQELNKLVYLHGALCEALRLYPPVPFQHKSPTKSDVLPSGHRVDASSKIVFCLYSLGRMKSVWGEDASEFKPERWISESGRLIHVPSFKFLSFNAGPRTCLGKEVAMTQMKTVAVKIIQNYEIKVVEGHKIEPVPSIILHMKHGLKVTVTKRSNLL

SEQ ID NO: 44302 - protein, 471 aa, Arabidopsis thaliana
  peptide (1)..(471): Ceres Seq. ID no. 14304415
MLPGLLVEIPRVYDFVTELLEASNLTYPFKGPCLGGLDMLITVDPANIHHIMSSNFANYPKGTEFKKIFDVLGDGIFNADSELWKDLRKSAQSMMTHQDFQRFTLRTIMSKLEKGLVPLLDYVAEKKQVVDLQDVFQRFTFDTSFVLATGVDPGCLSTEMPQIEFARALDEAEEAIFFRHVKPEIVWKMQRFIGFGDELKMKKAHSTFDRVCSKCIASKRDEITNGVINIDSSSKDLLMCYMNVDTTKYKLLNPSDDKFLRDMILSFMLAGRDTTSSALTWFFWLLSKNPKAITKIRQEINTQLSPRTNDFDSFNAQELNKLVYLHGALCEALRLYPPVPFQHKSPTKSDVLPSGHRVDASSKIVFCLYSLGRMKSVWGEDASEFKPERWISESGRLIHVPSFKFLSFNAGPRTCLGKEVAMTQMKTVAVKIIQNYEIKVVEGHKIEPVPSIILHMKHGLKVTVTKRSNLL

SEQ ID NO: 44303 - DNA, 1449 bp, Arabidopsis thaliana
  misc_feature (1)..(1449): Ceres Seq. ID no. 13509793
  misc_feature (1)..(1449): Ortholog of  Ceres SEQ ID NO 13623732 as cited in SEQ ID NO 0
accaacaacaacaactccactaaaaaattcatagctctacaagagtcacctcatagagaagtgaagagacagagatagttgtgacagagagattcatggcggaagcttgcggagtgagaaggatgaagctgggaagccaaggccttgaggtatctgcgcaaggccttggttgcatgggcctctccgctttctacggtgctcccaagccggaaaatgaagccatcgctctcatccaccacgctattcactccggcgttactctccttgacacctccgatatctacggccctgagaccaatgaagttctcctcggaaaggctctcaaggatggggtgagagaaaaagtggaacttgcgaccaaatttggaatcagttatgcagaggggaaaagagaggtcagaggagatcctgaatatgtaagggctgcttgtgaggcaagtttaaagaggctagatattgcctgcatcgatctctattatcagcatcgtgtcgatactcgtgtccctatcgaaatcactatgggagaactgaagaagctggttgaagagggtaaaataaagtacattggtttgtctgaagcctctgcctcaactatcagaagagcacatgctgttcacccaattactgccgtgcagatagaatggtccttgtggacgagagatgtggaagaagaaatcattccgacctgcagggaacttgggattgggattgttgcttacagtcctctaggacgaggtttcttcgcatctggacccaagcttgttgagaacctagaaaaggatgacttcagaaaggctctaccaagattccaagaggaaaacttagaccacaacaagattgtttatgaaaaagtttgtgcaatatcggagaagaaagggtgcactcctggacaactagccctggcatgggttcatcaccagggagatgacgtttgccctatcccaggaaccactaagatcgagaacctcaaacagaacattggagctttgtcagtgaaactcactcctgaagagatgactgagcttgaggccattgcccaaccaggttttgtgaaaggagatagatacagtaacatgataccaactttcaagaacgctgagacaccaccattgtctgcttggaaagccgcttaaaaccggctgaagtttctacggttgtggtggtgcatcatgacattgaagtggtcttaactttctgtcagctagatcagtgtgttggggaataatggtgcgtcttcgagagtagagtatcattcccacggaaacccaagtatcatggttaatgccttgaagaataaataatgtagagttccccaagtgaaaacttcaattttacatttccatacattgtaaccaaactctataaataaagtgttgtgatacataccttaccaaaaaaggctatctatattgtaaaattcatcttctactcaataacttgtgcttctct

SEQ ID NO: 44304 - protein, 345 aa, Arabidopsis thaliana; identical to SEQ ID NO: 28593
  peptide (1)..(345): Ceres Seq. ID no. 13509794

SEQ ID NO: 44305 - protein, 336 aa, Arabidopsis thaliana; identical to SEQ ID NO: 28594
  peptide (1)..(336): Ceres Seq. ID no. 13509795

SEQ ID NO: 44306 - protein, 319 aa, Arabidopsis thaliana; identical to SEQ ID NO: 28595
  peptide (1)..(319): Ceres Seq. ID no. 13509796

SEQ ID NO: 44307 - DNA, 787 bp, Arabidopsis thaliana
  misc_feature (1)..(787): Ceres Seq. ID no. 12466093
  misc_feature (1)..(787): Ortholog of  Ceres SEQ ID NO 13662054 as cited in SEQ ID NO 61539
  misc_feature (1)..(787): Ortholog of  Ceres SEQ ID NO 13663665 as cited in SEQ ID NO 67230
  misc_feature (1)..(787): Ortholog of  Ceres SEQ ID NO 15174315 as cited in SEQ ID NO 0
acacatccgacggggaaaaagagttccgacaagaatcgagaactgaaagatttgtcatttgtctctcaaatgtctgtggagagaagagaaattggaataaagaagacagtgttgtgagagagagagagagagagagagatgagttcgtctctacctctgaggctacttcttcctcttacaacttctctgatttctcctcctcctcctcctccagattctttccatgctccttcgtcgttcagatcgaaaaaccctaatttcaaacgccgattgtcttcttcttcctggttaaccaaaaatcatatatacacatcaggtgcatctggaactaatgctgcagtcatcagaggtgcattgagagcagagagaccagagctgcttacagtaattctaccccaaagtttgaaaaaacaacctcctgagagccaagaactattgtctaaagtacaaaacgtggtagaaaagccacataatgaccatttgccattgttagaagccagcaggttgtgtaatatggacatcatatcacaagttcaacaagtgatctgcttcgcgtttcatgacagtaagcttcttatggagacatgtcaagaagccaaaaatntgcgcaagattgtcactctcttctacctcgattgattcacattcactctttattttcttctcgttacaaaacagagaagataatcctccttgtaaattatgaatcttgattaaacaaacacacacaaccacaattatattcttttgtctaaattttgatacacatcagtgctatttttatagg

SEQ ID NO: 44308 - protein, 166 aa, Arabidopsis thaliana
  peptide (1)..(166): Ceres Seq. ID no. 12466094
  misc_feature (156)..(156): Xaa is any aa, unknown or other
MSSSLPLRLLLPLTTSLISPPPPPPDSFHAPSSFRSKNPNFKRRLSSSSWLTKNHIYTSGASGTNAAVIRGALRAERPELLTVILPQSLKKQPPESQELLSKVQNVVEKPHNDHLPLLEASRLCNMDIISQVQQVICFAFHDSKLLMETCQEAKNXRKIVTLFYLD

SEQ ID NO: 44309 - protein, 84 aa, Arabidopsis thaliana
  peptide (1)..(84): Ceres Seq. ID no. 12466095
TSDGEKEFRQESRTERFVICLSNVCGEKRNWNKEDSVVRERERERDEFVSTSEATSSSYNFSDFSSSSSSRFFPCSFVVQIEKP

SEQ ID NO: 44310 - DNA, 1035 bp, Arabidopsis thaliana; identical to SEQ ID NO: 43907
  misc_feature (1)..(1035): Ceres Seq. ID no. 12488601
  misc_feature (1)..(1035): Ortholog of  Ceres SEQ ID NO 13596762 as cited in SEQ ID NO 63019

SEQ ID NO: 44311 - protein, 270 aa, Arabidopsis thaliana; identical to SEQ ID NO: 43908
  peptide (1)..(270): Ceres Seq. ID no. 12488602

SEQ ID NO: 44312 - protein, 219 aa, Arabidopsis thaliana; identical to SEQ ID NO: 43909
  peptide (1)..(219): Ceres Seq. ID no. 12488603

SEQ ID NO: 44313 - protein, 172 aa, Arabidopsis thaliana; identical to SEQ ID NO: 43910
  peptide (1)..(172): Ceres Seq. ID no. 12488604

SEQ ID NO: 44314 - DNA, 3250 bp, Arabidopsis thaliana
  misc_feature (1)..(3250): Ceres Seq. ID no. 13509447
  misc_feature (1)..(3250): Ortholog of  Ceres SEQ ID NO 15177692 as cited in SEQ ID NO 52664
  misc_feature (1)..(3250): Ortholog of  Ceres SEQ ID NO 14303959 as cited in SEQ ID NO 53709
aaaacaaaaattacacaaaaatcaaaacttttactttttatttctcctctctggatcttcctcttcaaagctcaaggccattagggtttatctgagctccaaaatcaccctaattctagtgtatttctcagcaagcaagcttcttctttttttgtcctgggtaactgtgattgttgcaggatcttgtgtagaaacagatcacaagaagatgaatgataactcggtggtgcggctttgattatcttcagagattttagattctgtatccactctgttgcgatggggtcgtttgcaggcgcttgtgagattgtggaagagaaggatgatgaagtaagattgccaaaacattccgggagatatggtaaatcggttatgggatcatcaagtaaggatttggtggagcgtaagcaacgagagtatcatggttctcttgagtatgacattgatatgctttttcagtctatttctgttaaaccatctactacgaggttgatgagttcttctttccatcatcatgagacgagcgcgagtgccggtccaagcaggaccacaagcccttcgaagagaattgcgtccatgaaaaaaccagggacacctcagtctcctagatttgttggtctctctgattcagtttctttgaagcaggctcttagggatcgttgcatttctaaggcgtcggaaatggctgctcagaaacggttgtcgaaatctgctgctgcatctccgagggtctcagaagctgacaggataaagagtttgtataaccaagtttcgaatgaatctactagcagcaggtctgggcttgttcctgtggacaagggtaaaggaagtttggttgagatacctttgatgcctgtaaacgataaaccaagctcttcaaagagcgtacctcaacggtttgaagatccttctaaccccatttctgagccatctcaagctggaaccagttttggattacaaggagtggggaatcaaacgcgggagattaagctgttgcatagatccaacaaacctgggtcttgtcttagttctggcagtggagattatgagatagagttagatgaaaatgttgcgtctccttccactcatgcatttgttgaagatgatgtgatagaaatagacaaacacgttacttcactgccatctcactctagcaagaaagtcaatgcgacggagcttgacaagaatatttcctcatctgctgtagactcagagcagaaagggaagttggatgatgcacctaattcagggacagagaatggcaaaacagtacggaaggtaacaagaatgattccacgtcccaaacaaccgaaaaagaaaattttgcttaagaagaagttaaaaatcggggttgtgtcagcaacttacccaacaaaagacgatgaagaaattgttccttccttggactctagtgccaatcaacttctctgccagagatgtcactgttcgttgaagagcaccagcatcgatgacaacccaccttcatatacttctagtcataatcctaagatttgcacagatagtttgagctctgtttcaaataaagaagctcatcaaggatctgacgagaactcctctggctcgtgtaatgtcagtcaaagctctgaagctgacattgtcataatgaaacaagatgtttcctctagcaataatagtggaatcggtgcaatggtagaaaaagaaaccgagaatccgacttccagtgagaaattcgagttctctctgagttcaaaagatagtcttggggattatagcaggagcacaagcattagtgaggagagtaatctgagccgatttagctgtgggaataagcctcacatgtcgatggatgtgagatgggaagcgattaagcatatcaaggttcaatacggctctttgggtttacgacacttcaaccttctgaagaaacttggttgtggagatataggaacagtctatctcgccgagctgattggtacaaactgtttgtttgccataaaggttatggacaacgagttcttggcgagaaggaaaaagtctccccgggcacaagcagaaagagaaatacttaaaatgttggaccatccttttcttcctacattatacgcgcaatttacttcggataatttatcttgtctagtcatggaatattgtcctggaggagatcttcatgtcctcagacagaagcagctaggccggtgtttccctgaacctgcagcaagattctatgtggccgaaattctccttgcactggagtacttacacatgcttggtatcatataccgagatctgaaaccggaaaacattcttgtccgtgaagatggacacattatgcttacggattttgacctctcactccgttgtgcagtgaacccgactcttgtcaggtcaaactctccacctggtaaagatcccgcaaggatttcaggtccatacaacacatccaactgcatacaaccattctgtatcaccgaaccatcttgccaggtttcgtgtttcagccctaggctctcctcaaaccaacaacaaggtagaaaaccaaaaaggggtgatcatctttcgaaaacccaacaacacttgagtagatcattgcctcagctcgtggctgaaccaaccgaagcaagatccaattcctttgtgggaacacacgagtacctagccccagagatcatcaaaggagaaggacatggcgctgcagttgactggtggactttcggggttctcctttacgagcttttatacgggaaaacaccattcaaaggttacaacaacgacgagactttggccaatgttgtgttacagaacctcaagtttcctgatagcccgcttgtaagcttccaggcaaaagacttgatcaggggacttcttgttaaggaaccagagaacaggctcgggtcagagaaaggttctgtagagatcaaaagacatcctttttttgaaggattgaattgggctctgatccggtgtgcaatcccgcctgagctaccggatttctatgagtatggtggtggaccagaggcagcggcggattcgcctggaggcagtaataataggtatcttgaatgtaaagccataggcgatcatcttgagttcgagttgttttaagcaagacatagatattctctggtataagcattcagagtaatcgttgttgtaagttattatatctaagttaaatctaaatgtcttatatgtaaatttagcgttctctgagacataatctcatatagtattctcaaaaatatatatgctccttcgtatctcaattttt

SEQ ID NO: 44315 - protein, 934 aa, Arabidopsis thaliana
  peptide (1)..(934): Ceres Seq. ID no. 13509448
MGSFAGACEIVEEKDDEVRLPKHSGRYGKSVMGSSSKDLVERKQREYHGSLEYDIDMLFQSISVKPSTTRLMSSSFHHHETSASAGPSRTTSPSKRIASMKKPGTPQSPRFVGLSDSVSLKQALRDRCISKASEMAAQKRLSKSAAASPRVSEADRIKSLYNQVSNESTSSRSGLVPVDKGKGSLVEIPLMPVNDKPSSSKSVPQRFEDPSNPISEPSQAGTSFGLQGVGNQTREIKLLHRSNKPGSCLSSGSGDYEIELDENVASPSTHAFVEDDVIEIDKHVTSLPSHSSKKVNATELDKNISSSAVDSEQKGKLDDAPNSGTENGKTVRKVTRMIPRPKQPKKKILLKKKLKIGVVSATYPTKDDEEIVPSLDSSANQLLCQRCHCSLKSTSIDDNPPSYTSSHNPKICTDSLSSVSNKEAHQGSDENSSGSCNVSQSSEADIVIMKQDVSSSNNSGIGAMVEKETENPTSSEKFEFSLSSKDSLGDYSRSTSISEESNLSRFSCGNKPHMSMDVRWEAIKHIKVQYGSLGLRHFNLLKKLGCGDIGTVYLAELIGTNCLFAIKVMDNEFLARRKKSPRAQAEREILKMLDHPFLPTLYAQFTSDNLSCLVMEYCPGGDLHVLRQKQLGRCFPEPAARFYVAEILLALEYLHMLGIIYRDLKPENILVREDGHIMLTDFDLSLRCAVNPTLVRSNSPPGKDPARISGPYNTSNCIQPFCITEPSCQVSCFSPRLSSNQQQGRKPKRGDHLSKTQQHLSRSLPQLVAEPTEARSNSFVGTHEYLAPEIIKGEGHGAAVDWWTFGVLLYELLYGKTPFKGYNNDETLANVVLQNLKFPDSPLVSFQAKDLIRGLLVKEPENRLGSEKGSVEIKRHPFFEGLNWALIRCAIPPELPDFYEYGGGPEAAADSPGGSNNRYLECKAIGDHLEFELF

SEQ ID NO: 44316 - protein, 903 aa, Arabidopsis thaliana
  peptide (1)..(903): Ceres Seq. ID no. 13509449
MGSSSKDLVERKQREYHGSLEYDIDMLFQSISVKPSTTRLMSSSFHHHETSASAGPSRTTSPSKRIASMKKPGTPQSPRFVGLSDSVSLKQALRDRCISKASEMAAQKRLSKSAAASPRVSEADRIKSLYNQVSNESTSSRSGLVPVDKGKGSLVEIPLMPVNDKPSSSKSVPQRFEDPSNPISEPSQAGTSFGLQGVGNQTREIKLLHRSNKPGSCLSSGSGDYEIELDENVASPSTHAFVEDDVIEIDKHVTSLPSHSSKKVNATELDKNISSSAVDSEQKGKLDDAPNSGTENGKTVRKVTRMIPRPKQPKKKILLKKKLKIGVVSATYPTKDDEEIVPSLDSSANQLLCQRCHCSLKSTSIDDNPPSYTSSHNPKICTDSLSSVSNKEAHQGSDENSSGSCNVSQSSEADIVIMKQDVSSSNNSGIGAMVEKETENPTSSEKFEFSLSSKDSLGDYSRSTSISEESNLSRFSCGNKPHMSMDVRWEAIKHIKVQYGSLGLRHFNLLKKLGCGDIGTVYLAELIGTNCLFAIKVMDNEFLARRKKSPRAQAEREILKMLDHPFLPTLYAQFTSDNLSCLVMEYCPGGDLHVLRQKQLGRCFPEPAARFYVAEILLALEYLHMLGIIYRDLKPENILVREDGHIMLTDFDLSLRCAVNPTLVRSNSPPGKDPARISGPYNTSNCIQPFCITEPSCQVSCFSPRLSSNQQQGRKPKRGDHLSKTQQHLSRSLPQLVAEPTEARSNSFVGTHEYLAPEIIKGEGHGAAVDWWTFGVLLYELLYGKTPFKGYNNDETLANVVLQNLKFPDSPLVSFQAKDLIRGLLVKEPENRLGSEKGSVEIKRHPFFEGLNWALIRCAIPPELPDFYEYGGGPEAAADSPGGSNNRYLECKAIGDHLEFELF

SEQ ID NO: 44317 - protein, 878 aa, Arabidopsis thaliana
  peptide (1)..(878): Ceres Seq. ID no. 13509450
MLFQSISVKPSTTRLMSSSFHHHETSASAGPSRTTSPSKRIASMKKPGTPQSPRFVGLSDSVSLKQALRDRCISKASEMAAQKRLSKSAAASPRVSEADRIKSLYNQVSNESTSSRSGLVPVDKGKGSLVEIPLMPVNDKPSSSKSVPQRFEDPSNPISEPSQAGTSFGLQGVGNQTREIKLLHRSNKPGSCLSSGSGDYEIELDENVASPSTHAFVEDDVIEIDKHVTSLPSHSSKKVNATELDKNISSSAVDSEQKGKLDDAPNSGTENGKTVRKVTRMIPRPKQPKKKILLKKKLKIGVVSATYPTKDDEEIVPSLDSSANQLLCQRCHCSLKSTSIDDNPPSYTSSHNPKICTDSLSSVSNKEAHQGSDENSSGSCNVSQSSEADIVIMKQDVSSSNNSGIGAMVEKETENPTSSEKFEFSLSSKDSLGDYSRSTSISEESNLSRFSCGNKPHMSMDVRWEAIKHIKVQYGSLGLRHFNLLKKLGCGDIGTVYLAELIGTNCLFAIKVMDNEFLARRKKSPRAQAEREILKMLDHPFLPTLYAQFTSDNLSCLVMEYCPGGDLHVLRQKQLGRCFPEPAARFYVAEILLALEYLHMLGIIYRDLKPENILVREDGHIMLTDFDLSLRCAVNPTLVRSNSPPGKDPARISGPYNTSNCIQPFCITEPSCQVSCFSPRLSSNQQQGRKPKRGDHLSKTQQHLSRSLPQLVAEPTEARSNSFVGTHEYLAPEIIKGEGHGAAVDWWTFGVLLYELLYGKTPFKGYNNDETLANVVLQNLKFPDSPLVSFQAKDLIRGLLVKEPENRLGSEKGSVEIKRHPFFEGLNWALIRCAIPPELPDFYEYGGGPEAAADSPGGSNNRYLECKAIGDHLEFELF

SEQ ID NO: 44318 - DNA, 1220 bp, Arabidopsis thaliana; identical to SEQ ID NO: 22709
  misc_feature (1)..(1220): Ceres Seq. ID no. 12489325
  misc_feature (1)..(1220): Ortholog of  Ceres SEQ ID NO 14301526 as cited in SEQ ID NO 68130

SEQ ID NO: 44319 - protein, 331 aa, Arabidopsis thaliana; identical to SEQ ID NO: 22710
  peptide (1)..(331): Ceres Seq. ID no. 12489326

SEQ ID NO: 44320 - protein, 308 aa, Arabidopsis thaliana; identical to SEQ ID NO: 22711
  peptide (1)..(308): Ceres Seq. ID no. 12489327

SEQ ID NO: 44321 - protein, 276 aa, Arabidopsis thaliana; identical to SEQ ID NO: 22712
  peptide (1)..(276): Ceres Seq. ID no. 12489328

SEQ ID NO: 44322 - DNA, 1343 bp, Arabidopsis thaliana
  misc_feature (1)..(1343): Ceres Seq. ID no. 13509451
  misc_feature (1)..(1343): Ortholog of  Ceres SEQ ID NO 14311557 as cited in SEQ ID NO 51432
  misc_feature (1)..(1343): Ortholog of  Ceres SEQ ID NO 13598075 as cited in SEQ ID NO 67351
aagtgtctaatcgcgcgatgaacttgataacggcgatgaccggagctaaattgcggccatacaatgctacgatccacttgctgcactccactttgccctttcacggcgaaacaaccttctttccttaggaaacagcaacgtattacctctgatcgcttcacctttcgcggtggtggtggtggcgatgccgccgccgtcgtctcctcctccggcctccgtgatctcgttttcgtcgtaaaccctcaaggtgctaatggtagaacagctaaagaatggaagaagttgcttcctcaccttcgatctcgtcttggtaaagactgtaatgtaagtgaattattaacatcgggtccttctcatgccattgacattacaagagaggctataagggatggtgcagatgctgtcattgcggttggaggtgatggaacacttcatgaggttgttaatggtttcttttgggaggggaaacctgtcggttatctcagtggggaagctagtcgatcgactgcacttggtctgattcccttaggtactggctcagattttgctagaacatttggttggaacaatgatccttgtgaagcagtggagcgcattgctagagggatgcgatcacggattgatgttggtgttatcgacaaggaaggaaaggatttgcattacttcatcaatgtagctgatgttcatttgagcgcaaaggcaggattttacgcttcaaaatacaagaaatttggaaacttgtgctacgtaattggtgccctacaagcgttcatgggccatcataaccaagatatgagaatcagagtcaatggaggcgaatgggaaatatatccccaggtcactgctctctgcgttggaaacgcaaaatactttggtggtggaatgaaaatcacacccaacgccatccctggaaatggaaatcttgaggttgtggttcttcaaaacttcaaatggtatgatttcgtacttaaacttcataagctgtacaacgggactcatctttcggttaacaatgtgacttcaagaagtgtacaaagcatcgaagttgaagagattacagacagtggaagtatctatgtgcagtcagatggagaacatcttggattcctacctagaaagtttcaggtgttacccggtgccatagacataatcagctgatcaaaaccgcagatttcttaggataaacttgtcaagtaaagtgtagaatacttcaactttatattcttcctgtaatatgattcattgtttagcgaatcagatttatgctcgtgttacttgtgtaactcgttactatcactatttattgtgtggtctctgttaaccacaaatagatactttaaaac

SEQ ID NO: 44323 - protein, 364 aa, Arabidopsis thaliana
  peptide (1)..(364): Ceres Seq. ID no. 13509452
MLRSTCCTPLCPFTAKQPSFLRKQQRITSDRFTFRGGGGGDAAAVVSSSGLRDLVFVVNPQGANGRTAKEWKKLLPHLRSRLGKDCNVSELLTSGPSHAIDITREAIRDGADAVIAVGGDGTLHEVVNGFFWEGKPVGYLSGEASRSTALGLIPLGTGSDFARTFGWNNDPCEAVERIARGMRSRIDVGVIDKEGKDLHYFINVADVHLSAKAGFYASKYKKFGNLCYVIGALQAFMGHHNQDMRIRVNGGEWEIYPQVTALCVGNAKYFGGGMKITPNAIPGNGNLEVVVLQNFKWYDFVLKLHKLYNGTHLSVNNVTSRSVQSIEVEEITDSGSIYVQSDGEHLGFLPRKFQVLPGAIDIIS

SEQ ID NO: 44324 - protein, 183 aa, Arabidopsis thaliana
  peptide (1)..(183): Ceres Seq. ID no. 13509453
MRSRIDVGVIDKEGKDLHYFINVADVHLSAKAGFYASKYKKFGNLCYVIGALQAFMGHHNQDMRIRVNGGEWEIYPQVTALCVGNAKYFGGGMKITPNAIPGNGNLEVVVLQNFKWYDFVLKLHKLYNGTHLSVNNVTSRSVQSIEVEEITDSGSIYVQSDGEHLGFLPRKFQVLPGAIDIIS

SEQ ID NO: 44325 - DNA, 1657 bp, Arabidopsis thaliana
  misc_feature (1)..(1657): Ceres Seq. ID no. 13646230
  misc_feature (1)..(1657): Ortholog of  Ceres SEQ ID NO 13596277 as cited in SEQ ID NO 67896
aatctctatctatcttcttcgtcgtgactcaaacgaggttccgccgattataatccttctctccatacttgagagattttgttggattgttctttgttctgagtcgccttggatctatcggtgttggtgctttgttttttgagctagggattgtcggaacgatggagagtgatttgattgatttgttcgagggagctaagaaggcagccgatgcggcggctcttgacggtgttacctcttcaggtcctgaggtttctcaatgtatcgatgcccttaaacagctcaagaagtttcctgtcacatacgataccctcgttgcgactcaggtgggaaagaagctgaggtctcttgcaaaacatcctgttgaagatatcaaaagcgtagctactgatctgcttgagatatggaagaaagttgtcattgaagagacagccaaagctaagaaaaccgaaggcactaacggttgtaaagaggctaaggtgaataagatggatgttgagaagccttcaaatcctgctcctgttaaagttcagaaacttcagaggggtgattcggctaagagtatcaaggttgagagaaaggaacctgacaataaagttgttaccggtgtcaagatagagagaaaggtacctgacatcaaagtcaccaatggaaccaagatagattatcgtggtcaggctgtgaaagatgaaaaggtctcaaaggacaaccaatcaagtatgaaagctccagctaaagcagctaatgctcctccaaaactaactgcaatgctcaaatgcaatgatcctgtgcgtgacaaaatccgtgagttgcttgtggaggcgttgtgcagggttgctggagaagctgatgactatgagagagagtcagtaaatgctagtgatcctttacgtgttgctgtctcagtggaatcactgatgtttgagaaattgggtcgctcaactggagctcagaagcttaagtacagatctataatgttcaacctgagggatagtaacaacccggacttaagaaggagggttctcactggggagatttcaccagagaaactcataacattgtctgccgaagatatggcaagtgacaagaggaaacaagagaacaaccagatcaaagagaaagccctgtttgattgtgagcgtggtcttgctgcaaaagcatctaccgaccagttcaagtgcgggcggtgtggtcagcgcaaatgcacctactatcagatgcaaacaagaagtgctgatgagccaatgacgacttatgttacatgtgttaactgtgacaaccactggaagttctgttgaggagatctctgtgtcttttatttcatgagaccatgttaagacatagaggctctgattgattaatcaggagcttcgtgtccatttgctagcagcattcctagaatgctctggctccgatgtttgtttaaggatatcattcaatgtcttagagattagtaagtaggggtatttactaatttaggtgtttgtagttcttatttcttttgcttctcttcttccaaactgtcaactcaactttcttgcagattttaccaaattttgaagtttttttttttagttttagaattgctatttgtgtcctccatttaatcatcttgtacggctgaagcttcacagcctaatgtatgtgatattggtcg

SEQ ID NO: 44326 - protein, 378 aa, Arabidopsis thaliana
  peptide (1)..(378): Ceres Seq. ID no. 13646231
MESDLIDLFEGAKKAADAAALDGVTSSGPEVSQCIDALKQLKKFPVTYDTLVATQVGKKLRSLAKHPVEDIKSVATDLLEIWKKVVIEETAKAKKTEGTNGCKEAKVNKMDVEKPSNPAPVKVQKLQRGDSAKSIKVERKEPDNKVVTGVKIERKVPDIKVTNGTKIDYRGQAVKDEKVSKDNQSSMKAPAKAANAPPKLTAMLKCNDPVRDKIRELLVEALCRVAGEADDYERESVNASDPLRVAVSVESLMFEKLGRSTGAQKLKYRSIMFNLRDSNNPDLRRRVLTGEISPEKLITLSAEDMASDKRKQENNQIKEKALFDCERGLAAKASTDQFKCGRCGQRKCTYYQMQTRSADEPMTTYVTCVNCDNHWKFC

SEQ ID NO: 44327 - protein, 269 aa, Arabidopsis thaliana
  peptide (1)..(269): Ceres Seq. ID no. 13646232
MDVEKPSNPAPVKVQKLQRGDSAKSIKVERKEPDNKVVTGVKIERKVPDIKVTNGTKIDYRGQAVKDEKVSKDNQSSMKAPAKAANAPPKLTAMLKCNDPVRDKIRELLVEALCRVAGEADDYERESVNASDPLRVAVSVESLMFEKLGRSTGAQKLKYRSIMFNLRDSNNPDLRRRVLTGEISPEKLITLSAEDMASDKRKQENNQIKEKALFDCERGLAAKASTDQFKCGRCGQRKCTYYQMQTRSADEPMTTYVTCVNCDNHWKFC

SEQ ID NO: 44328 - protein, 192 aa, Arabidopsis thaliana
  peptide (1)..(192): Ceres Seq. ID no. 13646233
MKAPAKAANAPPKLTAMLKCNDPVRDKIRELLVEALCRVAGEADDYERESVNASDPLRVAVSVESLMFEKLGRSTGAQKLKYRSIMFNLRDSNNPDLRRRVLTGEISPEKLITLSAEDMASDKRKQENNQIKEKALFDCERGLAAKASTDQFKCGRCGQRKCTYYQMQTRSADEPMTTYVTCVNCDNHWKFC

SEQ ID NO: 44329 - DNA, 1925 bp, Arabidopsis thaliana
  misc_feature (1)..(1925): Ceres Seq. ID no. 12488849
  misc_feature (1)..(1925): Ortholog of  Ceres SEQ ID NO 13638331 as cited in SEQ ID NO 58047
  misc_feature (1)..(1925): Ortholog of  Ceres SEQ ID NO 15225845 as cited in SEQ ID NO 65125
atggtgagagtcaaacaaaagaatcttgaatcttatagatctaacggtacatatccacccacgtggcgaaatccaaccacttcattcgcacccgatcaacatcgagtcagcattcactcatcactcaaatccaaaaccaaaaggagacgcttatacaaagaagcagacgacaacaccaaactccgatcatcatcatcaacaacaacaacaacaacaacgatgctgcttcgaatttctggtaacaatctgagacctttgagaccacaatttctcgctcttcgaagctcttggttatcaacttcgccggagcaatctactcaaccacaaatgcctccgagagtaccaaatcttattggaggttcttttgttgagtctcaatcatcttcgtttatcgatgttataaaccctgctacacaagaggttgtatctaaagttccattgactactaatgaagagtttaaagctgcggtatccgctgcgaagcaagcgtttccgttgtggagaaacacgccgattactacccggcagcgtgttatgctaaagtttcaagagcttatacgcaagaatatggataaacttgctatgaacatcacaaccgagcaagggaagactttaaaggattcacatggtgatatcttccgtgggttagaggttgtggagcatgcgtgtggaatggcaaccttacagatgggtgaatatctccccaatgtgtcgaacggagttgatacatatagtattagagagccattaggtgtttgtgctggcatttgtccttttaactttccagccatgattcctttatggatgtttcctgttgcagtgacatgtggtaatacctttattctgaagccatcagagaaggatcccggtgcttctgtaatacttgccgagttggcaatggaagctggtttacctgatggggttctcaatatcgttcacggaaccaatgatactgtgaatgctatctgtgatgatgaagatataagggctgtttcttttgttggctccaacacggctggaatgcatatatacgcaagagcagcagcaaaaggaaaacgtattcagtcaaatatgggggcgaaaaatcatggacttgtcttgcctgatgccaacatcgatgcaactttaaatgcgctacttgctgctgggtttggtgccgctggacagagatgcatggcactgagtacagtggtttttgttggcgatgcaaaatcatgggaggataaactcgttgagcgagctaaggcccttaaagtcacatgtgggtcagaaccagatgcagacctgggtcctgtgattagtaaacaggcgaaagaacggatatgccggttgattcagtctggtgtagatgatggtgctaaattgctgcttgacggaagagatattgtggttccaggatatgagaaagggaattttatcggtcctaccattctatctggtgttaccccagacatggagtgttacaaggaggaaatatttggccctgttcttgtgtgcatgcaggcaaacagttttgatgaggccatatctataataaataaaaacaagtatgggaacggtgctgcgattttcacgtcgtccggggcagcagcaagaaagttccagatggacatagaagcaggacagatcggtattaatgttccaatcccggttccattaccgttcttttccttcaccgggaacaaggcctcattcgcaggagatcttaacttctatggcaaagcaggagtggactttttcactcagatcaaaactgttacacaacagtggaaagatattccaacttcagtatctctggcaatgccaacgtctcaaaagcaataatgagaccttaacttcaaatactttttttacttttggattatcaaatcagcttcaagaagaaccctttgtttatttttcagctctctagtattttntcatgc

SEQ ID NO: 44330 - protein, 607 aa, Arabidopsis thaliana
  peptide (1)..(607): Ceres Seq. ID no. 12488850
MVRVKQKNLESYRSNGTYPPTWRNPTTSFAPDQHRVSIHSSLKSKTKRRRLYKEADDNTKLRSSSSTTTTTTTMLLRISGNNLRPLRPQFLALRSSWLSTSPEQSTQPQMPPRVPNLIGGSFVESQSSSFIDVINPATQEVVSKVPLTTNEEFKAAVSAAKQAFPLWRNTPITTRQRVMLKFQELIRKNMDKLAMNITTEQGKTLKDSHGDIFRGLEVVEHACGMATLQMGEYLPNVSNGVDTYSIREPLGVCAGICPFNFPAMIPLWMFPVAVTCGNTFILKPSEKDPGASVILAELAMEAGLPDGVLNIVHGTNDTVNAICDDEDIRAVSFVGSNTAGMHIYARAAAKGKRIQSNMGAKNHGLVLPDANIDATLNALLAAGFGAAGQRCMALSTVVFVGDAKSWEDKLVERAKALKVTCGSEPDADLGPVISKQAKERICRLIQSGVDDGAKLLLDGRDIVVPGYEKGNFIGPTILSGVTPDMECYKEEIFGPVLVCMQANSFDEAISIINKNKYGNGAAIFTSSGAAARKFQMDIEAGQIGINVPIPVPLPFFSFTGNKASFAGDLNFYGKAGVDFFTQIKTVTQQWKDIPTSVSLAMPTSQKQ

SEQ ID NO: 44331 - protein, 534 aa, Arabidopsis thaliana
  peptide (1)..(534): Ceres Seq. ID no. 12488851
MLLRISGNNLRPLRPQFLALRSSWLSTSPEQSTQPQMPPRVPNLIGGSFVESQSSSFIDVINPATQEVVSKVPLTTNEEFKAAVSAAKQAFPLWRNTPITTRQRVMLKFQELIRKNMDKLAMNITTEQGKTLKDSHGDIFRGLEVVEHACGMATLQMGEYLPNVSNGVDTYSIREPLGVCAGICPFNFPAMIPLWMFPVAVTCGNTFILKPSEKDPGASVILAELAMEAGLPDGVLNIVHGTNDTVNAICDDEDIRAVSFVGSNTAGMHIYARAAAKGKRIQSNMGAKNHGLVLPDANIDATLNALLAAGFGAAGQRCMALSTVVFVGDAKSWEDKLVERAKALKVTCGSEPDADLGPVISKQAKERICRLIQSGVDDGAKLLLDGRDIVVPGYEKGNFIGPTILSGVTPDMECYKEEIFGPVLVCMQANSFDEAISIINKNKYGNGAAIFTSSGAAARKFQMDIEAGQIGINVPIPVPLPFFSFTGNKASFAGDLNFYGKAGVDFFTQIKTVTQQWKDIPTSVSLAMPTSQKQ

SEQ ID NO: 44332 - protein, 498 aa, Arabidopsis thaliana
  peptide (1)..(498): Ceres Seq. ID no. 12488852
MPPRVPNLIGGSFVESQSSSFIDVINPATQEVVSKVPLTTNEEFKAAVSAAKQAFPLWRNTPITTRQRVMLKFQELIRKNMDKLAMNITTEQGKTLKDSHGDIFRGLEVVEHACGMATLQMGEYLPNVSNGVDTYSIREPLGVCAGICPFNFPAMIPLWMFPVAVTCGNTFILKPSEKDPGASVILAELAMEAGLPDGVLNIVHGTNDTVNAICDDEDIRAVSFVGSNTAGMHIYARAAAKGKRIQSNMGAKNHGLVLPDANIDATLNALLAAGFGAAGQRCMALSTVVFVGDAKSWEDKLVERAKALKVTCGSEPDADLGPVISKQAKERICRLIQSGVDDGAKLLLDGRDIVVPGYEKGNFIGPTILSGVTPDMECYKEEIFGPVLVCMQANSFDEAISIINKNKYGNGAAIFTSSGAAARKFQMDIEAGQIGINVPIPVPLPFFSFTGNKASFAGDLNFYGKAGVDFFTQIKTVTQQWKDIPTSVSLAMPTSQKQ

SEQ ID NO: 44333 - DNA, 913 bp, Arabidopsis thaliana
  misc_feature (1)..(913): Ceres Seq. ID no. 13503070
  misc_feature (1)..(913): Ortholog of  Ceres SEQ ID NO 13638849 as cited in SEQ ID NO 52046
  misc_feature (1)..(913): Ortholog of  Ceres SEQ ID NO 13599613 as cited in SEQ ID NO 0
gtgtgacttttaggagagtaagaaaatatcgaaggtcagaagaatgagtgaggaaaagaggaaacaacattttgtactagtacatggttcgtgccatggcgcgtggtgctggtacaaggttaagccgctgctagaggcggtgggccaccgcgtaactgctgtggacttagctgcctccggaatagacacaacgaggtcgatcactgacatccccacatgcgaacaatactcggagccattgacgaagctcctgacctcattgccaaatgatgaaaaggttgtgctcgttggtcacagctttggtggcttgaacttagccatagccatggaaaagtttcccgaaaaaatctctgtcgctgtattcttgactgctttcatgccggacaccgaacactcaccatccttcgtcttggacaagtttggaagcaacatgcctcaagaagcatggatgggcaccgaattcgaaccttatggttcagacaattccggactgagtatgttttttagccctgacttcatgaagttgggtctctaccagctttctccagttgaggatcttgaactgggattacttttaatgaggccaggatcgttatttattaacgatttatcgaagatgaaaaacttctcggatgaaggatatgggtctgttcctcgagttttcatagtgtgtaaagaggacaaagcaattccagaagaacgccagagatggatgattgataattttccggtgaatttagtgatggagatggaggagacagatcatatgccaatgttctgcaagcctcagcaactcagtgattacttcctgaaaatcgcggacaaattcgtttaatcaaatcttcatgaaactgtattggatttgatataataaaggtttgttgcaaatgaattaataatgatgaatattttt

SEQ ID NO: 44334 - protein, 263 aa, Arabidopsis thaliana
  peptide (1)..(263): Ceres Seq. ID no. 13503071
MSEEKRKQHFVLVHGSCHGAWCWYKVKPLLEAVGHRVTAVDLAASGIDTTRSITDIPTCEQYSEPLTKLLTSLPNDEKVVLVGHSFGGLNLAIAMEKFPEKISVAVFLTAFMPDTEHSPSFVLDKFGSNMPQEAWMGTEFEPYGSDNSGLSMFFSPDFMKLGLYQLSPVEDLELGLLLMRPGSLFINDLSKMKNFSDEGYGSVPRVFIVCKEDKAIPEERQRWMIDNFPVNLVMEMEETDHMPMFCKPQQLSDYFLKIADKFV

SEQ ID NO: 44335 - protein, 169 aa, Arabidopsis thaliana
  peptide (1)..(169): Ceres Seq. ID no. 13503072
MEKFPEKISVAVFLTAFMPDTEHSPSFVLDKFGSNMPQEAWMGTEFEPYGSDNSGLSMFFSPDFMKLGLYQLSPVEDLELGLLLMRPGSLFINDLSKMKNFSDEGYGSVPRVFIVCKEDKAIPEERQRWMIDNFPVNLVMEMEETDHMPMFCKPQQLSDYFLKIADKFV

SEQ ID NO: 44336 - protein, 152 aa, Arabidopsis thaliana
  peptide (1)..(152): Ceres Seq. ID no. 13503073
MPDTEHSPSFVLDKFGSNMPQEAWMGTEFEPYGSDNSGLSMFFSPDFMKLGLYQLSPVEDLELGLLLMRPGSLFINDLSKMKNFSDEGYGSVPRVFIVCKEDKAIPEERQRWMIDNFPVNLVMEMEETDHMPMFCKPQQLSDYFLKIADKFV

SEQ ID NO: 44337 - DNA, 1401 bp, Arabidopsis thaliana
  misc_feature (1)..(1401): Ceres Seq. ID no. 12488861
  misc_feature (1)..(1401): Ortholog of  Ceres SEQ ID NO 12590542 as cited in SEQ ID NO 621
  misc_feature (1)..(1401): Ortholog of  Ceres SEQ ID NO 12421854 as cited in SEQ ID NO 20723
  misc_feature (1)..(1401): Ortholog of  Ceres SEQ ID NO 13597847 as cited in SEQ ID NO 64858
aaactaccaaacctacagaaatctctcttcttcttcttctctacaaaatttcaatggaagctgttcttgtcgcaatgtccgtccccgccacaacggaagacgacggattttcgttaatcaccgataaactttcatataatctaacgccgacgtcggacgttgagatcgttacctccgataaccgtcggattccggcacactccggcgttctggcttcagcttcaccggtactgatgaacatcatgaagaaaccgatgagacgttacagaggctgtggatctaaaagagtcatcaagattcttggcgttccatgcgacgccgtttcggtttttatcaaattcctctactcttctagtttgacggaggatgagatggagagatatggaatccatcttttagcgttgtctcacgtctacatggtcacccagctgaagcaacggtgctcaaaaggcgttgtacaacgtttaactacagagaacgtagtcgacgtcctccagctagctcggctctgcgacgcacccgatgtttgccttcgatctatgcgtctgatccattcgcagtttaagaccgttgagcagactgaaggatggaagtttattcaagaacatgatcctttcctcgagctcgacattctccagttcatcgatgacgccgaatcgaggaagaaaagaaggcgacgacatagaaaggagcaggatctttacatgcaactaagcgaggcaatggagtgcatagagcacatatgcacacaaggttgtacattggtcggtccatcaaacgtagtagataacaacaaaaagtcaatgactgcggaaaagtcagagccttgtaaggcgttttccacgtgttatggtcttcagcttttgatacgtcactttgccgtatgcaagaggaggaataacgataagggttgtcttcgttgcaagcggatgcttcaactctttagactccattctttgatttgtgatcaacccgattcttgtcgcgtccctctctgcaggcaatttaggaaacggggagaacaagacaagaaaatgggtgaagacaccaagtggaagcttctggtgacaagggttgtgtctgcaaaagctatgacgtcgttgtgtcagtcaaagaagaacaaatgtgaacaagcacaaggggtttaatcaaaaccaggaaggagttagttaggtttgaagaagattaagtaagaagctttcttataatttgatatccattctttttgtagtataatagtatttgttagttcgattctttattagaggggtttagtttgtataggagtaaacccttttaaattggctgtataagtaggtcatattcaattgttttgttctatttatctgaaaaatgtcagcatgtaatacaaaacaaataaatgttcaaattaaagggagg

SEQ ID NO: 44338 - protein, 381 aa, Arabidopsis thaliana
  peptide (1)..(381): Ceres Seq. ID no. 12488862
TTKPTEISLLLLLYKISMEAVLVAMSVPATTEDDGFSLITDKLSYNLTPTSDVEIVTSDNRRIPAHSGVLASASPVLMNIMKKPMRRYRGCGSKRVIKILGVPCDAVSVFIKFLYSSSLTEDEMERYGIHLLALSHVYMVTQLKQRCSKGVVQRLTTENVVDVLQLARLCDAPDVCLRSMRLIHSQFKTVEQTEGWKFIQEHDPFLELDILQFIDDAESRKKRRRRHRKEQDLYMQLSEAMECIEHICTQGCTLVGPSNVVDNNKKSMTAEKSEPCKAFSTCYGLQLLIRHFAVCKRRNNDKGCLRCKRMLQLFRLHSLICDQPDSCRVPLCRQFRKRGEQDKKMGEDTKWKLLVTRVVSAKAMTSLCQSKKNKCEQAQGV

SEQ ID NO: 44339 - protein, 364 aa, Arabidopsis thaliana
  peptide (1)..(364): Ceres Seq. ID no. 12488863
MEAVLVAMSVPATTEDDGFSLITDKLSYNLTPTSDVEIVTSDNRRIPAHSGVLASASPVLMNIMKKPMRRYRGCGSKRVIKILGVPCDAVSVFIKFLYSSSLTEDEMERYGIHLLALSHVYMVTQLKQRCSKGVVQRLTTENVVDVLQLARLCDAPDVCLRSMRLIHSQFKTVEQTEGWKFIQEHDPFLELDILQFIDDAESRKKRRRRHRKEQDLYMQLSEAMECIEHICTQGCTLVGPSNVVDNNKKSMTAEKSEPCKAFSTCYGLQLLIRHFAVCKRRNNDKGCLRCKRMLQLFRLHSLICDQPDSCRVPLCRQFRKRGEQDKKMGEDTKWKLLVTRVVSAKAMTSLCQSKKNKCEQAQGV

SEQ ID NO: 44340 - protein, 357 aa, Arabidopsis thaliana
  peptide (1)..(357): Ceres Seq. ID no. 12488864
MSVPATTEDDGFSLITDKLSYNLTPTSDVEIVTSDNRRIPAHSGVLASASPVLMNIMKKPMRRYRGCGSKRVIKILGVPCDAVSVFIKFLYSSSLTEDEMERYGIHLLALSHVYMVTQLKQRCSKGVVQRLTTENVVDVLQLARLCDAPDVCLRSMRLIHSQFKTVEQTEGWKFIQEHDPFLELDILQFIDDAESRKKRRRRHRKEQDLYMQLSEAMECIEHICTQGCTLVGPSNVVDNNKKSMTAEKSEPCKAFSTCYGLQLLIRHFAVCKRRNNDKGCLRCKRMLQLFRLHSLICDQPDSCRVPLCRQFRKRGEQDKKMGEDTKWKLLVTRVVSAKAMTSLCQSKKNKCEQAQGV

SEQ ID NO: 44341 - DNA, 1519 bp, Arabidopsis thaliana
  misc_feature (1)..(1519): Ceres Seq. ID no. 12488865
  misc_feature (1)..(1519): Ortholog of  Ceres SEQ ID NO 14312293 as cited in SEQ ID NO 58744
  misc_feature (1)..(1519): Ortholog of  Ceres SEQ ID NO 15177596 as cited in SEQ ID NO 59731
gaaaacagtcttctcttctccgatcccaaaaacgcaggaaaacaatgtcgtttaacagctcccacctccttcctccacaagaagaccttcctctccgacacttcaccgatcaatcacagcaacctccgccgcagcgtcacttctctgaaacaccttcgcttgtcaccgccagtttcctcaacctccctaccacccttaccactgcggattccgatctcgctcctccgcaccgcaacggagacaattccgttgctgatacaaacccacgctggctctcctttcattcggagatgcaaaatactggagaagtacgttctgaagttatcgacggagtcaacgccgatggtgaaacgatactcggcgttgtaggaggtgaagattggcggagtgctagctataaggcggcgattttaagacatccgatgtacgagcagcttcttgcggctcacgtggcttgccttagggttgcgactcccgttgaccagattccgaggatcgatgctcagctcagtcagttgcataccgtcgccgcgaaatactccactcttggtgtggttgttgacaacaaggaacttgatcatttcatgtcacattatgttgtcttgttatgttcatttaaagaacaactccaacaccacgtttgtgtccatgcaatggaagccattacggcttgttgggagattgaacaatcactgcaatccctaactggagtttctccaagtgaaagtaatggtaagacaatgtcggatgatgaagatgataatcaagtagagagcgaggtgaacatgtttgatggaagtttggacggttcagattgcttgatggggtttggtcctcttgttccaaccgagagagagagatctttgatggaacgtgtgaagaaagaactgaagcatgagcttaaacagggtttcaaagagaagattgtggacataagagaagagataatgaggaagagaagggcgggaaagttgccaggagatacgacttctgtactcaaagaatggtggcgaactcactcgaaatggccatacccaactgaggaagataaggcaaaactggttcaagaaaccggtttgcagttgaaacagatcaacaattggttcatcaaccagaggaaaagaaactggaacagcaactcttccacgtcatctactctcaccaagaacaaacgtaaacggaccgggaagtcgtaggtgacatagcggctaactagaggatggttctttgccatgtgaattcttgggaaccgtatatgaaagaaacgaatccggttctatgctcgtacagagtgtgttatttgtatagtggataccggttagcctatgaaaccggattctggagtccaaattgttgtttgtaacgacttagtagtttttggaagtgatctgtttcgttggtttgcgtcttgtaacgaacgcttaagcaagtgtgggttttttcttgtaaagtgtcaatatgttcgtttgtaatgaatgtatcaagcaatatttatcataattaaactagcttgaaatgt

SEQ ID NO: 44342 - protein, 397 aa, Arabidopsis thaliana
  peptide (1)..(397): Ceres Seq. ID no. 12488866
KQSSLLRSQKRRKTMSFNSSHLLPPQEDLPLRHFTDQSQQPPPQRHFSETPSLVTASFLNLPTTLTTADSDLAPPHRNGDNSVADTNPRWLSFHSEMQNTGEVRSEVIDGVNADGETILGVVGGEDWRSASYKAAILRHPMYEQLLAAHVACLRVATPVDQIPRIDAQLSQLHTVAAKYSTLGVVVDNKELDHFMSHYVVLLCSFKEQLQHHVCVHAMEAITACWEIEQSLQSLTGVSPSESNGKTMSDDEDDNQVESEVNMFDGSLDGSDCLMGFGPLVPTERERSLMERVKKELKHELKQGFKEKIVDIREEIMRKRRAGKLPGDTTSVLKEWWRTHSKWPYPTEEDKAKLVQETGLQLKQINNWFINQRKRNWNSNSSTSSTLTKNKRKRTGKS

SEQ ID NO: 44343 - protein, 383 aa, Arabidopsis thaliana
  peptide (1)..(383): Ceres Seq. ID no. 12488867
MSFNSSHLLPPQEDLPLRHFTDQSQQPPPQRHFSETPSLVTASFLNLPTTLTTADSDLAPPHRNGDNSVADTNPRWLSFHSEMQNTGEVRSEVIDGVNADGETILGVVGGEDWRSASYKAAILRHPMYEQLLAAHVACLRVATPVDQIPRIDAQLSQLHTVAAKYSTLGVVVDNKELDHFMSHYVVLLCSFKEQLQHHVCVHAMEAITACWEIEQSLQSLTGVSPSESNGKTMSDDEDDNQVESEVNMFDGSLDGSDCLMGFGPLVPTERERSLMERVKKELKHELKQGFKEKIVDIREEIMRKRRAGKLPGDTTSVLKEWWRTHSKWPYPTEEDKAKLVQETGLQLKQINNWFINQRKRNWNSNSSTSSTLTKNKRKRTGKS

SEQ ID NO: 44344 - protein, 301 aa, Arabidopsis thaliana
  peptide (1)..(301): Ceres Seq. ID no. 12488868
MQNTGEVRSEVIDGVNADGETILGVVGGEDWRSASYKAAILRHPMYEQLLAAHVACLRVATPVDQIPRIDAQLSQLHTVAAKYSTLGVVVDNKELDHFMSHYVVLLCSFKEQLQHHVCVHAMEAITACWEIEQSLQSLTGVSPSESNGKTMSDDEDDNQVESEVNMFDGSLDGSDCLMGFGPLVPTERERSLMERVKKELKHELKQGFKEKIVDIREEIMRKRRAGKLPGDTTSVLKEWWRTHSKWPYPTEEDKAKLVQETGLQLKQINNWFINQRKRNWNSNSSTSSTLTKNKRKRTGKS

SEQ ID NO: 44345 - DNA, 1212 bp, Arabidopsis thaliana
  misc_feature (1)..(1212): Ceres Seq. ID no. 12488869
  misc_feature (1)..(1212): Ortholog of  Ceres SEQ ID NO 13600580 as cited in SEQ ID NO 1382
cacttcgtcaagagtcttatcatcaaacgttacgttctcgttttctcaaattccaaacaataccaagaaacctctacttgaaaagagaagattatcgccgcgtgtgtgcctaagagcgatggcgtctgagaaacaaaaacaacatgcacaacctggcaaagaacatgtcatggaatcaagcccacaattctctagctcagattaccaaccttccaacaagcttcgtggtaaggtggcgttgataactggtggagactctgggattggtcgagccgtgggatactgttttgcatccgaaggagctactgtggctttcacttacgtgaagggtcaagaagaaaaagatgcacaagagaccctacaaatgttgaaggaggtcaaaacctcggactccaaggaacctatcgccattccaacggatttaggatttgacgaaaactgcaaaagggtcgttgatgaggtcgttaatgcttttggccgcatcgatgttttgatcaataacgcagcagagcagtacgagagcagcacaatcgaagagattgatgagcctaggcttgagcgagtcttccgtacaaacatcttttcttacttctttctcacaaggcatgcgttgaagcatatgaaggaaggaagcagcattatcaacaccacttcggtgaatgcctacaagggaaacgcttcacttctcgactacaccgctacaaaaggagcgattgtggcgtttactcgaggacttgcacttcagctagctgagaaaggaatccgtgtcaatggtgtggctcctggtccaatatggacaccccttatcccagcatcattcaatgaggagaagattaagaattttgggtctgaggttccgatgaaaagagcgggtcagccaattgaagtggcaccatcctatgttttcttggcgtgtaaccactgctcttcttacttcactggtcaagttcttcaccctaatggaggagctgtggtaaatgcgtaagcgtggagtggacaagaccggtcttaacgtcttagaccattaaatatgatatgatgatgttgtttgagtttaggggctttttgttatgttggtaatgtgttacgtccgtatatgttggtaatgtgttgcgtccgtaccttctgtagcaaaagtatgtgtttaataaagactttacctcgacaatagtcggggcctgttcccttaaaactaatatagaagttttgtgc

SEQ ID NO: 44346 - protein, 327 aa, Arabidopsis thaliana
  peptide (1)..(327): Ceres Seq. ID no. 12488870
TSSRVLSSNVTFSFSQIPNNTKKPLLEKRRLSPRVCLRAMASEKQKQHAQPGKEHVMESSPQFSSSDYQPSNKLRGKVALITGGDSGIGRAVGYCFASEGATVAFTYVKGQEEKDAQETLQMLKEVKTSDSKEPIAIPTDLGFDENCKRVVDEVVNAFGRIDVLINNAAEQYESSTIEEIDEPRLERVFRTNIFSYFFLTRHALKHMKEGSSIINTTSVNAYKGNASLLDYTATKGAIVAFTRGLALQLAEKGIRVNGVAPGPIWTPLIPASFNEEKIKNFGSEVPMKRAGQPIEVAPSYVFLACNHCSSYFTGQVLHPNGGAVVNA

SEQ ID NO: 44347 - protein, 288 aa, Arabidopsis thaliana
  peptide (1)..(288): Ceres Seq. ID no. 12488871
MASEKQKQHAQPGKEHVMESSPQFSSSDYQPSNKLRGKVALITGGDSGIGRAVGYCFASEGATVAFTYVKGQEEKDAQETLQMLKEVKTSDSKEPIAIPTDLGFDENCKRVVDEVVNAFGRIDVLINNAAEQYESSTIEEIDEPRLERVFRTNIFSYFFLTRHALKHMKEGSSIINTTSVNAYKGNASLLDYTATKGAIVAFTRGLALQLAEKGIRVNGVAPGPIWTPLIPASFNEEKIKNFGSEVPMKRAGQPIEVAPSYVFLACNHCSSYFTGQVLHPNGGAVVNA

SEQ ID NO: 44348 - protein, 271 aa, Arabidopsis thaliana
  peptide (1)..(271): Ceres Seq. ID no. 12488872
MESSPQFSSSDYQPSNKLRGKVALITGGDSGIGRAVGYCFASEGATVAFTYVKGQEEKDAQETLQMLKEVKTSDSKEPIAIPTDLGFDENCKRVVDEVVNAFGRIDVLINNAAEQYESSTIEEIDEPRLERVFRTNIFSYFFLTRHALKHMKEGSSIINTTSVNAYKGNASLLDYTATKGAIVAFTRGLALQLAEKGIRVNGVAPGPIWTPLIPASFNEEKIKNFGSEVPMKRAGQPIEVAPSYVFLACNHCSSYFTGQVLHPNGGAVVNA

SEQ ID NO: 44349 - DNA, 1510 bp, Arabidopsis thaliana
  misc_feature (1)..(1510): Ceres Seq. ID no. 13509710
  misc_feature (1)..(1510): Ortholog of  Ceres SEQ ID NO 15226198 as cited in SEQ ID NO 62150
aaaagaagaaaccctagtctctccgactctccgtagacgacgaagttatcttcttcaattcatcgtctcttctctgctctgctttgctctagatcacaaattaaaagacttcattagtcttcctgtctccaccattaccttcttcctttttaactcagccacgacgagcagactattgttctgttttccttgtataaaaatggcgtcgatgatgtttaccgattgctcctccaccacgacgtcgcgtctcatccatttgaaccgaagcagcggtactttcctcctccgtcaatgcgtcggccaactccgtttacagaccactgcttctggccgtggctgctgcattcgctcctcttcttctcccatttcttccatttccgctgatacaaaatcagagggtggcgcaattgtaatagatggaaaggctgtggcaaaaaagattagagatgaaatcacaattgaagtttcaagaatgaaggaatcaattggtgtgattcctggtttagcagtaatccttgttggtgacagaaaagattctgcaacttatgtgaggaacaagaagaaagcttgtgactccgttggaatcaaatcgttcgaagttcgtctagctgaagattcatcagaagaagaggtgttgaaatctgtatcaggattcaatgatgatccttctgtccatggaatccttgttcagttgcctctgccatcgcatatggatgaacagaacatactgaatgcggttagtatagagaaagatgttgacggatttcatccgctaaatattggacggcttgccatgcgtggaagagaacccttattcgttccttgtactccaaaaggatgcattgagttgttgcatagatacaacattgaaatcaaaggaaagagagcggttgttatcggaaggagtaacattgtcggtatgccagctgctcttttactgcagagggaggatgcaaccgttagcattatccattcaagaaccaagaaccctgaagaaatcacaagagaagctgatattataatctcagctgttggacagccaaacatggtcagaggaagctggataaaaccgggcgcagtcctcatcgatgttgggattaatcctgttgaggatccaagtgctgcgcgtggatatcgattggttggagacatttgctacgaggaggctagcaaagttgcatcagccatcacacctgttcctggcggtgtaggaccaatgaccatagccatgcttctatccaacactttaacatcagctaagaggattcacaacttccagtgacgtcacttaaaaagaagattgctggccttttgggaaacaaacaaatcgtactctgttttttgaagccaatgatttactttggtctttaaagaaagttatcgttttgttctatgaaacaaaacatgtagtttttaagtcacataaattgtcttcaacattgtttgtctcttcttggtattttgagtcagaactagttttaacttatcccagctatgatatatcccagcc

SEQ ID NO: 44350 - protein, 426 aa, Arabidopsis thaliana
  peptide (1)..(426): Ceres Seq. ID no. 13509711
KEETLVSPTLRRRRSYLLQFIVSSLLCFALDHKLKDFISLPVSTITFFLFNSATTSRLLFCFPCIKMASMMFTDCSSTTTSRLIHLNRSSGTFLLRQCVGQLRLQTTASGRGCCIRSSSSPISSISADTKSEGGAIVIDGKAVAKKIRDEITIEVSRMKESIGVIPGLAVILVGDRKDSATYVRNKKKACDSVGIKSFEVRLAEDSSEEEVLKSVSGFNDDPSVHGILVQLPLPSHMDEQNILNAVSIEKDVDGFHPLNIGRLAMRGREPLFVPCTPKGCIELLHRYNIEIKGKRAVVIGRSNIVGMPAALLLQREDATVSIIHSRTKNPEEITREADIIISAVGQPNMVRGSWIKPGAVLIDVGINPVEDPSAARGYRLVGDICYEEASKVASAITPVPGGVGPMTIAMLLSNTLTSAKRIHNFQ

SEQ ID NO: 44351 - protein, 360 aa, Arabidopsis thaliana
  peptide (1)..(360): Ceres Seq. ID no. 13509712
MASMMFTDCSSTTTSRLIHLNRSSGTFLLRQCVGQLRLQTTASGRGCCIRSSSSPISSISADTKSEGGAIVIDGKAVAKKIRDEITIEVSRMKESIGVIPGLAVILVGDRKDSATYVRNKKKACDSVGIKSFEVRLAEDSSEEEVLKSVSGFNDDPSVHGILVQLPLPSHMDEQNILNAVSIEKDVDGFHPLNIGRLAMRGREPLFVPCTPKGCIELLHRYNIEIKGKRAVVIGRSNIVGMPAALLLQREDATVSIIHSRTKNPEEITREADIIISAVGQPNMVRGSWIKPGAVLIDVGINPVEDPSAARGYRLVGDICYEEASKVASAITPVPGGVGPMTIAMLLSNTLTSAKRIHNFQ

SEQ ID NO: 44352 - protein, 357 aa, Arabidopsis thaliana
  peptide (1)..(357): Ceres Seq. ID no. 13509713
MMFTDCSSTTTSRLIHLNRSSGTFLLRQCVGQLRLQTTASGRGCCIRSSSSPISSISADTKSEGGAIVIDGKAVAKKIRDEITIEVSRMKESIGVIPGLAVILVGDRKDSATYVRNKKKACDSVGIKSFEVRLAEDSSEEEVLKSVSGFNDDPSVHGILVQLPLPSHMDEQNILNAVSIEKDVDGFHPLNIGRLAMRGREPLFVPCTPKGCIELLHRYNIEIKGKRAVVIGRSNIVGMPAALLLQREDATVSIIHSRTKNPEEITREADIIISAVGQPNMVRGSWIKPGAVLIDVGINPVEDPSAARGYRLVGDICYEEASKVASAITPVPGGVGPMTIAMLLSNTLTSAKRIHNFQ

SEQ ID NO: 44353 - DNA, 845 bp, Arabidopsis thaliana
  misc_feature (1)..(845): Ceres Seq. ID no. 13503794
  misc_feature (1)..(845): Ortholog of  Ceres SEQ ID NO 14305967 as cited in SEQ ID NO 1343
  misc_feature (1)..(845): Ortholog of  Ceres SEQ ID NO 14309614 as cited in SEQ ID NO 52633
  misc_feature (1)..(845): Ortholog of  Ceres SEQ ID NO 12626306 as cited in SEQ ID NO 65869
aataagaaaatcaaaatctttactcgtttgaaatttgtaatccattacctgtcatcgttgacttgtcaagaagaaacaaatcaactctaaaaagaaaaatgttgttcatcgaaatcgaagcttgacagtattcaaaatcagattcgagatgagctgcgacggaggcaaaccggcgccggcgaaactaggcgacgaacaactagcggagctccgggagatattccgatcatttgaccagaacaaggatggaagtttgacggagctcgagttaggctcacttctaagatctctcggtctaaagccgagtcaagaccaactcgacacattgatccagaaagcagatcggaataacaacggactggtcgagttctccgagttcgtcgccctcgtcgagccagatctggtcaagtgtccttacacggatgatcagcttaaagccatctttagaatgtttgaccgcgatggaaacggttacataacggcggcggagttagcccattcgatggcgaagctaggtcacgcgttgacggcggaggagttaacgggaatgatcaaagaagctgatcgagacggcgatggttgtattgatttccaagagtttgttcaagcgattacttcagctgcgtttgataatgcttggggttgaagaaagaaaggtatatatatacatagtttgaaatacttgtgttttgtttttttggcttcatcctcaaatcaaagacatttggaagtatatgtgtgtaggtgcgattccatggaaaatgtgtgttatttattgtttcatattattctttgatgaaattttgatagcttgaagagaaagctatcattgttggttttagggc

SEQ ID NO: 44354 - protein, 165 aa, Arabidopsis thaliana
  peptide (1)..(165): Ceres Seq. ID no. 13503795
MSCDGGKPAPAKLGDEQLAELREIFRSFDQNKDGSLTELELGSLLRSLGLKPSQDQLDTLIQKADRNNNGLVEFSEFVALVEPDLVKCPYTDDQLKAIFRMFDRDGNGYITAAELAHSMAKLGHALTAEELTGMIKEADRDGDGCIDFQEFVQAITSAAFDNAWG

SEQ ID NO: 44355 - DNA, 2034 bp, Arabidopsis thaliana
  misc_feature (1)..(2034): Ceres Seq. ID no. 13509639
  misc_feature (1)..(2034): Ortholog of  Ceres SEQ ID NO 12626078 as cited in SEQ ID NO 69113
aaaacctacttcctttccttgcttcagctccccttttcttatccggaaaccaaaaacttccggtgataaaacctccttcgtcatctctctacttcttggataaaatggcgtcaactttcactgccacatcttctattggttcaatggttgctccgaatggtcacaaatctgataagaaacttatcagcaagttgtcttcaagctcatttggaaggagacaaagtgtgtgtcctagacccagaagatccagttctgcaattgtgtgcgcagcaaaggaattacatttcaacaaagatgggactaccattaggagacttcaagctggtgtcaacaagctcgcagatcttgttggtgttacacttggacccaaaggacgaaatgttgttcttgagagcaagtatggatcaccacgaattgttaatgatggtgtgactgttgcaagagaggttgagttggaagacccggttgagaacattggcgctaagcttgtgaggcaagcggctgccaaaaccaatgacttggctggtgacggtacaacaacatctgttgttcttgcacaaggttttatcgctgagggtgtcaaggtggtagctgctggtgcaaaccctgttttgatcaccagaggtattgagaagacagcaaaggctttggttaccgagctcaagaaaatgtctaaggaggttgaagacagtgaacttgcagatgttgcagctgttagtgcgggtaacaacgacgaaattggaaatatgattgctgaagcaatgagcaaagtgggcaggaaaggtgtggtgacccttgaggagggtaaaagtgccgagaacaacctctacgtcgtagaaggaatgcaatttgaccgtggttatatctctccttactttgtgacagacagcgagaaaatgtccgtcgagttcgacaattgcaagttacttctcgttgacaagaaaattaccaatgcaagggatcttgttggtgttttggaggatgcaattagaggcggatacccaatattaattattgctgaagacattgaacaagaagctttagcgactcttgttgtaaacaagcttagaggtacactgaagatagcagctctcagagctccagggtttggagagcgcaagagccaataccttgatgatattgccattctaactggagcaactgtgatccgtgaggaagttggtctttcacttgacaaagctggaaaagaggttcttggtaatgcttcaaaggttgtcctcacaaaggagacctcgaccatagtgggtgatggaagcacacaggatgcagtgaaaaagcgtgttacacagattaaaaatcttattgagcaagcggagcaagattacgagaaggagaaactcaatgagagaattgcaaagctctctggtggagttgctgtgattcaggttggagcacaaactgagacagaactcaaagagaagaagttgagagttgaagatgctcttaatgcaacaaaggccgctgtcgaggaaggtattgttgttggtggtggttgcactctgcttcgtcttgcttccaaggttgatgccattaaagccacgcttgataatgatgaagaaaaggttggagcggatatagttaaaagagcactaagttaccccctaaaactaatcgccaagaatgctggtgttaatggaagtgtagttagcgagaaggtgctttccaacgataacgtgaaattcggttacaatgctgcaaccggcaagtacgaggatttgatggctgcaggaatcatcgatccaacaaaggttgtgagatgttgcttggaacacgcagcttcggttgcaaagactttcttgatgtcggactgcgttgttgttgagatcaaggaacctgaaccagttcccgtcggcaacccaatggacaactcaggatatggatactaagaggagataggctaatattgaaacggattactttagcttgcgagtgtaatgattttgaacaagagaatgtgtaatgtgaaactgaaattttgaattaatcatcatatgaataaatcatgattccccc

SEQ ID NO: 44356 - protein, 634 aa, Arabidopsis thaliana
  peptide (1)..(634): Ceres Seq. ID no. 13509640
NLLPFLASAPLFLSGNQKLPVIKPPSSSLYFLDKMASTFTATSSIGSMVAPNGHKSDKKLISKLSSSSFGRRQSVCPRPRRSSSAIVCAAKELHFNKDGTTIRRLQAGVNKLADLVGVTLGPKGRNVVLESKYGSPRIVNDGVTVAREVELEDPVENIGAKLVRQAAAKTNDLAGDGTTTSVVLAQGFIAEGVKVVAAGANPVLITRGIEKTAKALVTELKKMSKEVEDSELADVAAVSAGNNDEIGNMIAEAMSKVGRKGVVTLEEGKSAENNLYVVEGMQFDRGYISPYFVTDSEKMSVEFDNCKLLLVDKKITNARDLVGVLEDAIRGGYPILIIAEDIEQEALATLVVNKLRGTLKIAALRAPGFGERKSQYLDDIAILTGATVIREEVGLSLDKAGKEVLGNASKVVLTKETSTIVGDGSTQDAVKKRVTQIKNLIEQAEQDYEKEKLNERIAKLSGGVAVIQVGAQTETELKEKKLRVEDALNATKAAVEEGIVVGGGCTLLRLASKVDAIKATLDNDEEKVGADIVKRALSYPLKLIAKNAGVNGSVVSEKVLSNDNVKFGYNAATGKYEDLMAAGIIDPTKVVRCCLEHAASVAKTFLMSDCVVVEIKEPEPVPVGNPMDNSGYGY

SEQ ID NO: 44357 - protein, 600 aa, Arabidopsis thaliana
  peptide (1)..(600): Ceres Seq. ID no. 13509641
MASTFTATSSIGSMVAPNGHKSDKKLISKLSSSSFGRRQSVCPRPRRSSSAIVCAAKELHFNKDGTTIRRLQAGVNKLADLVGVTLGPKGRNVVLESKYGSPRIVNDGVTVAREVELEDPVENIGAKLVRQAAAKTNDLAGDGTTTSVVLAQGFIAEGVKVVAAGANPVLITRGIEKTAKALVTELKKMSKEVEDSELADVAAVSAGNNDEIGNMIAEAMSKVGRKGVVTLEEGKSAENNLYVVEGMQFDRGYISPYFVTDSEKMSVEFDNCKLLLVDKKITNARDLVGVLEDAIRGGYPILIIAEDIEQEALATLVVNKLRGTLKIAALRAPGFGERKSQYLDDIAILTGATVIREEVGLSLDKAGKEVLGNASKVVLTKETSTIVGDGSTQDAVKKRVTQIKNLIEQAEQDYEKEKLNERIAKLSGGVAVIQVGAQTETELKEKKLRVEDALNATKAAVEEGIVVGGGCTLLRLASKVDAIKATLDNDEEKVGADIVKRALSYPLKLIAKNAGVNGSVVSEKVLSNDNVKFGYNAATGKYEDLMAAGIIDPTKVVRCCLEHAASVAKTFLMSDCVVVEIKEPEPVPVGNPMDNSGYGY

SEQ ID NO: 44358 - protein, 587 aa, Arabidopsis thaliana
  peptide (1)..(587): Ceres Seq. ID no. 13509642
MVAPNGHKSDKKLISKLSSSSFGRRQSVCPRPRRSSSAIVCAAKELHFNKDGTTIRRLQAGVNKLADLVGVTLGPKGRNVVLESKYGSPRIVNDGVTVAREVELEDPVENIGAKLVRQAAAKTNDLAGDGTTTSVVLAQGFIAEGVKVVAAGANPVLITRGIEKTAKALVTELKKMSKEVEDSELADVAAVSAGNNDEIGNMIAEAMSKVGRKGVVTLEEGKSAENNLYVVEGMQFDRGYISPYFVTDSEKMSVEFDNCKLLLVDKKITNARDLVGVLEDAIRGGYPILIIAEDIEQEALATLVVNKLRGTLKIAALRAPGFGERKSQYLDDIAILTGATVIREEVGLSLDKAGKEVLGNASKVVLTKETSTIVGDGSTQDAVKKRVTQIKNLIEQAEQDYEKEKLNERIAKLSGGVAVIQVGAQTETELKEKKLRVEDALNATKAAVEEGIVVGGGCTLLRLASKVDAIKATLDNDEEKVGADIVKRALSYPLKLIAKNAGVNGSVVSEKVLSNDNVKFGYNAATGKYEDLMAAGIIDPTKVVRCCLEHAASVAKTFLMSDCVVVEIKEPEPVPVGNPMDNSGYGY

SEQ ID NO: 44359 - DNA, 960 bp, Arabidopsis thaliana; identical to SEQ ID NO: 24238
  misc_feature (1)..(960): Ceres Seq. ID no. 12466073
  misc_feature (1)..(960): Ortholog of  Ceres SEQ ID NO 13594549 as cited in SEQ ID NO 51707
  misc_feature (1)..(960): Ortholog of  Ceres SEQ ID NO 13595294 as cited in SEQ ID NO 55998
  misc_feature (1)..(960): Ortholog of  Ceres SEQ ID NO 14302012 as cited in SEQ ID NO 56618
  misc_feature (1)..(960): Ortholog of  Ceres SEQ ID NO 12598102 as cited in SEQ ID NO 61029
  misc_feature (1)..(960): Ortholog of  Ceres SEQ ID NO 12625361 as cited in SEQ ID NO 62928
  misc_feature (1)..(960): Ortholog of  Ceres SEQ ID NO 13599424 as cited in SEQ ID NO 0

SEQ ID NO: 44360 - protein, 253 aa, Arabidopsis thaliana; identical to SEQ ID NO: 24239
  peptide (1)..(253): Ceres Seq. ID no. 12466074

SEQ ID NO: 44361 - protein, 241 aa, Arabidopsis thaliana; identical to SEQ ID NO: 24240
  peptide (1)..(241): Ceres Seq. ID no. 12466075

SEQ ID NO: 44362 - DNA, 2194 bp, Arabidopsis thaliana
  misc_feature (1)..(2194): Ceres Seq. ID no. 13509478
  misc_feature (1)..(2194): Ortholog of  Ceres SEQ ID NO 13598277 as cited in SEQ ID NO 69317
  misc_feature (1)..(2194): Ortholog of  Ceres SEQ ID NO 15176145 as cited in SEQ ID NO 0
aaccctaaaataaaagattctaacaccaaaagagagaagcaaatctcaaattcttcccctattattatatgtgactgttgttgtttttctctcttttaccatctttggcctgaagaaaaaaaaaaggaatccttcttaatggatttggtaaatcaattaagaaagcattacacaaaataaaaaaggaaagttttttaataagcttcattgagagagagatatagagagagaaaagagagagaggccatattttgataagagaagaagaacccttatagagaaagagaaagagagagacagagagagtggatggatgtcttatagaatgaacaaaacatcctctgtttctcttgtccttgtccctttttccagatcttaaggttttccacattttatcatctgggtcctctccttaatgatttgaagacactcaattcctatttgatcggggactagaatttggattctgtttcagacaaaagtagatttccctgtctctttcccgtttgattttcaataagatgaatccggaggagcaaaagatggaatctgcatcggatctgggcaagctcttcattggcgggatttcatgggacacagatgaagaacgactgcaagagtattttggcaagtatggagatttggttgaagctgtgatcatgagagaccgtactaccggacgtgcccgtggctttgggtttatcgtttttgcagatccttctgttgccgagagagtcatcatggacaaacacatcattgatggccgcacggtcgaggcgaagaaagctgtcccgcgggatgatcagcaagtgctaaaacgacacgccagtccaatgcaccttatctcacctagccatggtggtaatggtggtggagcacggacaaagaagatctttgttggaggtttaccgtctagcattactgaggccgagttcaagaactactttgatcagtttggtacaattgctgatgttgtggtaatgtatgatcataatacacagaggccaagaggctttggcttcatcacttttgattccgaagagtctgttgatatggttctccacaagacctttcatgagctaaacggaaaaatggttgaggttaaaagagcagtgccaaaggagctctcctcgactactcctaaccgaagcccacttattgggtatggtaacaactatggagtagtccctaataggtcttctgctaatagctacttcaatagttttcctcctggttataataataataatctaggctctgctggccggtttagtcctattggtagcggtagaaatgctttctctagcttcgggctcggattgaatcaagaactgaatttgaattcaaactttgatggaaacactcttgggtatagccggatccctggcaaccaatacttcaacagtgcttcaccaaaccgttacaactctccaattgggtacaacagaggagactctgcttacaacccgagcaacagagacttgtggggaaacagaagcgattcctctggtccaggttggaacttgggagtttcggttggtaacaacagaggaaactggggactttcttctgtggtgagcgataacaatggctatggaagaagctatggggctggttctggactttcggggttatcattcgcgggtaatacaaacggttttgatggctctataggggaattgtatagaggcagctcagtttatagcgactcaacatggcagcagtcaatgcctcatcatcagtcttctaatgagttagacggcttgtctcgctcttatggctttggtattgacaatgtaggctcagacccatcagccaatgcctcagaaggatactccggaaactacaatgtcggaaatagacaaacacatagaggtattgaagcatagaaagaaatcgacgaagagaagtgagaattgtagatcaagaagaacagccatttccgttgcagagtttgaagagttgttatttcgatatcaagtagagaaagaaaccaactttcttcatcacagtgagtttcttgttttgtttttttcgtcgttagcatcacaaacacaaaaaagagaagtttatttttactttaaaaattcttacataagataagatcagattggtagctgcaaagatacaacatggatgataaaaaaagatttggtttcgtctccatagcaataaccagagatcgttgattctc

SEQ ID NO: 44363 - protein, 455 aa, Arabidopsis thaliana
  peptide (1)..(455): Ceres Seq. ID no. 13509479
MNPEEQKMESASDLGKLFIGGISWDTDEERLQEYFGKYGDLVEAVIMRDRTTGRARGFGFIVFADPSVAERVIMDKHIIDGRTVEAKKAVPRDDQQVLKRHASPMHLISPSHGGNGGGARTKKIFVGGLPSSITEAEFKNYFDQFGTIADVVVMYDHNTQRPRGFGFITFDSEESVDMVLHKTFHELNGKMVEVKRAVPKELSSTTPNRSPLIGYGNNYGVVPNRSSANSYFNSFPPGYNNNNLGSAGRFSPIGSGRNAFSSFGLGLNQELNLNSNFDGNTLGYSRIPGNQYFNSASPNRYNSPIGYNRGDSAYNPSNRDLWGNRSDSSGPGWNLGVSVGNNRGNWGLSSVVSDNNGYGRSYGAGSGLSGLSFAGNTNGFDGSIGELYRGSSVYSDSTWQQSMPHHQSSNELDGLSRSYGFGIDNVGSDPSANASEGYSGNYNVGNRQTHRGIEA

SEQ ID NO: 44364 - protein, 448 aa, Arabidopsis thaliana
  peptide (1)..(448): Ceres Seq. ID no. 13509480
MESASDLGKLFIGGISWDTDEERLQEYFGKYGDLVEAVIMRDRTTGRARGFGFIVFADPSVAERVIMDKHIIDGRTVEAKKAVPRDDQQVLKRHASPMHLISPSHGGNGGGARTKKIFVGGLPSSITEAEFKNYFDQFGTIADVVVMYDHNTQRPRGFGFITFDSEESVDMVLHKTFHELNGKMVEVKRAVPKELSSTTPNRSPLIGYGNNYGVVPNRSSANSYFNSFPPGYNNNNLGSAGRFSPIGSGRNAFSSFGLGLNQELNLNSNFDGNTLGYSRIPGNQYFNSASPNRYNSPIGYNRGDSAYNPSNRDLWGNRSDSSGPGWNLGVSVGNNRGNWGLSSVVSDNNGYGRSYGAGSGLSGLSFAGNTNGFDGSIGELYRGSSVYSDSTWQQSMPHHQSSNELDGLSRSYGFGIDNVGSDPSANASEGYSGNYNVGNRQTHRGIEA

SEQ ID NO: 44365 - protein, 409 aa, Arabidopsis thaliana
  peptide (1)..(409): Ceres Seq. ID no. 13509481
MRDRTTGRARGFGFIVFADPSVAERVIMDKHIIDGRTVEAKKAVPRDDQQVLKRHASPMHLISPSHGGNGGGARTKKIFVGGLPSSITEAEFKNYFDQFGTIADVVVMYDHNTQRPRGFGFITFDSEESVDMVLHKTFHELNGKMVEVKRAVPKELSSTTPNRSPLIGYGNNYGVVPNRSSANSYFNSFPPGYNNNNLGSAGRFSPIGSGRNAFSSFGLGLNQELNLNSNFDGNTLGYSRIPGNQYFNSASPNRYNSPIGYNRGDSAYNPSNRDLWGNRSDSSGPGWNLGVSVGNNRGNWGLSSVVSDNNGYGRSYGAGSGLSGLSFAGNTNGFDGSIGELYRGSSVYSDSTWQQSMPHHQSSNELDGLSRSYGFGIDNVGSDPSANASEGYSGNYNVGNRQTHRGIEA

SEQ ID NO: 44366 - DNA, 846 bp, Arabidopsis thaliana
  misc_feature (1)..(846): Ceres Seq. ID no. 12466069
  misc_feature (1)..(846): Ortholog of  Ceres SEQ ID NO 15172729 as cited in SEQ ID NO 56037
  misc_feature (1)..(846): Ortholog of  Ceres SEQ ID NO 12587429 as cited in SEQ ID NO 63113
  misc_feature (1)..(846): Ortholog of  Ceres SEQ ID NO 12586351 as cited in SEQ ID NO 64028
  misc_feature (1)..(846): Ortholog of  Ceres SEQ ID NO 13584899 as cited in SEQ ID NO 64830
  misc_feature (1)..(846): Ortholog of  Ceres SEQ ID NO 13654441 as cited in SEQ ID NO 67814
  misc_feature (1)..(846): Ortholog of  Ceres SEQ ID NO 13596128 as cited in SEQ ID NO 67831
  misc_feature (1)..(846): Ortholog of  Ceres SEQ ID NO 12585194 as cited in SEQ ID NO 68878
  misc_feature (1)..(846): Ortholog of  Ceres SEQ ID NO 12589186 as cited in SEQ ID NO 0
aaagattagttaaataaaaaataaaaaagagggaaagagattgattattcaatggccgagaaagaagagggtgtgaagcttatagggtcttgggcaagcccattcagtcgtagagtcgagatggctctcaagcttaaaggcgtgccgtacgattacttggacgaagattatttggttgtcaagagcccgttgctacttcaactcaacccggtttacaaaaaagtccctgttttggttcacaatggtaaaatattacccgagtcacaactgatccttgaatacatcgaccaaacatggacaaacaatcctattctaccgcaaagtccatatgacaaagccatggctcgattctgggccaaatttgtcgatgaacaagtcacaatgatagggctcaggtcactggtgaaatcagagaagagaattgacgttgcaatcgaagaagttcaagaactaattatgttgcttgagaatcaaatcacgggaaaaaaattattcggcggagagacgataggattcttggacatggtcgtgggaagtatgatcccgttttgtctagctcgggcttgggaaggtatgggaattgatatgattccagaagaaaagtttccagagctaaacagatggatcaagaatttgaaagaaattgagatcgtgagggaatgcattcctgatagagagaaacatattgagcacatgatgaaaattgtaggacgaatcaaagcggtctaagagacaacatgatactctttgatccagtgatgttaagttgttaactaaatttgtattgtcttgttatttaaaagttttatgaacaatctactaaataaagatgagtgtgatacatgt

SEQ ID NO: 44367 - protein, 225 aa, Arabidopsis thaliana
  peptide (1)..(225): Ceres Seq. ID no. 12466070
MAEKEEGVKLIGSWASPFSRRVEMALKLKGVPYDYLDEDYLVVKSPLLLQLNPVYKKVPVLVHNGKILPESQLILEYIDQTWTNNPILPQSPYDKAMARFWAKFVDEQVTMIGLRSLVKSEKRIDVAIEEVQELIMLLENQITGKKLFGGETIGFLDMVVGSMIPFCLARAWEGMGIDMIPEEKFPELNRWIKNLKEIEIVRECIPDREKHIEHMMKIVGRIKAV

SEQ ID NO: 44368 - protein, 202 aa, Arabidopsis thaliana
  peptide (1)..(202): Ceres Seq. ID no. 12466071
MALKLKGVPYDYLDEDYLVVKSPLLLQLNPVYKKVPVLVHNGKILPESQLILEYIDQTWTNNPILPQSPYDKAMARFWAKFVDEQVTMIGLRSLVKSEKRIDVAIEEVQELIMLLENQITGKKLFGGETIGFLDMVVGSMIPFCLARAWEGMGIDMIPEEKFPELNRWIKNLKEIEIVRECIPDREKHIEHMMKIVGRIKAV

SEQ ID NO: 44369 - protein, 129 aa, Arabidopsis thaliana
  peptide (1)..(129): Ceres Seq. ID no. 12466072
MARFWAKFVDEQVTMIGLRSLVKSEKRIDVAIEEVQELIMLLENQITGKKLFGGETIGFLDMVVGSMIPFCLARAWEGMGIDMIPEEKFPELNRWIKNLKEIEIVRECIPDREKHIEHMMKIVGRIKAV

SEQ ID NO: 44370 - DNA, 1640 bp, Arabidopsis thaliana
  misc_feature (1)..(1640): Ceres Seq. ID no. 14311211
  misc_feature (1)..(1640): Ortholog of  Ceres SEQ ID NO 14303850 as cited in SEQ ID NO 53464
  misc_feature (1)..(1640): Ortholog of  Ceres SEQ ID NO 14310452 as cited in SEQ ID NO 54426
  misc_feature (1)..(1640): Ortholog of  Ceres SEQ ID NO 13656177 as cited in SEQ ID NO 64997
gattcattctcttcagtcagagatttcgaaaccctagtcgatttcgagatccaaccaactctgctccttatctcagcttgttgaatttgcgaagtatgggagacgctagagacaacgaagcctacgaggaggagctcttggactatgaagaagaagacgagaaggtcccagattctggaaacaaagttaacggtgaagccgtgaaaaaagggtacgtgggaatacacagttctggattcagagacttccttttaaaaccggagcttctcagagctattgttgactctggatttgaacatccatctgaagtgcaacatgaatgtatccctcaagctatcttgggcatggatgtcatctgccaagcaaagtctggtatggggaagactgctgtgtttgtcctgtctactctacaacagattgaaccatctcctggccaggtttctgcacttgtcttgtgccatacaagagagctagcttaccagatctgcaatgagtttgtgcgattcagtacctatctgcctgatacaaaggtttcggtgttctatggtggagtcaacattaaaattcacaaagacttgctgaagaatgaatgtcctcacattgttgttggtacccctggtcgggtgcttgcacttgccagggagaaagatctctctttgaagaatgtgaggcattttattcttgatgaatgtgataaaatgctcgagtcacttgacatgcgaagggatgtgcaggagattttcaagatgactcctcatgacaaacaagtaatgatgttctcagcaacgctcagcaaagagatacgcccagtctgcaaaaaatttatgcaagatccaatggaaatatatgtcgatgatgaagccaagttgactcttcatgggcttgtccagcactacatcaaactgagcgagatggagaaaaaccggaagttgaatgaccttcttgatgcgttggacttcaatcaagttgtcatttttgtgaagagcgtgagcagggctgctgagctgaacaagttactggtggaatgcaatttcccctcaatatgcatccactctggaatgtctcaagaagagaggttgactcgatacaaaagtttcaaggaagggcacaaaaggatccttgtggcgactgacttggtaggaagagggattgacattgagcgtgtcaacattgtcatcaactatgacatgccagattctgctgatacctatcttcacagggttggcagagctggtagatttggaaccaagggtcttgcaatcacatttgttgcatctgcttcagattcagaggttcttaaccaggtacaagagaggtttgaggttgatataaaggaacttccggagcagattgatacttcaacctacatgccttcttaaacaagtagcacgtccctcaggaaagaagctcttcagatttcaaccttgtaggtgttcgaagggtgatgggggttcacaactatctctcgctccgtttgttttagtgttttctatgacgacatttttttccatatgtttagaacgtctgttgtactctttaaaggagattcgagtcactctccaaatcgcacagttaaaagctgtccagttttttgtacaagagattattatgtttgaaatatcaggatttagtctcgactc

SEQ ID NO: 44371 - protein, 458 aa, Arabidopsis thaliana; identical to SEQ ID NO: 20809
  peptide (1)..(458): Ceres Seq. ID no. 14311212

SEQ ID NO: 44372 - protein, 427 aa, Arabidopsis thaliana; identical to SEQ ID NO: 20810
  peptide (1)..(427): Ceres Seq. ID no. 14311213

SEQ ID NO: 44373 - protein, 344 aa, Arabidopsis thaliana; identical to SEQ ID NO: 20811
  peptide (1)..(344): Ceres Seq. ID no. 14311214

SEQ ID NO: 44374 - DNA, 987 bp, Arabidopsis thaliana
  misc_feature (1)..(987): Ceres Seq. ID no. 13580550
  misc_feature (1)..(987): Ortholog of  Ceres SEQ ID NO 14313662 as cited in SEQ ID NO 54162
  misc_feature (1)..(987): Ortholog of  Ceres SEQ ID NO 14302123 as cited in SEQ ID NO 0
  misc_feature (1)..(987): Ortholog of  Ceres SEQ ID NO 15179452 as cited in SEQ ID NO 0
atttaaccacacaattttatcatttcactcctaacgcactctcttctccgaatctagggtttttgtctctagcctcctcaagctttgcaaacaatcatggcgacccagatcagcaagaagagaaagttcgtagccgatggtgtgttttacgctgaactcaatgaggttctaaccagagagcttgctgaggatggttactctggtgttgaggttcgcgtcactcctatgcgtactgagatcatcattagagccactcgtactcaaaacgttctcggtgagaagggaaggaggattagggaattgacatctcttgtacaaaagagattcaaatttcctcaggacagtgttgagctttatgctgagaaggttgctaacagaggtctttgtgctattgctcaggctgagtctcttcgttacaagcttcttggtggtcttgctgttcgtagggcgtgctatggtgttttaaggtttgttatggagagtggagctaaaggatgcgaagtcattgtgagtggaaaactccgtgctgcacgtgctaagtcgatgaagttcaaggatggttacatggtttcctcaggtcagccaaccaaggaatacattgatgctgcagttaggcatgttcttcttagacagggtgtgcttggtctcaaggtgaagatcatgcttgactgggaccccaagggcaaacaaggaccgatgacaccattgcctgatgttgtgatcatccatacaccgaaagaagatgatgtatacattgcacctgctcaggttgttactcaagctgcttttgtaccggaagctccattaaccaccacagattatccagcaatgccagttgcttagagagccttttcgttttctggtttaaaacccaatggggatggttctttttttgggacagtactagttttctcatgttattctaagttaatacttaaagttctggaggttgaattacatcaaggatatgaatgtatgtttttcgtt

SEQ ID NO: 44375 - protein, 248 aa, Arabidopsis thaliana
  peptide (1)..(248): Ceres Seq. ID no. 13580551
MATQISKKRKFVADGVFYAELNEVLTRELAEDGYSGVEVRVTPMRTEIIIRATRTQNVLGEKGRRIRELTSLVQKRFKFPQDSVELYAEKVANRGLCAIAQAESLRYKLLGGLAVRRACYGVLRFVMESGAKGCEVIVSGKLRAARAKSMKFKDGYMVSSGQPTKEYIDAAVRHVLLRQGVLGLKVKIMLDWDPKGKQGPMTPLPDVVIIHTPKEDDVYIAPAQVVTQAAFVPEAPLTTTDYPAMPVA

SEQ ID NO: 44376 - protein, 205 aa, Arabidopsis thaliana
  peptide (1)..(205): Ceres Seq. ID no. 13580552
MRTEIIIRATRTQNVLGEKGRRIRELTSLVQKRFKFPQDSVELYAEKVANRGLCAIAQAESLRYKLLGGLAVRRACYGVLRFVMESGAKGCEVIVSGKLRAARAKSMKFKDGYMVSSGQPTKEYIDAAVRHVLLRQGVLGLKVKIMLDWDPKGKQGPMTPLPDVVIIHTPKEDDVYIAPAQVVTQAAFVPEAPLTTTDYPAMPVA

SEQ ID NO: 44377 - DNA, 1890 bp, Arabidopsis thaliana
  misc_feature (1)..(1890): Ceres Seq. ID no. 12488902
  misc_feature (1)..(1890): Ortholog of  Ceres SEQ ID NO 13657008 as cited in SEQ ID NO 69164
gcagcgaagagaaagaagatggtcggttgagctatttttgcttctcccgacaaaattctcagatccgaatacttccaccatcatcattcatttataagatctgggttttacacagctctgcgagtacagtaactatgagaaggagaggaggggatagtttccggagagctggacggaggaagatctcgaatgtggtatggtgggttctctctggtattgccctcctgctcttctttctcattctctccaaagctggtcatattgaacctagaccctctattcctaagcgacgttaccgtaatgacaaatttgtagagggtatgaatatgactgaggaaatgttgagtcctacttccgttgctcgtcaagttaatgatcagattgctcttgctaaagcttttgttgtcattgctaaagaaagtaagaatcttcagtttgcttgggacttaagtgctcagatccgtaactctcagttgcttttatcgagtgctgctactaggagaagtcccttgactgtcttggaatctgagtctactattcgtgacatggctgttttgttatatcaagctcagcagcttcactatgatagtgctactatgattatgaggcttaaggcctcgattcaggctcttgaagaacaaatgagttccgttagcgagaagagttccaagtatggacagattgctgctgaggaagtgcctaagagtctttactgtcttggtgttcgtctcactaccgaatggtttcagaatttagacttacagagaactcttaaggaaaggagtcgtgttgattcgaaactcacggataacagtctctaccatttctgtgtgttttccgataacattattgctacttctgttgtggttaattctactgctctcaattccaaggcccctgagaaagttgtgtttcatcttgtgactaatgagatcaactatgctgcaatgaaggcttggttcgccattaatatggacaacctcagaggagtcactgtggaggttcagaagttcgaggatttctcatggctgaatgcttcctatgttccggtcctcaagcagctgcaagactctgatacgcaaagctattatttctctggacacaacgatgatgggcgcactccaatcaaattcaggaaccccaagtatctttccatgctcaaccatcttaggttctacatccctgaagtgtttcctgcgctgaagaaggtggtctttcttgatgatgatgttgtagttcagaaggatctttcatctctcttttcgatcgatttaaacaaaaatgtgaacggggctgttgagacctgcatggagaccttccaccgctaccacaagtacttgaactattctcatcctctcatacgctcccactttgatccagatgcgtgtgggtgggcgtttggaatgaacgtctttgatttagttgagtggaggaagagaaatgtgaccggcatataccactactggcaagaaaaaaacgtggaccggaccttatggaaactgggaacactacctccaggacttctgacattttacgggttaacagaggcactagaggcgtcctggcatatcctgggattgggatacacgaatgtggatgctcgtgtgatagagaaaggagctgttcttcacttcaatgggaacttaaagccatggttgaagatcgggatagagaagtacaaacctttgtgggagagatacgttgattacacttctccttttatgcaacaatgcaattttcattgatatcttagggtccatagttttacttccacttctagacagctatatcttccacatttggttacagagacacttgcaagagttttgtatgctctagcaccatcacttactgtattttgtgaatgtgatattcaaaattcaatgaagc

SEQ ID NO: 44378 - protein, 580 aa, Arabidopsis thaliana
  peptide (1)..(580): Ceres Seq. ID no. 12488903
SEEKEDGRLSYFCFSRQNSQIRILPPSSFIYKIWVLHSSASTVTMRRRGGDSFRRAGRRKISNVVWWVLSGIALLLFFLILSKAGHIEPRPSIPKRRYRNDKFVEGMNMTEEMLSPTSVARQVNDQIALAKAFVVIAKESKNLQFAWDLSAQIRNSQLLLSSAATRRSPLTVLESESTIRDMAVLLYQAQQLHYDSATMIMRLKASIQALEEQMSSVSEKSSKYGQIAAEEVPKSLYCLGVRLTTEWFQNLDLQRTLKERSRVDSKLTDNSLYHFCVFSDNIIATSVVVNSTALNSKAPEKVVFHLVTNEINYAAMKAWFAINMDNLRGVTVEVQKFEDFSWLNASYVPVLKQLQDSDTQSYYFSGHNDDGRTPIKFRNPKYLSMLNHLRFYIPEVFPALKKVVFLDDDVVVQKDLSSLFSIDLNKNVNGAVETCMETFHRYHKYLNYSHPLIRSHFDPDACGWAFGMNVFDLVEWRKRNVTGIYHYWQEKNVDRTLWKLGTLPPGLLTFYGLTEALEASWHILGLGYTNVDARVIEKGAVLHFNGNLKPWLKIGIEKYKPLWERYVDYTSPFMQQCNFH

SEQ ID NO: 44379 - protein, 536 aa, Arabidopsis thaliana
  peptide (1)..(536): Ceres Seq. ID no. 12488904
MRRRGGDSFRRAGRRKISNVVWWVLSGIALLLFFLILSKAGHIEPRPSIPKRRYRNDKFVEGMNMTEEMLSPTSVARQVNDQIALAKAFVVIAKESKNLQFAWDLSAQIRNSQLLLSSAATRRSPLTVLESESTIRDMAVLLYQAQQLHYDSATMIMRLKASIQALEEQMSSVSEKSSKYGQIAAEEVPKSLYCLGVRLTTEWFQNLDLQRTLKERSRVDSKLTDNSLYHFCVFSDNIIATSVVVNSTALNSKAPEKVVFHLVTNEINYAAMKAWFAINMDNLRGVTVEVQKFEDFSWLNASYVPVLKQLQDSDTQSYYFSGHNDDGRTPIKFRNPKYLSMLNHLRFYIPEVFPALKKVVFLDDDVVVQKDLSSLFSIDLNKNVNGAVETCMETFHRYHKYLNYSHPLIRSHFDPDACGWAFGMNVFDLVEWRKRNVTGIYHYWQEKNVDRTLWKLGTLPPGLLTFYGLTEALEASWHILGLGYTNVDARVIEKGAVLHFNGNLKPWLKIGIEKYKPLWERYVDYTSPFMQQCNFH

SEQ ID NO: 44380 - protein, 474 aa, Arabidopsis thaliana
  peptide (1)..(474): Ceres Seq. ID no. 12488905
MNMTEEMLSPTSVARQVNDQIALAKAFVVIAKESKNLQFAWDLSAQIRNSQLLLSSAATRRSPLTVLESESTIRDMAVLLYQAQQLHYDSATMIMRLKASIQALEEQMSSVSEKSSKYGQIAAEEVPKSLYCLGVRLTTEWFQNLDLQRTLKERSRVDSKLTDNSLYHFCVFSDNIIATSVVVNSTALNSKAPEKVVFHLVTNEINYAAMKAWFAINMDNLRGVTVEVQKFEDFSWLNASYVPVLKQLQDSDTQSYYFSGHNDDGRTPIKFRNPKYLSMLNHLRFYIPEVFPALKKVVFLDDDVVVQKDLSSLFSIDLNKNVNGAVETCMETFHRYHKYLNYSHPLIRSHFDPDACGWAFGMNVFDLVEWRKRNVTGIYHYWQEKNVDRTLWKLGTLPPGLLTFYGLTEALEASWHILGLGYTNVDARVIEKGAVLHFNGNLKPWLKIGIEKYKPLWERYVDYTSPFMQQCNFH

SEQ ID NO: 44381 - DNA, 1278 bp, Arabidopsis thaliana; identical to SEQ ID NO: 37587
  misc_feature (1)..(1278): Ceres Seq. ID no. 13509213
  misc_feature (1)..(1278): Ortholog of  Ceres SEQ ID NO 12611829 as cited in SEQ ID NO 56771
  misc_feature (1)..(1278): Ortholog of  Ceres SEQ ID NO 15171735 as cited in SEQ ID NO 57234
  misc_feature (1)..(1278): Ortholog of  Ceres SEQ ID NO 13597018 as cited in SEQ ID NO 64288
  misc_feature (1)..(1278): Ortholog of  Ceres SEQ ID NO 14305124 as cited in SEQ ID NO 0

SEQ ID NO: 44382 - protein, 284 aa, Arabidopsis thaliana; identical to SEQ ID NO: 37588
  peptide (1)..(284): Ceres Seq. ID no. 13509214

SEQ ID NO: 44383 - protein, 239 aa, Arabidopsis thaliana; identical to SEQ ID NO: 37589
  peptide (1)..(239): Ceres Seq. ID no. 13509215

SEQ ID NO: 44384 - DNA, 872 bp, Arabidopsis thaliana
  misc_feature (1)..(872): Ceres Seq. ID no. 12466061
  misc_feature (1)..(872): Ortholog of  Ceres SEQ ID NO 15168557 as cited in SEQ ID NO 58119
  misc_feature (1)..(872): Ortholog of  Ceres SEQ ID NO 14316469 as cited in SEQ ID NO 59125
aaaaaccaaaccaaacccatagggttgtgttgttgctgttctgttcctatcgaccacggcggcgacgaggcggagaagaccgacaaagcggagaagccagcttcgaaaccctctagcatttattttttaaaagcgaaattcattttaagggttttggtcatggcttcaatctcgacttggttccgatacatggctcacaagctcgagtattccctcactctcagtctcaagagtcataggagtaataagctgagtgaccgggaacttattcaaataatctgcaagaatctgttctatgggaaaataacctacttacactcggataaaggaccagaaatgtcaccaaccatgacagcaaatgaaaacacacttcttattcgtaagataccaattgctaataccaggtttgtattcattggagatgctgtcgtcttaaaggatccaaacgattcagataagtatntggtaagaagattagcagctgtagaaggattcgaaatggtatcgggtgatgaaaaagaggagccttttgttcttgagaagaatcagtgttgggtaacagctgaaaaccaggagctcaaagctaaggaagcatatgatagtagaacatttggtccagtttcaacagcagacattgttggaagagctatatactgtctgagaacagccgtcgatcacggacctgttcgaaacagccaaactgcaatgggacaagattctccaatcctggccgtggaattggacgtggacgagatggctaagaaccataaggcatagagagacgcactttcttgtgtttgtttattattgtcaaagctaaaattgccttctttgattgagatttgagaaaacaataaatcattacaacaatg

SEQ ID NO: 44385 - protein, 258 aa, Arabidopsis thaliana
  peptide (1)..(258): Ceres Seq. ID no. 12466062
  misc_feature (155)..(155): Xaa is any aa, unknown or other
KNQTKPIGLCCCCSVPIDHGGDEAEKTDKAEKPASKPSSIYFLKAKFILRVLVMASISTWFRYMAHKLEYSLTLSLKSHRSNKLSDRELIQIICKNLFYGKITYLHSDKGPEMSPTMTANENTLLIRKIPIANTRFVFIGDAVVLKDPNDSDKYXVRRLAAVEGFEMVSGDEKEEPFVLEKNQCWVTAENQELKAKEAYDSRTFGPVSTADIVGRAIYCLRTAVDHGPVRNSQTAMGQDSPILAVELDVDEMAKNHKA

SEQ ID NO: 44386 - protein, 205 aa, Arabidopsis thaliana
  peptide (1)..(205): Ceres Seq. ID no. 12466063
  misc_feature (102)..(102): Xaa is any aa, unknown or other
MASISTWFRYMAHKLEYSLTLSLKSHRSNKLSDRELIQIICKNLFYGKITYLHSDKGPEMSPTMTANENTLLIRKIPIANTRFVFIGDAVVLKDPNDSDKYXVRRLAAVEGFEMVSGDEKEEPFVLEKNQCWVTAENQELKAKEAYDSRTFGPVSTADIVGRAIYCLRTAVDHGPVRNSQTAMGQDSPILAVELDVDEMAKNHKA

SEQ ID NO: 44387 - protein, 195 aa, Arabidopsis thaliana
  peptide (1)..(195): Ceres Seq. ID no. 12466064
  misc_feature (92)..(92): Xaa is any aa, unknown or other
MAHKLEYSLTLSLKSHRSNKLSDRELIQIICKNLFYGKITYLHSDKGPEMSPTMTANENTLLIRKIPIANTRFVFIGDAVVLKDPNDSDKYXVRRLAAVEGFEMVSGDEKEEPFVLEKNQCWVTAENQELKAKEAYDSRTFGPVSTADIVGRAIYCLRTAVDHGPVRNSQTAMGQDSPILAVELDVDEMAKNHKA

SEQ ID NO: 44388 - DNA, 1241 bp, Arabidopsis thaliana
  misc_feature (1)..(1241): Ceres Seq. ID no. 12466057
  misc_feature (1)..(1241): Ortholog of  Ceres SEQ ID NO 14312416 as cited in SEQ ID NO 55270
  misc_feature (1)..(1241): Ortholog of  Ceres SEQ ID NO 15225352 as cited in SEQ ID NO 67888
aaaaaccctaatcttcatcttcatcttctcccgccgtcggccgtaagaggtttcgaagaagcaaagtgagcaacaatggcgggaggcaagatcaggaaggagaagcccaaggcttcgaatagagcaccatcgaaccattaccaaggaggaatatcgttccacaaatcgaaagggcaacatatccttaagaaccctctgcttgtggattcgatcgttcagaaagctggtatcaagagtaccgatgtgattctcgagatcggtcccggtactggaaacttgaccaagaagcttctagaagctggcaaagaagttatcgccgtcgaacttgactctcgtatggttctcgagcttcagcgccgttttcaaggaactcccttctctaaccgcttgaaggtaattcaaggggatgtgctcaagacggagcttcccaggtttgacatatgtgtggcaaacattccgtatcagatatcatctcctctcacattcaaacttctcttccatccaacaagcttcagatgtgctgtcatcatgtaccagagggaattcgccatgagactcgttgcccagcctggtgacaatctctactgccgtctctctgtcaacactcagctttatgccagagtctcccacctcctcaaagtcggcaagaacaatttccgccctcctccaaaggtggattcttccgttgtcaggatcgaaccaaggaggcctggccctcaggttaacaagaaggagtgggatgggttcttaagagtctgtttcatcagaaagaacaaaaccttgggatccattttcaagcaaaagtctgttctttccatgctggagaagaacttcaagactcttcaggccgtactagcttcgttgcagaacaatggagaacctgctttgaacaccacctccatggatcttggtgaccagagcatgggaatggaagatgacgacaacgaaatggatgacgatgatatggagatggatgagggagaaggagacggaggagaaacatcagagttcaaggagaaagttatgaatgtcttgaaggaaggtggtttcgaggagaagagatcttcaaagctatcacaacaagagtttttgtatcttctttccttgttcaacaagtctggtattcacttcacataatcgttttgtggtgtgaaagttttgtccttacttattactattgttcaagttttaacatttggaagtgaaaatcaatcaaagtctttgagttactgacgcaaccc

SEQ ID NO: 44389 - protein, 353 aa, Arabidopsis thaliana
  peptide (1)..(353): Ceres Seq. ID no. 12466058
MAGGKIRKEKPKASNRAPSNHYQGGISFHKSKGQHILKNPLLVDSIVQKAGIKSTDVILEIGPGTGNLTKKLLEAGKEVIAVELDSRMVLELQRRFQGTPFSNRLKVIQGDVLKTELPRFDICVANIPYQISSPLTFKLLFHPTSFRCAVIMYQREFAMRLVAQPGDNLYCRLSVNTQLYARVSHLLKVGKNNFRPPPKVDSSVVRIEPRRPGPQVNKKEWDGFLRVCFIRKNKTLGSIFKQKSVLSMLEKNFKTLQAVLASLQNNGEPALNTTSMDLGDQSMGMEDDDNEMDDDDMEMDEGEGDGGETSEFKEKVMNVLKEGGFEEKRSSKLSQQEFLYLLSLFNKSGIHFT

SEQ ID NO: 44390 - protein, 266 aa, Arabidopsis thaliana
  peptide (1)..(266): Ceres Seq. ID no. 12466059
MVLELQRRFQGTPFSNRLKVIQGDVLKTELPRFDICVANIPYQISSPLTFKLLFHPTSFRCAVIMYQREFAMRLVAQPGDNLYCRLSVNTQLYARVSHLLKVGKNNFRPPPKVDSSVVRIEPRRPGPQVNKKEWDGFLRVCFIRKNKTLGSIFKQKSVLSMLEKNFKTLQAVLASLQNNGEPALNTTSMDLGDQSMGMEDDDNEMDDDDMEMDEGEGDGGETSEFKEKVMNVLKEGGFEEKRSSKLSQQEFLYLLSLFNKSGIHFT

SEQ ID NO: 44391 - protein, 202 aa, Arabidopsis thaliana
  peptide (1)..(202): Ceres Seq. ID no. 12466060
MYQREFAMRLVAQPGDNLYCRLSVNTQLYARVSHLLKVGKNNFRPPPKVDSSVVRIEPRRPGPQVNKKEWDGFLRVCFIRKNKTLGSIFKQKSVLSMLEKNFKTLQAVLASLQNNGEPALNTTSMDLGDQSMGMEDDDNEMDDDDMEMDEGEGDGGETSEFKEKVMNVLKEGGFEEKRSSKLSQQEFLYLLSLFNKSGIHFT

SEQ ID NO: 44392 - DNA, 2380 bp, Arabidopsis thaliana
  misc_feature (1)..(2380): Ceres Seq. ID no. 13646246
  misc_feature (1)..(2380): Ortholog of  Ceres SEQ ID NO 13657677 as cited in SEQ ID NO 66119
atcagataaatttccattgattgccaacaaaaatggcgactttaaagccacccgaatctcaattactaaaaaccctaacatcaatcctcacatcagagaaaacccatttcctcgaaaccctaaatccctacattcctcaaatcacacagcctctccttacctctctcctctcttctccttcactcgctaagaaaccagaaaccctagtatctttcttccaatgggctcaaacttcaatccccgaagcatttccatcggattcacctcttccacttatctccgtcgtccgttctcttctctctcaccacaaattcgccgacgccaagtctcttctcgtctcctatatccgcacctccgatgcatctctctctctttgcaactctctccttcacccgaatcttcatctatcacctccaccttctaaagctctattcgacattgctcttagtgcttatcttcatgagggaaagcctcacgttgcgttacagatcttccagaagatgattcgattaaagcttaagccaaatctgctcacttgcaatactcttctcattggtttagtcaggtacccttctagcttctctatctcaagtgctagagaagtgtttgatgatatggttaagattggtgtttcgctaaatgtgcaaactttcaatgttttggttaatgggtattgcttggaaggtaagcttgaggatgctttaggaatgttagagaggatggttagtgaattcaaggttaatcctgataatgttacttacaatacgattttgaaagcaatgtctaagaaaggtcgtttgagtgatcttaaggaattgttgttggatatgaagaagaatggattggtgccaaatagggttacttataataatttagtgtatggttactgtaagttaggttcgttgaaagaagcatttcagattgtggagctgatgaagcaaactaatgtattaccggatctttgtacctataacattttgatcaatgggctttgcaatgcggggagtatgagggaaggtcttgaattaatggatgcgatgaagagtttgaagttacagcccgatgtggttacttacaatacattgattgatgggtgtttcgaattggggcttagtttggaggctaggaagttgatggagcaaatggaaaatgatggagtcaaagctaaccaagtgactcataatatctctcttaagtggctttgtaaggaagagaaaagggaagcggttactagaaaggttaaggaattggtggacatgcacgggttttctcctgatatagtaacttatcatactctgattaaagcgtatttgaaagtaggagatttgagtggtgcccttgagatgatgcgtgagatggggcaaaaagggattaagatgaatactattacccttaataccattcttgatgctctatgtaaggagaggaaacttgatgaggctcacaatttgctgaatagtgcgcacaaacgaggatttattgttgacgaggttacttatggcacattaatcatgggattcttcagggaagaaaaagtggagaaagctttggagatgtgggatgagatgaagaaggtaaagattactcctacagtgagcacgttcaactctttaattggaggtctctgtcaccatggaaaaactgagctagcaatggagaaattcgatgagcttgctgagagtggtttgcttcctgatgacagtactttcaattcaatcatcctcggatactgcaaagaaggacgagttgagaaagcattcgagttttataatgaatccatcaaacactctttcaagcctgataactatacatgcaacattctcctcaatggtctttgtaaggaaggtatgacagaaaaggctctcaatttcttcaacacgctaatagaggagagagaggttgatacagttacatacaacacgatgatctcggctttctgcaaggacaagaagttaaaagaagcatatgaccttctatcagaaatggaggagaaaggactagagcctgatcggtttacatacaacagttttatcagtttgcttatggaagatggtaagctgagtgaaacagatgaattgttaaagaaattttccggaaagtttggatcgatgaagcgggatttacaggtagagacagagaaaaatccagcaacaagtgaatcaaaggaggaacttaacactgaagctattgcttattcagatgtaatagatgaactttgtagtagaggaagattaaaggagcattctagatcttacactagttgaaggagaaactccttttttgtggtttcttttttgtatttcgattttctcaaagcatacttattacttgttacagaaagacattgtaatgtagtttttatgtgatgatgatgattatt

SEQ ID NO: 44393 - protein, 743 aa, Arabidopsis thaliana
  peptide (1)..(743): Ceres Seq. ID no. 13646247
MATLKPPESQLLKTLTSILTSEKTHFLETLNPYIPQITQPLLTSLLSSPSLAKKPETLVSFFQWAQTSIPEAFPSDSPLPLISVVRSLLSHHKFADAKSLLVSYIRTSDASLSLCNSLLHPNLHLSPPPSKALFDIALSAYLHEGKPHVALQIFQKMIRLKLKPNLLTCNTLLIGLVRYPSSFSISSAREVFDDMVKIGVSLNVQTFNVLVNGYCLEGKLEDALGMLERMVSEFKVNPDNVTYNTILKAMSKKGRLSDLKELLLDMKKNGLVPNRVTYNNLVYGYCKLGSLKEAFQIVELMKQTNVLPDLCTYNILINGLCNAGSMREGLELMDAMKSLKLQPDVVTYNTLIDGCFELGLSLEARKLMEQMENDGVKANQVTHNISLKWLCKEEKREAVTRKVKELVDMHGFSPDIVTYHTLIKAYLKVGDLSGALEMMREMGQKGIKMNTITLNTILDALCKERKLDEAHNLLNSAHKRGFIVDEVTYGTLIMGFFREEKVEKALEMWDEMKKVKITPTVSTFNSLIGGLCHHGKTELAMEKFDELAESGLLPDDSTFNSIILGYCKEGRVEKAFEFYNESIKHSFKPDNYTCNILLNGLCKEGMTEKALNFFNTLIEEREVDTVTYNTMISAFCKDKKLKEAYDLLSEMEEKGLEPDRFTYNSFISLLMEDGKLSETDELLKKFSGKFGSMKRDLQVETEKNPATSESKEELNTEAIAYSDVIDELCSRGRLKEHSRSYTS

SEQ ID NO: 44394 - protein, 587 aa, Arabidopsis thaliana
  peptide (1)..(587): Ceres Seq. ID no. 13646248
MIRLKLKPNLLTCNTLLIGLVRYPSSFSISSAREVFDDMVKIGVSLNVQTFNVLVNGYCLEGKLEDALGMLERMVSEFKVNPDNVTYNTILKAMSKKGRLSDLKELLLDMKKNGLVPNRVTYNNLVYGYCKLGSLKEAFQIVELMKQTNVLPDLCTYNILINGLCNAGSMREGLELMDAMKSLKLQPDVVTYNTLIDGCFELGLSLEARKLMEQMENDGVKANQVTHNISLKWLCKEEKREAVTRKVKELVDMHGFSPDIVTYHTLIKAYLKVGDLSGALEMMREMGQKGIKMNTITLNTILDALCKERKLDEAHNLLNSAHKRGFIVDEVTYGTLIMGFFREEKVEKALEMWDEMKKVKITPTVSTFNSLIGGLCHHGKTELAMEKFDELAESGLLPDDSTFNSIILGYCKEGRVEKAFEFYNESIKHSFKPDNYTCNILLNGLCKEGMTEKALNFFNTLIEEREVDTVTYNTMISAFCKDKKLKEAYDLLSEMEEKGLEPDRFTYNSFISLLMEDGKLSETDELLKKFSGKFGSMKRDLQVETEKNPATSESKEELNTEAIAYSDVIDELCSRGRLKEHSRSYTS

SEQ ID NO: 44395 - protein, 549 aa, Arabidopsis thaliana
  peptide (1)..(549): Ceres Seq. ID no. 13646249
MVKIGVSLNVQTFNVLVNGYCLEGKLEDALGMLERMVSEFKVNPDNVTYNTILKAMSKKGRLSDLKELLLDMKKNGLVPNRVTYNNLVYGYCKLGSLKEAFQIVELMKQTNVLPDLCTYNILINGLCNAGSMREGLELMDAMKSLKLQPDVVTYNTLIDGCFELGLSLEARKLMEQMENDGVKANQVTHNISLKWLCKEEKREAVTRKVKELVDMHGFSPDIVTYHTLIKAYLKVGDLSGALEMMREMGQKGIKMNTITLNTILDALCKERKLDEAHNLLNSAHKRGFIVDEVTYGTLIMGFFREEKVEKALEMWDEMKKVKITPTVSTFNSLIGGLCHHGKTELAMEKFDELAESGLLPDDSTFNSIILGYCKEGRVEKAFEFYNESIKHSFKPDNYTCNILLNGLCKEGMTEKALNFFNTLIEEREVDTVTYNTMISAFCKDKKLKEAYDLLSEMEEKGLEPDRFTYNSFISLLMEDGKLSETDELLKKFSGKFGSMKRDLQVETEKNPATSESKEELNTEAIAYSDVIDELCSRGRLKEHSRSYTS

SEQ ID NO: 44396 - DNA, 1108 bp, Arabidopsis thaliana; identical to SEQ ID NO: 23129
  misc_feature (1)..(1108): Ceres Seq. ID no. 13646289
  misc_feature (1)..(1108): Ortholog of  Ceres SEQ ID NO 14306201 as cited in SEQ ID NO 59956

SEQ ID NO: 44397 - protein, 266 aa, Arabidopsis thaliana; identical to SEQ ID NO: 23130
  peptide (1)..(266): Ceres Seq. ID no. 13646290

SEQ ID NO: 44398 - protein, 204 aa, Arabidopsis thaliana; identical to SEQ ID NO: 23131
  peptide (1)..(204): Ceres Seq. ID no. 13646291

SEQ ID NO: 44399 - protein, 144 aa, Arabidopsis thaliana; identical to SEQ ID NO: 23132
  peptide (1)..(144): Ceres Seq. ID no. 13646292

SEQ ID NO: 44400 - DNA, 1402 bp, Arabidopsis thaliana
  misc_feature (1)..(1402): Ceres Seq. ID no. 14304428
  misc_feature (1)..(1402): Ortholog of  Ceres SEQ ID NO 15171386 as cited in SEQ ID NO 51479
atgggttttatgtttactagttgtttttgctgtttgttcttaaatttagagtaacaatatcaaaaaggacaaatcttgatattgctttgattgctgttgtgtatgtatgtgtttttatagtgagagaagaaaaaaaagcacaatctttgaatggactggaatttcaaacttagctctggttatttatctggattcgatcaagaaccagatttatcaccaatggatggttcgatctcgtttggtgggtcgtcacagtcaaaagcggatttttcatttgatctaaaacttggaagaaacattggaaactcttcctctgtttttggtgatacagagcaagtgattagtcttagtaagtggaaagatagtgctttagctaaaccagaaggttcaagaagctcgagttcaaagagaacaaggaatggtgttggaaccaaccagatgccgatttgtcttgttgatggatgtgattctgattttagtaattgtagagagtatcataagagacataaagtttgtgatgttcattcaaaaactcctgtggttactattaatggtcataaacagaggttttgtcaacaatgcagcaggtttcatgctttggaggagtttgatgaagggaagagaagttgtaggaaacgtcttgatggacataatcgaagacgacggaagccgcagcctgaacatatcggtcgtcctgccaacttctttacgggttttcaaggtagcaaattgctagagttttctggtggttcacatgtgtttccaactacatctgtgttgaacccgagctggggaaatagtcttgtaagcgttgctgtagccgccaatggttcgagttatgggcagagccagagctatgttgttggttcttctcctgcaaagacagggataatgtttccaatctcttcttctccaaacagtaccagaagcatagcaaaacaattccctttcttgcaagaagaagaaagctcgagaaccgcatcgttgtgtgagagaatgacgagttgcatccatgactctgattgtgctctctctcttctgtcatcctcctcgtcgtcagtccctcatttgcttcaaccaccactttctttgtcccaagaagcagttgagacagttttttacgggtcgggattgtttgagaatgcctgtgcagtctctgatggatcggttatatccggtaacgaggctgtccgtcttccgcagacattcccgtttcattgggagtagtagaagaagaagtaggtagatagatagaatcagaaagatctatttgtgtctcttctcttctccctcatttttcaatgttctttatcatcatcattgttcttgttaacactacaagaaatatggacattcttaacacaccgaaaacgctataataacgtttacatagcggattcat

SEQ ID NO: 44401 - protein, 358 aa, Arabidopsis thaliana
  peptide (1)..(358): Ceres Seq. ID no. 14304429
MDWNFKLSSGYLSGFDQEPDLSPMDGSISFGGSSQSKADFSFDLKLGRNIGNSSSVFGDTEQVISLSKWKDSALAKPEGSRSSSSKRTRNGVGTNQMPICLVDGCDSDFSNCREYHKRHKVCDVHSKTPVVTINGHKQRFCQQCSRFHALEEFDEGKRSCRKRLDGHNRRRRKPQPEHIGRPANFFTGFQGSKLLEFSGGSHVFPTTSVLNPSWGNSLVSVAVAANGSSYGQSQSYVVGSSPAKTGIMFPISSSPNSTRSIAKQFPFLQEEESSRTASLCERMTSCIHDSDCALSLLSSSSSSVPHLLQPPLSLSQEAVETVFYGSGLFENACAVSDGSVISGNEAVRLPQTFPFHWE

SEQ ID NO: 44402 - protein, 335 aa, Arabidopsis thaliana
  peptide (1)..(335): Ceres Seq. ID no. 14304430
MDGSISFGGSSQSKADFSFDLKLGRNIGNSSSVFGDTEQVISLSKWKDSALAKPEGSRSSSSKRTRNGVGTNQMPICLVDGCDSDFSNCREYHKRHKVCDVHSKTPVVTINGHKQRFCQQCSRFHALEEFDEGKRSCRKRLDGHNRRRRKPQPEHIGRPANFFTGFQGSKLLEFSGGSHVFPTTSVLNPSWGNSLVSVAVAANGSSYGQSQSYVVGSSPAKTGIMFPISSSPNSTRSIAKQFPFLQEEESSRTASLCERMTSCIHDSDCALSLLSSSSSSVPHLLQPPLSLSQEAVETVFYGSGLFENACAVSDGSVISGNEAVRLPQTFPFHWE

SEQ ID NO: 44403 - protein, 262 aa, Arabidopsis thaliana; identical to SEQ ID NO: 40211
  peptide (1)..(262): Ceres Seq. ID no. 14304431

SEQ ID NO: 44404 - DNA, 748 bp, Arabidopsis thaliana
  misc_feature (1)..(748): Ceres Seq. ID no. 13502510
  misc_feature (1)..(748): Ortholog of  Ceres SEQ ID NO 13595067 as cited in SEQ ID NO 55857
  misc_feature (1)..(748): Ortholog of  Ceres SEQ ID NO 12635516 as cited in SEQ ID NO 0
atacatagtcccttcttccacatcagaacccatttgtctttgagtgagagaatcagctttcagagaaaaaagtatacctacagagagagttatggcggagagtggtggacgaaggatcggagtggcggtggatttctcggactgcagtaagaaggctctgagctgggcgatcgataacgtggttcgcgacggagatcatctgatcctaatcactattgctcacgatatgaattacgaggaaggcgagatgcagctctgggagaccgttggatcaccttttattcctatgagtgaattctctgacgctgctgtgatgaaaaagtatgcattgaagccagatgctgaaacccttgacattgtcaatactgccgctaggaagaaaacgattacagtagtgatgaagatatattggggagatcctcgtgagaagatttgtgcagcagctgaacagattcctctctcaagccttgtgatgggtaacagaggccttggtggtcttaagaggatgattatgggaagtgtaagcaaccatgttgtcaacaacgttgcatgccctgtgaccgttgtcaaggctcacatctgagtttgctcggagaactctaaataacaccaccgtgtattctataatttgtgtttttgtggtcggaatttctattgttaactgttgtgtgactggtgttttgttcatctgtatggataaacaacactccaccttctaataaatacagactcttttgatttttggacc

SEQ ID NO: 44405 - protein, 163 aa, Arabidopsis thaliana
  peptide (1)..(163): Ceres Seq. ID no. 13502511
MAESGGRRIGVAVDFSDCSKKALSWAIDNVVRDGDHLILITIAHDMNYEEGEMQLWETVGSPFIPMSEFSDAAVMKKYALKPDAETLDIVNTAARKKTITVVMKIYWGDPREKICAAAEQIPLSSLVMGNRGLGGLKRMIMGSVSNHVVNNVACPVTVVKAHI

SEQ ID NO: 44406 - protein, 118 aa, Arabidopsis thaliana
  peptide (1)..(118): Ceres Seq. ID no. 13502512
MNYEEGEMQLWETVGSPFIPMSEFSDAAVMKKYALKPDAETLDIVNTAARKKTITVVMKIYWGDPREKICAAAEQIPLSSLVMGNRGLGGLKRMIMGSVSNHVVNNVACPVTVVKAHI

SEQ ID NO: 44407 - protein, 111 aa, Arabidopsis thaliana
  peptide (1)..(111): Ceres Seq. ID no. 13502513
MQLWETVGSPFIPMSEFSDAAVMKKYALKPDAETLDIVNTAARKKTITVVMKIYWGDPREKICAAAEQIPLSSLVMGNRGLGGLKRMIMGSVSNHVVNNVACPVTVVKAHI

SEQ ID NO: 44408 - DNA, 1196 bp, Arabidopsis thaliana; identical to SEQ ID NO: 30652
  misc_feature (1)..(1196): Ceres Seq. ID no. 13509751
  misc_feature (1)..(1196): Ortholog of  Ceres SEQ ID NO 13598413 as cited in SEQ ID NO 68934

SEQ ID NO: 44409 - protein, 272 aa, Arabidopsis thaliana; identical to SEQ ID NO: 30653
  peptide (1)..(272): Ceres Seq. ID no. 13509752

SEQ ID NO: 44410 - DNA, 1625 bp, Arabidopsis thaliana
  misc_feature (1)..(1625): Ceres Seq. ID no. 13509498
  misc_feature (1)..(1625): Ortholog of  Ceres SEQ ID NO 14308099 as cited in SEQ ID NO 58651
  misc_feature (1)..(1625): Ortholog of  Ceres SEQ ID NO 13596893 as cited in SEQ ID NO 62932
aggcggagaaacactttccgtggtttagtgttgaggacgatcactgtttgtaattcgatggcgaggaagaagatcagagaatatgactccaagagacttctcaaggagcatttgaagcgtcttgctaatattgacctgcagattcgctctgctcaggtgacagaatctacggatttcactgagttaaccaaccaggagtcatggctatcgtccacaaagctagttgtgaaaccggatatgctatttgggaaacgcgggaaaagtggtttggtagctctaaagctggatcttgctgaagttgcagactttgtcaaagcccgcctcggcactgaggtcgagatggagggatgtaaagcacctatcactacattcattgtggagccttttgtgcctcatgatcaagaatactacctctctatagtatctgatagacttggatgcactataagcttctctgaatgtggtggcattgaaatagaagagaattgggacaaagtgaagactatatttcttcctgcggaaaagtcgatgacgctagaagtatgtgctccattaatagcaactcttcctcttgaggttcgagctaaaatcggcaacttcataatgggtgcctttgctgtatttcaagatttggatttcagttttatggagatgaatccttttacactagtcgatggagaaccattccctctggatatgagaggagaattagatgacactgctgccttcaagaatttcaacaagtggggagacattgaatttcctctgccatttggaagggtcctcagttctacagagaacttcatccatggtttagatgagaagacaagtgcttctttgaagttcactgttttgaatcctaaaggccgcatttggacgatggtagctggaggtggtgctagcgtcatatatgctgatacagttggggatttaggttatgcatcagagcttggaaactacgcagagtatagtggagcacctaatgaggaagaggtgttacaatatgcaagagttgtcattgattgtgccactactgatcctgacgggcgtaaacgagctcttctaattggaggaggcattgccaatttcactgatgtggcagctactttcaacggtatcattcgagcgctaagagaaaaggaaacaagattgaaagcatcaagaatgcacatttacgtaaggagaggtggaccaaattaccagactggtttggctagaatgcgagctttaggagaggaacttggtgtccctctagaggtatatggtccagaggcaacaatgacgggaatatgcaaacgagccattgactgcatcatgttgcctgatgcataacctacccaaaccttttatctcttcttcagtttgaaagcagaacaaaagctttggagctggacgaatgagtgagtgtaaaatgagtcatgtccttcatctctctctttccacataagaaaatgaaaatctctttaaaactttttttccactgggtgtgaatttgaaaactgtatcattgtgtgtaagcgtaattgtaatcagacggtcaaaatccttattttgaaatgtacaataagacttcaaaagttaatgttgcttttgatttttgtgtgtggtaaagccacactcgctct

SEQ ID NO: 44411 - protein, 443 aa, Arabidopsis thaliana
  peptide (1)..(443): Ceres Seq. ID no. 13509499
RRRNTFRGLVLRTITVCNSMARKKIREYDSKRLLKEHLKRLANIDLQIRSAQVTESTDFTELTNQESWLSSTKLVVKPDMLFGKRGKSGLVALKLDLAEVADFVKARLGTEVEMEGCKAPITTFIVEPFVPHDQEYYLSIVSDRLGCTISFSECGGIEIEENWDKVKTIFLPAEKSMTLEVCAPLIATLPLEVRAKIGNFIMGAFAVFQDLDFSFMEMNPFTLVDGEPFPLDMRGELDDTAAFKNFNKWGDIEFPLPFGRVLSSTENFIHGLDEKTSASLKFTVLNPKGRIWTMVAGGGASVIYADTVGDLGYASELGNYAEYSGAPNEEEVLQYARVVIDCATTDPDGRKRALLIGGGIANFTDVAATFNGIIRALREKETRLKASRMHIYVRRGGPNYQTGLARMRALGEELGVPLEVYGPEATMTGICKRAIDCIMLPDA

SEQ ID NO: 44412 - protein, 424 aa, Arabidopsis thaliana
  peptide (1)..(424): Ceres Seq. ID no. 13509500
MARKKIREYDSKRLLKEHLKRLANIDLQIRSAQVTESTDFTELTNQESWLSSTKLVVKPDMLFGKRGKSGLVALKLDLAEVADFVKARLGTEVEMEGCKAPITTFIVEPFVPHDQEYYLSIVSDRLGCTISFSECGGIEIEENWDKVKTIFLPAEKSMTLEVCAPLIATLPLEVRAKIGNFIMGAFAVFQDLDFSFMEMNPFTLVDGEPFPLDMRGELDDTAAFKNFNKWGDIEFPLPFGRVLSSTENFIHGLDEKTSASLKFTVLNPKGRIWTMVAGGGASVIYADTVGDLGYASELGNYAEYSGAPNEEEVLQYARVVIDCATTDPDGRKRALLIGGGIANFTDVAATFNGIIRALREKETRLKASRMHIYVRRGGPNYQTGLARMRALGEELGVPLEVYGPEATMTGICKRAIDCIMLPDA

SEQ ID NO: 44413 - protein, 364 aa, Arabidopsis thaliana
  peptide (1)..(364): Ceres Seq. ID no. 13509501
MLFGKRGKSGLVALKLDLAEVADFVKARLGTEVEMEGCKAPITTFIVEPFVPHDQEYYLSIVSDRLGCTISFSECGGIEIEENWDKVKTIFLPAEKSMTLEVCAPLIATLPLEVRAKIGNFIMGAFAVFQDLDFSFMEMNPFTLVDGEPFPLDMRGELDDTAAFKNFNKWGDIEFPLPFGRVLSSTENFIHGLDEKTSASLKFTVLNPKGRIWTMVAGGGASVIYADTVGDLGYASELGNYAEYSGAPNEEEVLQYARVVIDCATTDPDGRKRALLIGGGIANFTDVAATFNGIIRALREKETRLKASRMHIYVRRGGPNYQTGLARMRALGEELGVPLEVYGPEATMTGICKRAIDCIMLPDA

SEQ ID NO: 44414 - DNA, 626 bp, Arabidopsis thaliana
  misc_feature (1)..(626): Ceres Seq. ID no. 12781011
  misc_feature (1)..(626): Ortholog of  Ceres SEQ ID NO 12563124 as cited in SEQ ID NO 57104
  misc_feature (1)..(626): Ortholog of  Ceres SEQ ID NO 12617639 as cited in SEQ ID NO 65219
acatctcactgctcactactctcactgtaatcccttagatcttcttttcaaatttcaatggcgtccggtgatgttgagtatcggtgcttcgttggaggtctagcatgggccactgatgacagagctcttgagactgccttcgctcaatacggcgacgttattgattccaagatcattaacgatcgtgagactggaagatcaaggggattcggattcgtcaccttcaaggatgagaaagccatgaaggatgcgattgagggaatgaacggacaagatctcgatggccgtagcatcactgttaacgaggctcagtcacgaggaagcggtggcggcggaggccaccgtggaggtggtggcggtggataccgcagcggcggtggtggaggttactccggtggaggtggtagctacggaggtggcggcggtagacgcgagggtggaggatggtaattcctttaattaggtttgggattaccaatgaatgttctctctctcgcttgttatgcttctacttggttttgtgtgttctctattttgttctggttctgctttagatttgatgtaacagttcgtgattaggtattttggtatctggaaacgtaatgttaagtcacttgtcattctcc

SEQ ID NO: 44415 - protein, 130 aa, Arabidopsis thaliana
  peptide (1)..(130): Ceres Seq. ID no. 12781012
MASGDVEYRCFVGGLAWATDDRALETAFAQYGDVIDSKIINDRETGRSRGFGFVTFKDEKAMKDAIEGMNGQDLDGRSITVNEAQSRGSGGGGGHRGGGGGGYRSGGGGGYSGGGGSYGGGGGRREGGGW

SEQ ID NO: 44416 - protein, 69 aa, Arabidopsis thaliana
  peptide (1)..(69): Ceres Seq. ID no. 12781013
MKDAIEGMNGQDLDGRSITVNEAQSRGSGGGGGHRGGGGGGYRSGGGGGYSGGGGSYGGGGGRREGGGW

SEQ ID NO: 44417 - DNA, 1359 bp, Arabidopsis thaliana
  misc_feature (1)..(1359): Ceres Seq. ID no. 13509809
  misc_feature (1)..(1359): Ortholog of  Ceres SEQ ID NO 14310880 as cited in SEQ ID NO 55342
  misc_feature (1)..(1359): Ortholog of  Ceres SEQ ID NO 14313451 as cited in SEQ ID NO 62474
aagcattttagcttcataaaacaaacacaccgacgtcgttaaactcttcatcttcatttttttctgtaacttctcccatattttttcttcccaaaaatatactataaaaatgagaacacttcttctaacgattttgatcttcttcttcacagtgaatccaatctcagcaaaattctacactaacgtctcttcaatcccaccgttacaattcctaaacgcaacgcaaaacgcatgggaaacattctccaaactcgccggttgtcacatcggagaaaatatcaacggcctctcaaaactcaaacaatactttcgccgtttcggttatatcaccaccaccggtaattgcactgacgatttcgatgacgtgcttcaatcagcgatcaacacttaccagaaaaatttcaatctcaaagtcaccggaaaactcgattcctcgactctccggcaaatcgttaaaccgagatgcgggaatccggatttgatcgacggggtttcggagatgaacggtggtaagatactccgtacgactgagaaatactcgtttttccccgggaagccacggtggccgaaacggaaacgagatctgacttatgcgtttgcgccgcagaataatttaacagacgaggttaaacgcgtgttctcacgcgccttcacgcgttgggcggaggtgactccgttgaatttcacgcgctctgagtctatcctccgtgcggatatagtgatcggatttttctccggtgaacatggtgatggagagccgtttgatggagctatgggaacattagcgcatgcttcttcgcctcctacggggatgttacatttagacggtgatgaggattggttgatctctaacggtgaaattagtcgtcggatattaccggtgacgacggtggtggatcttgaatcggtggctgttcatgagattggtcatcttttagggctaggtcattcgtcggtggaagatgcgattatgtttccggcgatttctggtggagatcggaaagtggagttagctaaggatgatatcgaagggattcagcatttgtacggtggtaatccgaatggagacggtggtggttcgaaacctagccgtgagagtcaatctaccggtggtgatagcgttcgtcggtggagagggtggatgattagcttatcatcgattgccacgtgtatattcttgatttctgtttagtgtaggttttattatacttttattccctcttattttggggtcaatttatcgatttgtttttgtttttcttctaaaagtaacgattctatgtgatcgatcggtgtacgaaattggtcatggaaatgagggaaattgtaaaattcttcatattttggattttggtgttt

SEQ ID NO: 44418 - protein, 360 aa, Arabidopsis thaliana
  peptide (1)..(360): Ceres Seq. ID no. 13509810
MRTLLLTILIFFFTVNPISAKFYTNVSSIPPLQFLNATQNAWETFSKLAGCHIGENINGLSKLKQYFRRFGYITTTGNCTDDFDDVLQSAINTYQKNFNLKVTGKLDSSTLRQIVKPRCGNPDLIDGVSEMNGGKILRTTEKYSFFPGKPRWPKRKRDLTYAFAPQNNLTDEVKRVFSRAFTRWAEVTPLNFTRSESILRADIVIGFFSGEHGDGEPFDGAMGTLAHASSPPTGMLHLDGDEDWLISNGEISRRILPVTTVVDLESVAVHEIGHLLGLGHSSVEDAIMFPAISGGDRKVELAKDDIEGIQHLYGGNPNGDGGGSKPSRESQSTGGDSVRRWRGWMISLSSIATCIFLISV

SEQ ID NO: 44419 - protein, 230 aa, Arabidopsis thaliana
  peptide (1)..(230): Ceres Seq. ID no. 13509811
MNGGKILRTTEKYSFFPGKPRWPKRKRDLTYAFAPQNNLTDEVKRVFSRAFTRWAEVTPLNFTRSESILRADIVIGFFSGEHGDGEPFDGAMGTLAHASSPPTGMLHLDGDEDWLISNGEISRRILPVTTVVDLESVAVHEIGHLLGLGHSSVEDAIMFPAISGGDRKVELAKDDIEGIQHLYGGNPNGDGGGSKPSRESQSTGGDSVRRWRGWMISLSSIATCIFLISV

SEQ ID NO: 44420 - DNA, 1819 bp, Arabidopsis thaliana; identical to SEQ ID NO: 42770
  misc_feature (1)..(1819): Ceres Seq. ID no. 12489090
  misc_feature (1)..(1819): Ortholog of  Ceres SEQ ID NO 15169264 as cited in SEQ ID NO 55026
  misc_feature (1)..(1819): Ortholog of  Ceres SEQ ID NO 15224709 as cited in SEQ ID NO 68627

SEQ ID NO: 44421 - protein, 544 aa, Arabidopsis thaliana; identical to SEQ ID NO: 42771
  peptide (1)..(544): Ceres Seq. ID no. 12489091

SEQ ID NO: 44422 - protein, 501 aa, Arabidopsis thaliana [sequence omitted]

SEQ ID NO: 44423 - protein, 366 aa, Arabidopsis thaliana; identical to SEQ ID NO: 42773
  peptide (1)..(366): Ceres Seq. ID no. 12489093

SEQ ID NO: 44424 - DNA, 1833 bp, Arabidopsis thaliana; identical to SEQ ID NO: 30707
  misc_feature (1)..(1833): Ceres Seq. ID no. 13509854
  misc_feature (1)..(1833): Ortholog of  Ceres SEQ ID NO 13663419 as cited in SEQ ID NO 66561

SEQ ID NO: 44425 - protein, 510 aa, Arabidopsis thaliana; identical to SEQ ID NO: 30708
  peptide (1)..(510): Ceres Seq. ID no. 13509855

SEQ ID NO: 44426 - protein, 455 aa, Arabidopsis thaliana; identical to SEQ ID NO: 30709
  peptide (1)..(455): Ceres Seq. ID no. 13509856

SEQ ID NO: 44427 - protein, 395 aa, Arabidopsis thaliana; identical to SEQ ID NO: 30710
  peptide (1)..(395): Ceres Seq. ID no. 13509857

SEQ ID NO: 44428 - DNA, 2126 bp, Arabidopsis thaliana
  misc_feature (1)..(2126): Ceres Seq. ID no. 13509502
  misc_feature (1)..(2126): Ortholog of  Ceres SEQ ID NO 15177678 as cited in SEQ ID NO 0
ctattattggattggatcatcatcgttaaagctccacgccttgtcccaatttcctctttggttctttccttctgggcttgttattgttgtttctcgaaaaagaagaagaagcgatggtattgggattttagggattattgcggtttgttgtatatatatatatagaagctgagggattttgtgttgtgaagaacatcgaatcctgtttttttccgtaagaaagttcttagatttctccaagtgaaagaagatgtcatcagctggtgttgcgttaagtccggttcgtagcgagccattgattatgcctctggttcgtgccaattcttgtcttgattcttatcctgacgacaccatcatgatttaccttacacttcctggatcggtgataccaatgcgagtgcttgagtctgattccattgagtctgttaagcttcggattcagtcttaccgcggctttgttgtgaggaatcagaagcttgttttcggtggtcgagagctagctagaagcaattctaatatgcgtgattatggtgttagtgaaggcaacattctccacttggttcttaagctctctgatcttcaggttcttgatgttaagactacctgtgggaaacactgcaggtttcatgtcgagagagggagaaacattgggtatgtgaagaagcagatttcgaaaaagcgtggagactttgttgatcctgatgaacaggagattctttacgaaggtgagaagttggaagaccagagtcttattaatgacatttgtagaaacgatgactcggttttgcatctgcttgtgcggagatctgctaaagttcgagttaagccggtggagaagaactttgagttgtctattgttgccccacaagcaaaagataagaagggtcgtgaagctaagagcattgtgccaccaaaaaagctttctttggagccggtagttgttaactccaaggctaaagtacctctggtggttaaagatatgattcagtctgcttctgatggacttaaaagtgggaattctccggtcaggtcaagcgaaggtacgggaggagcttatttcatgcagggtccatctggcaacaaatttgtgggtgtgtttaagccaatagatgaggaaccaatggctgagaacaatcctcagggtttaccactttcgccaaacggtgaaggtttgaagaaaggaacaaaggttggagaaggtgcattaagggaagtcgctgcatacattttggatcatcccaaaagtggaaacaaatctatgtttggtgaagagataggttttgctggtgtacctcccacagctatgattgaatgtttgcatccagggtttaaccatcccaaaggaatcaaaaccaagattggatcacttcagatgtttactgagaacgatggcagctgtgaagatatgggtccactttcatttccagtagaagaagttcataagatttctgtgttggatattagactggccaacgcagacagacatggtgggaacattttgatgaccaaggacgaaagcgggaagctcgttttggttcctatagaccatggatactgcttgcctgaaagctttgaagattgcacgtttgagtggctatattggccacaagcccggaaaccgtactctgcagagacccaagagtacataagatcactggacgcagaggaagatattgatctactaaagtttcatggatggaaaatgccggcagagacggctcaaacgctcagaatctcaacgatgctactgaagaaaggagtggaaagaggactaacagcatttgagattggaaccataatgtgcagagaaacacttagcaagaagtctctggtggaggaaatggtagaggaagctcaagaagctgtgcttccagggacgagcgaagctgcattcctcgaagccctatccgatgtgatggattaccatctcgatcactctcaggaacactaaaaatggttcttgtttaattcaaaactctggtatatactctttggtttgctttttataaacctgttggcttttgtattttttaaactttttcatttctgtcattctttggacatgttcaaggtgttttgttaacttcactcagacatatttcatggtaatgacaatttaagtgttt

SEQ ID NO: 44429 - protein, 566 aa, Arabidopsis thaliana
  peptide (1)..(566): Ceres Seq. ID no. 13509503
MSSAGVALSPVRSEPLIMPLVRANSCLDSYPDDTIMIYLTLPGSVIPMRVLESDSIESVKLRIQSYRGFVVRNQKLVFGGRELARSNSNMRDYGVSEGNILHLVLKLSDLQVLDVKTTCGKHCRFHVERGRNIGYVKKQISKKRGDFVDPDEQEILYEGEKLEDQSLINDICRNDDSVLHLLVRRSAKVRVKPVEKNFELSIVAPQAKDKKGREAKSIVPPKKLSLEPVVVNSKAKVPLVVKDMIQSASDGLKSGNSPVRSSEGTGGAYFMQGPSGNKFVGVFKPIDEEPMAENNPQGLPLSPNGEGLKKGTKVGEGALREVAAYILDHPKSGNKSMFGEEIGFAGVPPTAMIECLHPGFNHPKGIKTKIGSLQMFTENDGSCEDMGPLSFPVEEVHKISVLDIRLANADRHGGNILMTKDESGKLVLVPIDHGYCLPESFEDCTFEWLYWPQARKPYSAETQEYIRSLDAEEDIDLLKFHGWKMPAETAQTLRISTMLLKKGVERGLTAFEIGTIMCRETLSKKSLVEEMVEEAQEAVLPGTSEAAFLEALSDVMDYHLDHSQEH

SEQ ID NO: 44430 - protein, 549 aa, Arabidopsis thaliana
  peptide (1)..(549): Ceres Seq. ID no. 13509504
MPLVRANSCLDSYPDDTIMIYLTLPGSVIPMRVLESDSIESVKLRIQSYRGFVVRNQKLVFGGRELARSNSNMRDYGVSEGNILHLVLKLSDLQVLDVKTTCGKHCRFHVERGRNIGYVKKQISKKRGDFVDPDEQEILYEGEKLEDQSLINDICRNDDSVLHLLVRRSAKVRVKPVEKNFELSIVAPQAKDKKGREAKSIVPPKKLSLEPVVVNSKAKVPLVVKDMIQSASDGLKSGNSPVRSSEGTGGAYFMQGPSGNKFVGVFKPIDEEPMAENNPQGLPLSPNGEGLKKGTKVGEGALREVAAYILDHPKSGNKSMFGEEIGFAGVPPTAMIECLHPGFNHPKGIKTKIGSLQMFTENDGSCEDMGPLSFPVEEVHKISVLDIRLANADRHGGNILMTKDESGKLVLVPIDHGYCLPESFEDCTFEWLYWPQARKPYSAETQEYIRSLDAEEDIDLLKFHGWKMPAETAQTLRISTMLLKKGVERGLTAFEIGTIMCRETLSKKSLVEEMVEEAQEAVLPGTSEAAFLEALSDVMDYHLDHSQEH

SEQ ID NO: 44431 - protein, 531 aa, Arabidopsis thaliana
  peptide (1)..(531): Ceres Seq. ID no. 13509505
MIYLTLPGSVIPMRVLESDSIESVKLRIQSYRGFVVRNQKLVFGGRELARSNSNMRDYGVSEGNILHLVLKLSDLQVLDVKTTCGKHCRFHVERGRNIGYVKKQISKKRGDFVDPDEQEILYEGEKLEDQSLINDICRNDDSVLHLLVRRSAKVRVKPVEKNFELSIVAPQAKDKKGREAKSIVPPKKLSLEPVVVNSKAKVPLVVKDMIQSASDGLKSGNSPVRSSEGTGGAYFMQGPSGNKFVGVFKPIDEEPMAENNPQGLPLSPNGEGLKKGTKVGEGALREVAAYILDHPKSGNKSMFGEEIGFAGVPPTAMIECLHPGFNHPKGIKTKIGSLQMFTENDGSCEDMGPLSFPVEEVHKISVLDIRLANADRHGGNILMTKDESGKLVLVPIDHGYCLPESFEDCTFEWLYWPQARKPYSAETQEYIRSLDAEEDIDLLKFHGWKMPAETAQTLRISTMLLKKGVERGLTAFEIGTIMCRETLSKKSLVEEMVEEAQEAVLPGTSEAAFLEALSDVMDYHLDHSQEH

SEQ ID NO: 44432 - DNA, 1114 bp, Arabidopsis thaliana
  misc_feature (1)..(1114): Ceres Seq. ID no. 13503792
  misc_feature (1)..(1114): Ortholog of  Ceres SEQ ID NO 14308980 as cited in SEQ ID NO 0
aacatctgtcctctcgaggttagggttctttagaaagtttttattctatcaaaacgatcctttggatcttgttatgagagttaattaatttgaagattaatatgttttaaaaacttctaatttttatctttgtcataaaccttttaaattttattcaaacttatagggttttcgatcgtattatttgatagatcgtcgccactaaaacgtatataaacatctctgttttttccttgatttatccttccaaatcttatttaatcgtttttaaaaacctaaaatttccaaattataatcaatggaaacaatagcagttcaaaatgcaccgggtaaacaagtttcgggtttgagaccattcaagaaccctaaaagaaggagttctcgtggttctctttcaagatccggaggaagtttggctcttcctcttaatccaacgtcgtcttggggatcttctccggcatatccgccgccgcatagttactctcagcctcctcttctccctctaccacgtgtcaacagctcaactgttcctctgcaacgcgtcaacagctctcgaccacgtgtcaacaacaactcttctctcaatcgcgttgctcagacaaaagctatttctgaaacacacatgaagaaagcagagttcatcgaatctgcgagactgactcgaaccggttcagtgccgatccaggcgaaccagttgcgtgattttcctgaaggattcgatggctaccccggtccagcgatcatgttattatctccgccaccgagtagtttgcccatgcctaggttttcgatcaaaccgaagcttcgttgcaacgtagaagctgctgggaaaagtgacgtagctaccaataacatccggcgagttttacagctccggtgaaaggtggtgctacgttaacgtacgaataaaaagaagcttatgggctttttaatactttattgggctttgggtctgtcttgttttttaaattgatagaactcttctctactttgtgtgatttgctaagccataacttttcaaaaaggcttcctaggcacaaaatagcctggctgtaatagaatttcaattttatgttccttaataagaaaaaaagtttctaatgatagatcgaat

SEQ ID NO: 44433 - protein, 193 aa, Arabidopsis thaliana
  peptide (1)..(193): Ceres Seq. ID no. 13503793
METIAVQNAPGKQVSGLRPFKNPKRRSSRGSLSRSGGSLALPLNPTSSWGSSPAYPPPHSYSQPPLLPLPRVNSSTVPLQRVNSSRPRVNNNSSLNRVAQTKAISETHMKKAEFIESARLTRTGSVPIQANQLRDFPEGFDGYPGPAIMLLSPPPSSLPMPRFSIKPKLRCNVEAAGKSDVATNNIRRVLQLR

SEQ ID NO: 44434 - DNA, 661 bp, Arabidopsis thaliana
  misc_feature (1)..(661): Ceres Seq. ID no. 13509812
  misc_feature (1)..(661): Ortholog of  Ceres SEQ ID NO 13599603 as cited in SEQ ID NO 0
attactcgttaagactttccactacccattctcattctctcttcaactaatattcttccccggccctcataaagaagcttctcctgttctttattcacattttccaaaattgtatcttcttaaagtatctccaacaaaactaaatcctactaagttaagagatttgaaaatgacaaagataggaggtattcttgtttgtctagtcattgtgggcttagatgtagctgctgcaatcctcggaatccaagctgaagtcgcccaaaatcaggtgaagcacatgaggctttggttatttgagtgcagagagccgagccaggacgcgttcaggctcggtctaggtgcagccgcgatattggtaatggctcatgtcctacttaacttggtcggaggctgtctttgtatttgctctcaagacgagtttcaaagatcttcttccactagacaaatctccatggcttgtcttgtcctcacttggatcgtattcgctgttggatttgggagtatagtgattgggacgatgtcgaacagtaagtcaagatcctcttgtggattcacacatcaccattttctctccattggagggattttgtgttttcttcatgccctcttctgtgttgcttattacgtttctgccactgcggccaaagatgaagctaagtga

SEQ ID NO: 44435 - protein, 219 aa, Arabidopsis thaliana
  peptide (1)..(219): Ceres Seq. ID no. 13509813
LLVKTFHYPFSFSLQLIFFPGPHKEASPVLYSHFPKLYLLKVSPTKLNPTKLRDLKMTKIGGILVCLVIVGLDVAAAILGIQAEVAQNQVKHMRLWLFECREPSQDAFRLGLGAAAILVMAHVLLNLVGGCLCICSQDEFQRSSSTRQISMACLVLTWIVFAVGFGSIVIGTMSNSKSRSSCGFTHHHFLSIGGILCFLHALFCVAYYVSATAAKDEAK

SEQ ID NO: 44436 - protein, 163 aa, Arabidopsis thaliana
  peptide (1)..(163): Ceres Seq. ID no. 13509814
MTKIGGILVCLVIVGLDVAAAILGIQAEVAQNQVKHMRLWLFECREPSQDAFRLGLGAAAILVMAHVLLNLVGGCLCICSQDEFQRSSSTRQISMACLVLTWIVFAVGFGSIVIGTMSNSKSRSSCGFTHHHFLSIGGILCFLHALFCVAYYVSATAAKDEAK

SEQ ID NO: 44437 - protein, 127 aa, Arabidopsis thaliana
  peptide (1)..(127): Ceres Seq. ID no. 13509815
MRLWLFECREPSQDAFRLGLGAAAILVMAHVLLNLVGGCLCICSQDEFQRSSSTRQISMACLVLTWIVFAVGFGSIVIGTMSNSKSRSSCGFTHHHFLSIGGILCFLHALFCVAYYVSATAAKDEAK

SEQ ID NO: 44438 - DNA, 724 bp, Arabidopsis thaliana
  misc_feature (1)..(724): Ceres Seq. ID no. 13646217
  misc_feature (1)..(724): Ortholog of  Ceres SEQ ID NO 12563124 as cited in SEQ ID NO 57104
  misc_feature (1)..(724): Ortholog of  Ceres SEQ ID NO 13598373 as cited in SEQ ID NO 62185
  misc_feature (1)..(724): Ortholog of  Ceres SEQ ID NO 12617639 as cited in SEQ ID NO 65219
gaaaaacatctcactgctcactactctcactgtaatcccttagatcttcttttcaaatttcaatggcgtccggtgatgttgagtatcggtgcttcgttggaggtctagcatgggccactgatgacagagctcttgagactgccttcgctcaatacggcgacgttattgattccaagatcattaacgatcgtgagactggaagatcaaggggattcggattcgtcaccttcaaggatgagaaagccatgaaggatgcgattgagggaatgaacggacaagatctcgatggccgtagcatcactgttaacgaggctcagtcacgaggaagcggtggcggcggaggccaccgtggaggtggtggcggtggataccgcagcggcggtggtggaggttactccggtggaggtggtagctacggaggtggaagacgtgagggaggaggaggatacggtggtggtgaaggaggaggttacggaggaagcggtggtggaggatggtaattcctttaattaggtttgggattaccaatgaatgttctctctctcgcttgttatgcttctacttggttttgtgtgttctctattttgttctggttctgctttagatttgatgtaacagttcgtgattaggtattttggtatctggaaacgtaatgttaagtcacttgtcattctctaaataacaaatttcttcggagatattatctctgttgattgattctatc

SEQ ID NO: 44439 - protein, 145 aa, Arabidopsis thaliana
  peptide (1)..(145): Ceres Seq. ID no. 13646218
MASGDVEYRCFVGGLAWATDDRALETAFAQYGDVIDSKIINDRETGRSRGFGFVTFKDEKAMKDAIEGMNGQDLDGRSITVNEAQSRGSGGGGGHRGGGGGGYRSGGGGGYSGGGGSYGGGRREGGGGYGGGEGGGYGGSGGGGW

SEQ ID NO: 44440 - protein, 84 aa, Arabidopsis thaliana
  peptide (1)..(84): Ceres Seq. ID no. 13646219
MKDAIEGMNGQDLDGRSITVNEAQSRGSGGGGGHRGGGGGGYRSGGGGGYSGGGGSYGGGRREGGGGYGGGEGGGYGGSGGGGW

SEQ ID NO: 44441 - protein, 77 aa, Arabidopsis thaliana
  peptide (1)..(77): Ceres Seq. ID no. 13646220
MNGQDLDGRSITVNEAQSRGSGGGGGHRGGGGGGYRSGGGGGYSGGGGSYGGGRREGGGGYGGGEGGGYGGSGGGGW

SEQ ID NO: 44442 - DNA, 1730 bp, Arabidopsis thaliana
  misc_feature (1)..(1730): Ceres Seq. ID no. 12603677
  misc_feature (1)..(1730): Ortholog of  Ceres SEQ ID NO 15174947 as cited in SEQ ID NO 236
actcttcaacaagaaaatagataaaccaacctctaacttaaaattcaccatcaaaccaagaacaaaggaagaaaccaccaaccactatgatcaactccaaaaatacattcatcgtcgctacaaccatcttatgcctctccatggccatattatccgaaggtcaagctaacccttttctattgcaactcgatcggtgggaaatgttgctaccgagcatcggtatatccgccatgcacatgcaactcctccacaacggcatggttataatgttcgaccgtaccgatttcggtacctcaaatgtttctctacccggaggcatatgtcgttacgaccctactgacaccgcagaaaagttcgattgcagcgcacactcagttctctacgatgttgtctccaacacataccgtcctttgaatgtccaaacagatacatggtgttcttctggtgcggttcttcccaacggaacattggttcaaaccggtggatacaacgatggtgagcgtgctgctcgaatgtttagcccttgtggttatagtgatacatgtgattggattgagtttcctcagtatctatcccaacgtagatggtatgccaccaaccaaatattacccgatggacggatcattgtggtcggaggaagaagacagttcaactatgaactttttccccgacatgattctcggtctagaagctcaagacttgagtttcttagagaaacttcagatggaagtaacgagaacaacttatatccgttcatacatcttttacctgatggaaacttatttgtcttcgctaacacaagatccattgtgttcgattacaaaaagaaccgaatcgtgaaagagtttccagagattccaggtggtgatccaaggaactatccaagcagtggttcttctatactatttccattagatgataccaacgatgctaacgtagaagttgagataatggtatgtggaggctctcctaaaggcggcttctcacgtggattcacacgtgccacctccacatgcgggaggctaaaactatccgatcagagtccaagttgggaaatggaaaccatgccattgccacgtgttatgggagacatgctactcttaccaacaggtgacgtcatcatcgtaaacggagccggagctggcacggccggttgggagaaagcacgtgacccgattatccaacctgtgatatatcaaccgtttgatcatctcttcaccgttatgtccacaccatcacgtcctaggatgtaccattcctcagcgattttattaccagacggtcgggttttagttggtggaagtaatcctcacgtttattacaactttaccaacgtcgagtatccaacggatttaagcctcgaggcttattctccaccatatctatttttcacatccgacccaatacgtcccaagatattattgacaagcgacaaagtattgagttacaagagattgtttaacgtggatttctccatagctcagtttctgaccgttgatcttctctctgtgaggatagttgcaccatctttcactacacactcctttgcgatgaatcagaggatggtaatcttgaagctactctctgtgacgcgtgaccagctaacaaattcttatagagtcagtgcattgggtccatcaacggctgagattgctcctccgggatactatatgatatttctggtgcatgcaggtataccaagctcagccgcttgggtgcagattgagtga

SEQ ID NO: 44443 - protein, 547 aa, Arabidopsis thaliana
  peptide (1)..(547): Ceres Seq. ID no. 12603678
MINSKNTFIVATTILCLSMAILSEGQANPFLLQLDRWEMLLPSIGISAMHMQLLHNGMVIMFDRTDFGTSNVSLPGGICRYDPTDTAEKFDCSAHSVLYDVVSNTYRPLNVQTDTWCSSGAVLPNGTLVQTGGYNDGERAARMFSPCGYSDTCDWIEFPQYLSQRRWYATNQILPDGRIIVVGGRRQFNYELFPRHDSRSRSSRLEFLRETSDGSNENNLYPFIHLLPDGNLFVFANTRSIVFDYKKNRIVKEFPEIPGGDPRNYPSSGSSILFPLDDTNDANVEVEIMVCGGSPKGGFSRGFTRATSTCGRLKLSDQSPSWEMETMPLPRVMGDMLLLPTGDVIIVNGAGAGTAGWEKARDPIIQPVIYQPFDHLFTVMSTPSRPRMYHSSAILLPDGRVLVGGSNPHVYYNFTNVEYPTDLSLEAYSPPYLFFTSDPIRPKILLTSDKVLSYKRLFNVDFSIAQFLTVDLLSVRIVAPSFTTHSFAMNQRMVILKLLSVTRDQLTNSYRVSALGPSTAEIAPPGYYMIFLVHAGIPSSAAWVQIE

SEQ ID NO: 44444 - protein, 529 aa, Arabidopsis thaliana
  peptide (1)..(529): Ceres Seq. ID no. 12603679
MAILSEGQANPFLLQLDRWEMLLPSIGISAMHMQLLHNGMVIMFDRTDFGTSNVSLPGGICRYDPTDTAEKFDCSAHSVLYDVVSNTYRPLNVQTDTWCSSGAVLPNGTLVQTGGYNDGERAARMFSPCGYSDTCDWIEFPQYLSQRRWYATNQILPDGRIIVVGGRRQFNYELFPRHDSRSRSSRLEFLRETSDGSNENNLYPFIHLLPDGNLFVFANTRSIVFDYKKNRIVKEFPEIPGGDPRNYPSSGSSILFPLDDTNDANVEVEIMVCGGSPKGGFSRGFTRATSTCGRLKLSDQSPSWEMETMPLPRVMGDMLLLPTGDVIIVNGAGAGTAGWEKARDPIIQPVIYQPFDHLFTVMSTPSRPRMYHSSAILLPDGRVLVGGSNPHVYYNFTNVEYPTDLSLEAYSPPYLFFTSDPIRPKILLTSDKVLSYKRLFNVDFSIAQFLTVDLLSVRIVAPSFTTHSFAMNQRMVILKLLSVTRDQLTNSYRVSALGPSTAEIAPPGYYMIFLVHAGIPSSAAWVQIE

SEQ ID NO: 44445 - protein, 509 aa, Arabidopsis thaliana
  peptide (1)..(509): Ceres Seq. ID no. 12603680
MLLPSIGISAMHMQLLHNGMVIMFDRTDFGTSNVSLPGGICRYDPTDTAEKFDCSAHSVLYDVVSNTYRPLNVQTDTWCSSGAVLPNGTLVQTGGYNDGERAARMFSPCGYSDTCDWIEFPQYLSQRRWYATNQILPDGRIIVVGGRRQFNYELFPRHDSRSRSSRLEFLRETSDGSNENNLYPFIHLLPDGNLFVFANTRSIVFDYKKNRIVKEFPEIPGGDPRNYPSSGSSILFPLDDTNDANVEVEIMVCGGSPKGGFSRGFTRATSTCGRLKLSDQSPSWEMETMPLPRVMGDMLLLPTGDVIIVNGAGAGTAGWEKARDPIIQPVIYQPFDHLFTVMSTPSRPRMYHSSAILLPDGRVLVGGSNPHVYYNFTNVEYPTDLSLEAYSPPYLFFTSDPIRPKILLTSDKVLSYKRLFNVDFSIAQFLTVDLLSVRIVAPSFTTHSFAMNQRMVILKLLSVTRDQLTNSYRVSALGPSTAEIAPPGYYMIFLVHAGIPSSAAWVQIE

SEQ ID NO: 44446 - DNA, 1447 bp, Arabidopsis thaliana
  misc_feature (1)..(1447): Ceres Seq. ID no. 12462105
  misc_feature (1)..(1447): Ortholog of  Ceres SEQ ID NO 14314280 as cited in SEQ ID NO 57429
  misc_feature (1)..(1447): Ortholog of  Ceres SEQ ID NO 13595870 as cited in SEQ ID NO 62101
  misc_feature (1)..(1447): Ortholog of  Ceres SEQ ID NO 13590241 as cited in SEQ ID NO 63878
  misc_feature (1)..(1447): Ortholog of  Ceres SEQ ID NO 13657939 as cited in SEQ ID NO 66349
acagtgattaactcaggctgctaagggagatggcaacggcgatggcggaggatacgagcttcgagggagaccaactagcttccatgactactgatgacatcggtagagcttctcgtctcttagccaacgagattcgcatcctcaaggaagaatcgcagaggacaaaccttgatttggaatcagtgaaggagaaaataaaggagaaccaggagaagattaagcttaacaaacagcttccttacttagttggcaatatcgttgagattcttgagatgagtccagaggatgatgcagaggaagatggagcgaatatcgatctggactctcagaggaagggaaagtgtgtcgttctaaaaacatcaactcgtcagaccatcttcctccctgttgttggacttgttgatccagatacattgaagcctggggacttagttggagttaacaaagatagttacttgattctggatactttaccttctgagtatgattcaagagtaaaagcaatggaggtcgacgaaaaacctactgaagactacaatgatatagggggactagaaaaacagatacaagaacttgttgaagccattgtgttgccaatgactcataaagagcagttcgaaaagttgggtatccgtccaccaaaaggtgtactcttgtatggtcctcctggaaccggaaagacgttgatggcccgagcttgtgcagcacagacaaatgcaactttcctcaaactagcagggccacaacttgttcagatgttcatcggagatggagcaaaacttgtccgtgatgctttcctgcttgcaaaagagaaatccccttgtattatattcatagatgagattgacgcaatagggacaaagcgttttgatagcgaagttagtggagaccgtgaggtacaaaggacaatgttggagctgctcaaccagcttgatggattcagcagcgatgatcgcattaaggttattgcagcgacaaatcgtgctgatatactagatcctgcccttatgcgttctggtcgtttggatcgtaaaatcgagtttccgcaccccactgaagaagctagaggcaggatcttacagatacattcaaggaaaatgaatgtgaatgcagacgtcaattttgaagagcttgctcggtcaacggatgatttcaatggagctcaactcaaagcagtgtgtgttgaagcgggtatgcttgccctgcgccgggatgcaactgaggtgaaccatgaggatttcaatgaaggtataattcaagtacaagccaagaagaaagcaagcttgaattactacgcctaagtcctcttttatgtacactcttctttctcctctttacattatagaaaacttcaagttgtagtctcaacttttgaatctagaaccccttcaaagtgtggttataattataatagatatcagcttgacatattttgcttattattttc

SEQ ID NO: 44447 - protein, 423 aa, Arabidopsis thaliana
  peptide (1)..(423): Ceres Seq. ID no. 12462106
MATAMAEDTSFEGDQLASMTTDDIGRASRLLANEIRILKEESQRTNLDLESVKEKIKENQEKIKLNKQLPYLVGNIVEILEMSPEDDAEEDGANIDLDSQRKGKCVVLKTSTRQTIFLPVVGLVDPDTLKPGDLVGVNKDSYLILDTLPSEYDSRVKAMEVDEKPTEDYNDIGGLEKQIQELVEAIVLPMTHKEQFEKLGIRPPKGVLLYGPPGTGKTLMARACAAQTNATFLKLAGPQLVQMFIGDGAKLVRDAFLLAKEKSPCIIFIDEIDAIGTKRFDSEVSGDREVQRTMLELLNQLDGFSSDDRIKVIAATNRADILDPALMRSGRLDRKIEFPHPTEEARGRILQIHSRKMNVNADVNFEELARSTDDFNGAQLKAVCVEAGMLALRRDATEVNHEDFNEGIIQVQAKKKASLNYYA

SEQ ID NO: 44448 - protein, 419 aa, Arabidopsis thaliana
  peptide (1)..(419): Ceres Seq. ID no. 12462107
MAEDTSFEGDQLASMTTDDIGRASRLLANEIRILKEESQRTNLDLESVKEKIKENQEKIKLNKQLPYLVGNIVEILEMSPEDDAEEDGANIDLDSQRKGKCVVLKTSTRQTIFLPVVGLVDPDTLKPGDLVGVNKDSYLILDTLPSEYDSRVKAMEVDEKPTEDYNDIGGLEKQIQELVEAIVLPMTHKEQFEKLGIRPPKGVLLYGPPGTGKTLMARACAAQTNATFLKLAGPQLVQMFIGDGAKLVRDAFLLAKEKSPCIIFIDEIDAIGTKRFDSEVSGDREVQRTMLELLNQLDGFSSDDRIKVIAATNRADILDPALMRSGRLDRKIEFPHPTEEARGRILQIHSRKMNVNADVNFEELARSTDDFNGAQLKAVCVEAGMLALRRDATEVNHEDFNEGIIQVQAKKKASLNYYA

SEQ ID NO: 44449 - protein, 405 aa, Arabidopsis thaliana
  peptide (1)..(405): Ceres Seq. ID no. 12462108
MTTDDIGRASRLLANEIRILKEESQRTNLDLESVKEKIKENQEKIKLNKQLPYLVGNIVEILEMSPEDDAEEDGANIDLDSQRKGKCVVLKTSTRQTIFLPVVGLVDPDTLKPGDLVGVNKDSYLILDTLPSEYDSRVKAMEVDEKPTEDYNDIGGLEKQIQELVEAIVLPMTHKEQFEKLGIRPPKGVLLYGPPGTGKTLMARACAAQTNATFLKLAGPQLVQMFIGDGAKLVRDAFLLAKEKSPCIIFIDEIDAIGTKRFDSEVSGDREVQRTMLELLNQLDGFSSDDRIKVIAATNRADILDPALMRSGRLDRKIEFPHPTEEARGRILQIHSRKMNVNADVNFEELARSTDDFNGAQLKAVCVEAGMLALRRDATEVNHEDFNEGIIQVQAKKKASLNYYA

SEQ ID NO: 44450 - DNA, 639 bp, Arabidopsis thaliana; identical to SEQ ID NO: 43771
  misc_feature (1)..(639): Ceres Seq. ID no. 13503788
  misc_feature (1)..(639): Ortholog of  Ceres SEQ ID NO 13595226 as cited in SEQ ID NO 56331
  misc_feature (1)..(639): Ortholog of  Ceres SEQ ID NO 13661903 as cited in SEQ ID NO 61722
  misc_feature (1)..(639): Ortholog of  Ceres SEQ ID NO 15173940 as cited in SEQ ID NO 61934

SEQ ID NO: 44451 - protein, 165 aa, Arabidopsis thaliana; identical to SEQ ID NO: 43772
  peptide (1)..(165): Ceres Seq. ID no. 13503789

SEQ ID NO: 44452 - protein, 143 aa, Arabidopsis thaliana; identical to SEQ ID NO: 43773
  peptide (1)..(143): Ceres Seq. ID no. 13503790

SEQ ID NO: 44453 - protein, 141 aa, Arabidopsis thaliana; identical to SEQ ID NO: 43774
  peptide (1)..(141): Ceres Seq. ID no. 13503791

SEQ ID NO: 44454 - DNA, 1838 bp, Arabidopsis thaliana
  misc_feature (1)..(1838): Ceres Seq. ID no. 12488934
  misc_feature (1)..(1838): Ortholog of  Ceres SEQ ID NO 15172237 as cited in SEQ ID NO 55116
  misc_feature (1)..(1838): Ortholog of  Ceres SEQ ID NO 13657258 as cited in SEQ ID NO 66023
atcttcttctaccggagatcgagaaatagccgacgaagttttgttttttgagtaaaacagtattcgtcggacaaccgaagcgaaatccctaatttcccacaacacgaaataccaatttccccaattcgaaaacaaacacggtctgatgtcagacgcaagagataatgatgaccgtgtggatttcgaggagggtagctacagtgagatggaggatgaagtggaggaggaacaagtagaagagtatgaagaggaggaagaagaagatgatgatgatgatgacgttggcaatcagaatgccgaagaacgtgaggtggaggattatggtgatacaaaaggtggggatatggaagatgttcaggaggaaatagctgaagatgacgacaaccatattgatattgagacagcagatgatgatgagaaaccaccatctcctattgatgatgaagatagggaaaagtattcccaccttctttcacttcctcctcatggttctgaagtttttattggtgggctcccaagggatgttggagaagaggacctgagggatctatgtgaagagataggcgagatctttgaggtgagactgatgaaagatagggactctggtgatagcaaaggctatgcttttgtagctttcaaaaccaaagacgttgcacaaaaggccattgaggagttgcacagtaaagagtttaagggaaaaaccataaggtgctctctttccgaaacgaagaataggttgttcattggtaacataccaaagaactggactgaggatgagtttagaaaagtcatagaggatgttggtcctggagtggagaacatcgagctcataaaagacccaacaaataccactcgtaaccgtggttttgcatttgttttgtactataacaatgcatgtgctgattattcaagacagaaaatgatagattctaattttaagcttgagggtaacgctccaactgtgacttgggcagacccaaaaagctctcctgagcattctgctgctgctgctcaggtgaaagccctttatgtcaagaatattccagagaatacctcaacagagcagctaaaggaactctttcagaggcatggagaagtgaccaaaatcgttacacctcctggaaagggtggaaaacgtgattttgggtttgtccactatgctgaaagatctagtgcattgaaggctgtcaaagataccgagagatatgaagtcaatggtcaaccactagaagttgtgcttgctaaaccccaggctgaaaggaagcatgacccttcttcttattcttacggggctgcacctactcctgccccctttgtgcatcccacgtttggtggttttgctgcggctccttacggtgctatgggtgccggtttgggtattgccggtagttttagtcagccaatgatctatggtagaggagcaatgccaacagggatgcaaatggttccaatgcttcttcccgatggccgagttggctatgttctgcaacagcctggtatgccgatggcagcagcaccaccacaacgaccaagaagaaatgaccggaataacggctcaagcggagggtcaggcagagataacagtcatgaacatgatggtaaccgaggaggccgaaggtaccgaccctactagtaaccatagagaaaaataagcaagtagaaaaagaaaaggagaagtgtattgggatttgtttgtagtttgtttttggagaactttaaaaagctctctctcatgtgttataaaatatgaaatcgaaaccttatggtttctggtttgatatggagactgctggggggataggattgagtgattcgatctttaaattatgagacttttt

SEQ ID NO: 44455 - protein, 495 aa, Arabidopsis thaliana
  peptide (1)..(495): Ceres Seq. ID no. 12488935
MSDARDNDDRVDFEEGSYSEMEDEVEEEQVEEYEEEEEEDDDDDDVGNQNAEEREVEDYGDTKGGDMEDVQEEIAEDDDNHIDIETADDDEKPPSPIDDEDREKYSHLLSLPPHGSEVFIGGLPRDVGEEDLRDLCEEIGEIFEVRLMKDRDSGDSKGYAFVAFKTKDVAQKAIEELHSKEFKGKTIRCSLSETKNRLFIGNIPKNWTEDEFRKVIEDVGPGVENIELIKDPTNTTRNRGFAFVLYYNNACADYSRQKMIDSNFKLEGNAPTVTWADPKSSPEHSAAAAQVKALYVKNIPENTSTEQLKELFQRHGEVTKIVTPPGKGGKRDFGFVHYAERSSALKAVKDTERYEVNGQPLEVVLAKPQAERKHDPSSYSYGAAPTPAPFVHPTFGGFAAAPYGAMGAGLGIAGSFSQPMIYGRGAMPTGMQMVPMLLPDGRVGYVLQQPGMPMAAAPPQRPRRNDRNNGSSGGSGRDNSHEHDGNRGGRRYRPY

SEQ ID NO: 44456 - protein, 475 aa, Arabidopsis thaliana
  peptide (1)..(475): Ceres Seq. ID no. 12488936
MEDEVEEEQVEEYEEEEEEDDDDDDVGNQNAEEREVEDYGDTKGGDMEDVQEEIAEDDDNHIDIETADDDEKPPSPIDDEDREKYSHLLSLPPHGSEVFIGGLPRDVGEEDLRDLCEEIGEIFEVRLMKDRDSGDSKGYAFVAFKTKDVAQKAIEELHSKEFKGKTIRCSLSETKNRLFIGNIPKNWTEDEFRKVIEDVGPGVENIELIKDPTNTTRNRGFAFVLYYNNACADYSRQKMIDSNFKLEGNAPTVTWADPKSSPEHSAAAAQVKALYVKNIPENTSTEQLKELFQRHGEVTKIVTPPGKGGKRDFGFVHYAERSSALKAVKDTERYEVNGQPLEVVLAKPQAERKHDPSSYSYGAAPTPAPFVHPTFGGFAAAPYGAMGAGLGIAGSFSQPMIYGRGAMPTGMQMVPMLLPDGRVGYVLQQPGMPMAAAPPQRPRRNDRNNGSSGGSGRDNSHEHDGNRGGRRYRPY

SEQ ID NO: 44457 - protein, 429 aa, Arabidopsis thaliana
  peptide (1)..(429): Ceres Seq. ID no. 12488937
MEDVQEEIAEDDDNHIDIETADDDEKPPSPIDDEDREKYSHLLSLPPHGSEVFIGGLPRDVGEEDLRDLCEEIGEIFEVRLMKDRDSGDSKGYAFVAFKTKDVAQKAIEELHSKEFKGKTIRCSLSETKNRLFIGNIPKNWTEDEFRKVIEDVGPGVENIELIKDPTNTTRNRGFAFVLYYNNACADYSRQKMIDSNFKLEGNAPTVTWADPKSSPEHSAAAAQVKALYVKNIPENTSTEQLKELFQRHGEVTKIVTPPGKGGKRDFGFVHYAERSSALKAVKDTERYEVNGQPLEVVLAKPQAERKHDPSSYSYGAAPTPAPFVHPTFGGFAAAPYGAMGAGLGIAGSFSQPMIYGRGAMPTGMQMVPMLLPDGRVGYVLQQPGMPMAAAPPQRPRRNDRNNGSSGGSGRDNSHEHDGNRGGRRYRPY

SEQ ID NO: 44458 - DNA, 925 bp, Arabidopsis thaliana
  misc_feature (1)..(925): Ceres Seq. ID no. 12489184
  misc_feature (1)..(925): Ortholog of  Ceres SEQ ID NO 13594363 as cited in SEQ ID NO 60250
  misc_feature (1)..(925): Ortholog of  Ceres SEQ ID NO 15225478 as cited in SEQ ID NO 63805
  misc_feature (1)..(925): Ortholog of  Ceres SEQ ID NO 13596420 as cited in SEQ ID NO 68738
  misc_feature (1)..(925): Ortholog of  Ceres SEQ ID NO 14309260 as cited in SEQ ID NO 0
actcaacactcacttctatatcacagttttctactaactctttccttattcttgtaccatcctaaatcagtaagtccttaacgtacgcaccatgtgtacgttagagaagcgcggcgatctctttctcctaaccctaaccggcgaagacgagcacagattccaccccgacacgatcgcctctgttctctcgcttcttgaacaagcaaagtctcaatccacaaaaggatccgtcctcatcactaccggtcacggaaagttcttctccaatggctttgacctcgcgtgggctcaatccgctggacacggtgctataaaacggatgcaccaaatggtcaaatcctttaaaccggtgttagccgccctcctcgatcttccaatgccgacgatcgccgccttgaacggccacgcggcagcctcggggctgatgtttgcgctgagccacgactacgttttcatgaggaaagaccgtggggttctatatatgagcgaggtggacatcgggctaccggtgccggactacttctcggcgttggtcgtggctaaggttgggtcaggtatcgcgagaagggagctgttactgagcgggaagaagctcaaaggagaagaagcggtggctctcgggatcgtggactcagcggcgcatgatagtgcggaaggtgtggtggaggctacagtgagccttggagaaagtttggccgctaagaaatggaatggtgaggtgtatgcaaccattaggaagagtttgtatccggagctttgtcggatggttgatttaacggcaaataacttggccactcacaacctctagaaactctcattgtcttgttgggagaaaaatggttgaaatatgaatattgccgacaaaagtcaacgtccatttcactaagcacgtatttgtttctcaccaataaaacataattaatct

SEQ ID NO: 44459 - protein, 238 aa, Arabidopsis thaliana
  peptide (1)..(238): Ceres Seq. ID no. 12489185
MCTLEKRGDLFLLTLTGEDEHRFHPDTIASVLSLLEQAKSQSTKGSVLITTGHGKFFSNGFDLAWAQSAGHGAIKRMHQMVKSFKPVLAALLDLPMPTIAALNGHAAASGLMFALSHDYVFMRKDRGVLYMSEVDIGLPVPDYFSALVVAKVGSGIARRELLLSGKKLKGEEAVALGIVDSAAHDSAEGVVEATVSLGESLAAKKWNGEVYATIRKSLYPELCRMVDLTANNLATHNL

SEQ ID NO: 44460 - protein, 162 aa, Arabidopsis thaliana
  peptide (1)..(162): Ceres Seq. ID no. 12489186
MHQMVKSFKPVLAALLDLPMPTIAALNGHAAASGLMFALSHDYVFMRKDRGVLYMSEVDIGLPVPDYFSALVVAKVGSGIARRELLLSGKKLKGEEAVALGIVDSAAHDSAEGVVEATVSLGESLAAKKWNGEVYATIRKSLYPELCRMVDLTANNLATHNL

SEQ ID NO: 44461 - protein, 159 aa, Arabidopsis thaliana
  peptide (1)..(159): Ceres Seq. ID no. 12489187
MVKSFKPVLAALLDLPMPTIAALNGHAAASGLMFALSHDYVFMRKDRGVLYMSEVDIGLPVPDYFSALVVAKVGSGIARRELLLSGKKLKGEEAVALGIVDSAAHDSAEGVVEATVSLGESLAAKKWNGEVYATIRKSLYPELCRMVDLTANNLATHNL

SEQ ID NO: 44462 - DNA, 1158 bp, Arabidopsis thaliana
  misc_feature (1)..(1158): Ceres Seq. ID no. 13503047
  misc_feature (1)..(1158): Ortholog of  Ceres SEQ ID NO 12633896 as cited in SEQ ID NO 0
atctaatttctctcggctctttcatatttattgaatgttctttgaagaagaagaaggcgacgacacaaaaaccttgcatttgcatccatggcgtcgatgccgagcaaacttcttccagtcctagtctgctacgtttttcttttcccctttgcatcatcatctgattattctggggtatctcttccatcttcgtcgcctaaagtctcggtgggcctgtactacgagtctctctgtccctactgctcttccttcattgttaaccacctcgcgaagctcttcgaagacgatctcatatcaatcgtcgatctccatctctctccgtggggcaataccaagctccgttccgataacgtcactgccgtttgccagcatggggcatttgaatgcttcttggataccgtagaagcttgtgcaattgatgcttggcctaaagtaagcgatcatttcccgttcatatactgtgtcgagaagttggtgactgaacataagtatgacaagtgggagacgtgttatgagaagctcaatctcaactcgaaacctgttgcagattgtctcagcagtggacatgggaatgagcttgctttgcactatgctgcagaaacgaatgcgcttcagcctcctcacaagtatgtgccctgggtagtcgtggatggtcagccactttatgaggactatgaaaacttcataagctacatctgcaaggcttacaaaggtaataaagtacctggcgcatgtaccaaatatgcaaccggcaacttcattcgtagtgtcaaattgaaacgctcccctctggtgtcctggaaaggcgtgaataagatgtgggatgtgttggaacgtatcacaacctctttatcgtcatacatcgacatcaccggcctgctatgaacacttcctgtatctttttcccatgtaacaaaccaccccaaaaagctatctagattctgatatttaatgaatgtgtgtaatctttatgtttcatcaaaatgtatgtttgttgggttgtgagaggcctttcaagaatcacatgttgggtaaaaaacctatttcggtttagacgggttttgtttctcttatttgtttcggtgaagttgtagactgtagtatgaaaggagcctatcagggttgacgatggaacagtagtgaggaccgtgacccact

SEQ ID NO: 44463 - protein, 265 aa, Arabidopsis thaliana
  peptide (1)..(265): Ceres Seq. ID no. 13503048
MASMPSKLLPVLVCYVFLFPFASSSDYSGVSLPSSSPKVSVGLYYESLCPYCSSFIVNHLAKLFEDDLISIVDLHLSPWGNTKLRSDNVTAVCQHGAFECFLDTVEACAIDAWPKVSDHFPFIYCVEKLVTEHKYDKWETCYEKLNLNSKPVADCLSSGHGNELALHYAAETNALQPPHKYVPWVVVDGQPLYEDYENFISYICKAYKGNKVPGACTKYATGNFIRSVKLKRSPLVSWKGVNKMWDVLERITTSLSSYIDITGLL

SEQ ID NO: 44464 - protein, 262 aa, Arabidopsis thaliana
  peptide (1)..(262): Ceres Seq. ID no. 13503049
MPSKLLPVLVCYVFLFPFASSSDYSGVSLPSSSPKVSVGLYYESLCPYCSSFIVNHLAKLFEDDLISIVDLHLSPWGNTKLRSDNVTAVCQHGAFECFLDTVEACAIDAWPKVSDHFPFIYCVEKLVTEHKYDKWETCYEKLNLNSKPVADCLSSGHGNELALHYAAETNALQPPHKYVPWVVVDGQPLYEDYENFISYICKAYKGNKVPGACTKYATGNFIRSVKLKRSPLVSWKGVNKMWDVLERITTSLSSYIDITGLL

SEQ ID NO: 44465 - DNA, 1364 bp, Arabidopsis thaliana
  misc_feature (1)..(1364): Ceres Seq. ID no. 12599995
  misc_feature (1)..(1364): Ortholog of  Ceres SEQ ID NO 15226389 as cited in SEQ ID NO 52992
  misc_feature (1)..(1364): Ortholog of  Ceres SEQ ID NO 14312152 as cited in SEQ ID NO 57197
  misc_feature (1)..(1364): Ortholog of  Ceres SEQ ID NO 13664395 as cited in SEQ ID NO 67508
  misc_feature (1)..(1364): Ortholog of  Ceres SEQ ID NO 13662335 as cited in SEQ ID NO 68440
atgccggggaatttagagccgttggatctcggaatccaaataccataccatttcagatgcccaatctcacttgacctaatgtctgatcccgtaaccatctccaccggccaaacttacgaccgaaccagcatcgactcatggatcgctatgggcaacaccacttgtccagtcacacgtgtcgctctctccgacttcactctcatccctaaccacactctccgccgtcttatccaagaatggtgcgtcgctaaccgctctaacggcgtcgaacggattcctacacctaaacaaccggcggatccaatctccgttaggtcacttctcagtcaagcatccgcaattaccggaactcacgtctctgttcgttcacgcgccgccgctattcgtcgtttgagaggattagctagagatagtgagaagaatcgcgttttgatcgctggtcataacgcgagggagattttggtgaggattttgttcgccgatattgaaacgacgtcgttgtcttcggagcttgtttctgagtcgcttgctcttttggttttattgcatatgacggagacggagtgtgaagctgttgcgtcggatcctagtcgggtcgggtttatgacccgattgttgtttgattcttcgattgaaattagggttaacgccgccgcgttgattgagatggtgttgaccggagcgaaatccatggatctgaaattgatcatttccggatctgattcgatattcgaaggcgttctcgatcttctcaagaatccgatttcatcgcggcgagctttgaagatcggaatcaaagcgattttcgctctctgtctcgtgaaacaaacgagacatctagcgatctccgccggagctccggggattttaatcgaccgtctcgcggcggatttcgataggtgtgatacggagcgaggtttagcgacagtggagcttctttgccgattaccagaaggatgtgctgcgtttggtgagcatgctttgacggtgccgctaatggtgaagacgatattaagagtttcagatagagcgacggagtacgcggcgggagcgttgttggctttatgtacggcggaggaacggtgtagagatgaagctgcggcggcgggattggtgacgcagttgttgcttctggtgcagagtgattgtacggagagagcgaagagaaaagctcagatgcttttgaagcttctcagagactcttggcctgacgattctaccgttcattccgacgatttcaatcgtagcgaagtggcgccgttttgagttttttttttttcttgttaattaagaacttaacgatgtaagattattgtaatgtgactttgtaagttgacccttgaaaagaatgttatacatttgct

SEQ ID NO: 44466 - protein, 421 aa, Arabidopsis thaliana
  peptide (1)..(421): Ceres Seq. ID no. 12599996
MPGNLEPLDLGIQIPYHFRCPISLDLMSDPVTISTGQTYDRTSIDSWIAMGNTTCPVTRVALSDFTLIPNHTLRRLIQEWCVANRSNGVERIPTPKQPADPISVRSLLSQASAITGTHVSVRSRAAAIRRLRGLARDSEKNRVLIAGHNAREILVRILFADIETTSLSSELVSESLALLVLLHMTETECEAVASDPSRVGFMTRLLFDSSIEIRVNAAALIEMVLTGAKSMDLKLIISGSDSIFEGVLDLLKNPISSRRALKIGIKAIFALCLVKQTRHLAISAGAPGILIDRLAADFDRCDTERGLATVELLCRLPEGCAAFGEHALTVPLMVKTILRVSDRATEYAAGALLALCTAEERCRDEAAAAGLVTQLLLLVQSDCTERAKRKAQMLLKLLRDSWPDDSTVHSDDFNRSEVAPF

SEQ ID NO: 44467 - protein, 395 aa, Arabidopsis thaliana
  peptide (1)..(395): Ceres Seq. ID no. 12599997
MSDPVTISTGQTYDRTSIDSWIAMGNTTCPVTRVALSDFTLIPNHTLRRLIQEWCVANRSNGVERIPTPKQPADPISVRSLLSQASAITGTHVSVRSRAAAIRRLRGLARDSEKNRVLIAGHNAREILVRILFADIETTSLSSELVSESLALLVLLHMTETECEAVASDPSRVGFMTRLLFDSSIEIRVNAAALIEMVLTGAKSMDLKLIISGSDSIFEGVLDLLKNPISSRRALKIGIKAIFALCLVKQTRHLAISAGAPGILIDRLAADFDRCDTERGLATVELLCRLPEGCAAFGEHALTVPLMVKTILRVSDRATEYAAGALLALCTAEERCRDEAAAAGLVTQLLLLVQSDCTERAKRKAQMLLKLLRDSWPDDSTVHSDDFNRSEVAPF

SEQ ID NO: 44468 - protein, 372 aa, Arabidopsis thaliana
  peptide (1)..(372): Ceres Seq. ID no. 12599998
MGNTTCPVTRVALSDFTLIPNHTLRRLIQEWCVANRSNGVERIPTPKQPADPISVRSLLSQASAITGTHVSVRSRAAAIRRLRGLARDSEKNRVLIAGHNAREILVRILFADIETTSLSSELVSESLALLVLLHMTETECEAVASDPSRVGFMTRLLFDSSIEIRVNAAALIEMVLTGAKSMDLKLIISGSDSIFEGVLDLLKNPISSRRALKIGIKAIFALCLVKQTRHLAISAGAPGILIDRLAADFDRCDTERGLATVELLCRLPEGCAAFGEHALTVPLMVKTILRVSDRATEYAAGALLALCTAEERCRDEAAAAGLVTQLLLLVQSDCTERAKRKAQMLLKLLRDSWPDDSTVHSDDFNRSEVAPF

SEQ ID NO: 44469 - DNA, 1173 bp, Arabidopsis thaliana; identical to SEQ ID NO: 41110
  misc_feature (1)..(1173): Ceres Seq. ID no. 13509224
  misc_feature (1)..(1173): Ortholog of  Ceres SEQ ID NO 14316165 as cited in SEQ ID NO 52560
  misc_feature (1)..(1173): Ortholog of  Ceres SEQ ID NO 13597076 as cited in SEQ ID NO 63571

SEQ ID NO: 44470 - protein, 308 aa, Arabidopsis thaliana; identical to SEQ ID NO: 41111
  peptide (1)..(308): Ceres Seq. ID no. 13509225

SEQ ID NO: 44471 - protein, 285 aa, Arabidopsis thaliana; identical to SEQ ID NO: 41112
  peptide (1)..(285): Ceres Seq. ID no. 13509226

SEQ ID NO: 44472 - DNA, 1675 bp, Arabidopsis thaliana
  misc_feature (1)..(1675): Ceres Seq. ID no. 14306861
  misc_feature (1)..(1675): Ortholog of  Ceres SEQ ID NO 14311203 as cited in SEQ ID NO 53639
  misc_feature (1)..(1675): Ortholog of  Ceres SEQ ID NO 14311175 as cited in SEQ ID NO 60223
  misc_feature (1)..(1675): Ortholog of  Ceres SEQ ID NO 15224727 as cited in SEQ ID NO 64990
  misc_feature (1)..(1675): Ortholog of  Ceres SEQ ID NO 14308023 as cited in SEQ ID NO 65865
  misc_feature (1)..(1675): Ortholog of  Ceres SEQ ID NO 14307972 as cited in SEQ ID NO 66436
  misc_feature (1)..(1675): Ortholog of  Ceres SEQ ID NO 15170175 as cited in SEQ ID NO 67138
  misc_feature (1)..(1675): Ortholog of  Ceres SEQ ID NO 12614670 as cited in SEQ ID NO 68565
acctctatctctctcttctctgggaggaaaaatggagatatcggttgcatcggtaacaatatcagtagttctagctgttgtgtcatggtggatatggagaactttacagtgggtttggtttaagccaaagatgcttgagcattacctgagaagacaaggtcttgccggaacaccttacacgcctctagtcggcgatttgaagaagaatttcagcatgttgtcggaggcaaggtcgaaacccctcaaactaacggatgacatctcacctcgtgtcgtgccttatcccttgcaaatgttcaagacttacggaaggacttactttacatggtttggacctatcccaaccatcacaataatggatcctgagcaaatcaaggaagtgttcaacaaagtttatgatttccaaaagccgcatacatttcctttggccacaattatagctaaaggactcgctaattatgatggtgataaatgggcaaaacaccgaagaatcatcaacccggcttttcatatagagaagatcaagaatatggtacctgcgttccaccagagctgtagggaagttgttggcgaatgggatcagttagtatcggataaagggtcgtcatgtgaggtagacgtttggcctgggcttgtgagtatgactgcagatgtgatctctcgtactgcatttggcagcagctacaaagaagggcagaggatatttgagctccaagcagaactagcacagctcatcattcaagcttttaggaaagctttcatccctggatatagttatctcccaacaaaaagtaacagaagaatgaaagcagcagccagagaaatccaagttatactaagagggatcgtaaacaaaaggttaagggccagagaagctggtgaagcaccaagcgacgatttgctgggaatacttcttgaatcgaatttgaggcaaacggaaggaaacggaatgagtaccgaggatctgatggaggagtgcaagttgttctatttcgccgggcaagagacaacatcagtacttctggtttggacaatggtgctgttaagccaacaccaagattggcaggctcgtgcacgagaagaagtgaagcaagtgtttggcgataaagaacctgatgcagaaggactcaaccagctcaaagttatgacgatgatattatatgaggtccttaggctatatcctccagtaacccagctgactcgagccattcacaaagagctgaagctaggcgatctgaccctaccaggcggtgttcagatcagtctacctattctgctagtccaacacgacatcgagctgtggggaaacgacgcagcagagttcaatcctgacagatttaaagatggtctttcaaaggcaacaaagagccaagtctccttctttccctttgcgtggggaccgaggatatgcataggccagaactttgccctgttagaggcaaaaatggcaatggcattgattctgcggaggttctcgtttgagatttctccttcctatgttcacgcaccatacacagtcatcaccattcacccacagttcggtgctcagcttatcatgcacaagctctaatcagacaacacatttgtgttgttgtcaaatatacaataaacttgttatacagagatgaatcgagatagatcataatacaaaactcaaatctttccttttatgttc

SEQ ID NO: 44473 - protein, 522 aa, Arabidopsis thaliana
  peptide (1)..(522): Ceres Seq. ID no. 14306862
PLSLSSLGGKMEISVASVTISVVLAVVSWWIWRTLQWVWFKPKMLEHYLRRQGLAGTPYTPLVGDLKKNFSMLSEARSKPLKLTDDISPRVVPYPLQMFKTYGRTYFTWFGPIPTITIMDPEQIKEVFNKVYDFQKPHTFPLATIIAKGLANYDGDKWAKHRRIINPAFHIEKIKNMVPAFHQSCREVVGEWDQLVSDKGSSCEVDVWPGLVSMTADVISRTAFGSSYKEGQRIFELQAELAQLIIQAFRKAFIPGYSYLPTKSNRRMKAAAREIQVILRGIVNKRLRAREAGEAPSDDLLGILLESNLRQTEGNGMSTEDLMEECKLFYFAGQETTSVLLVWTMVLLSQHQDWQARAREEVKQVFGDKEPDAEGLNQLKVMTMILYEVLRLYPPVTQLTRAIHKELKLGDLTLPGGVQISLPILLVQHDIELWGNDAAEFNPDRFKDGLSKATKSQVSFFPFAWGPRICIGQNFALLEAKMAMALILRRFSFEISPSYVHAPYTVITIHPQFGAQLIMHKL

SEQ ID NO: 44474 - protein, 512 aa, Arabidopsis thaliana
  peptide (1)..(512): Ceres Seq. ID no. 14306863
MEISVASVTISVVLAVVSWWIWRTLQWVWFKPKMLEHYLRRQGLAGTPYTPLVGDLKKNFSMLSEARSKPLKLTDDISPRVVPYPLQMFKTYGRTYFTWFGPIPTITIMDPEQIKEVFNKVYDFQKPHTFPLATIIAKGLANYDGDKWAKHRRIINPAFHIEKIKNMVPAFHQSCREVVGEWDQLVSDKGSSCEVDVWPGLVSMTADVISRTAFGSSYKEGQRIFELQAELAQLIIQAFRKAFIPGYSYLPTKSNRRMKAAAREIQVILRGIVNKRLRAREAGEAPSDDLLGILLESNLRQTEGNGMSTEDLMEECKLFYFAGQETTSVLLVWTMVLLSQHQDWQARAREEVKQVFGDKEPDAEGLNQLKVMTMILYEVLRLYPPVTQLTRAIHKELKLGDLTLPGGVQISLPILLVQHDIELWGNDAAEFNPDRFKDGLSKATKSQVSFFPFAWGPRICIGQNFALLEAKMAMALILRRFSFEISPSYVHAPYTVITIHPQFGAQLIMHKL

SEQ ID NO: 44475 - protein, 479 aa, Arabidopsis thaliana
  peptide (1)..(479): Ceres Seq. ID no. 14306864
MLEHYLRRQGLAGTPYTPLVGDLKKNFSMLSEARSKPLKLTDDISPRVVPYPLQMFKTYGRTYFTWFGPIPTITIMDPEQIKEVFNKVYDFQKPHTFPLATIIAKGLANYDGDKWAKHRRIINPAFHIEKIKNMVPAFHQSCREVVGEWDQLVSDKGSSCEVDVWPGLVSMTADVISRTAFGSSYKEGQRIFELQAELAQLIIQAFRKAFIPGYSYLPTKSNRRMKAAAREIQVILRGIVNKRLRAREAGEAPSDDLLGILLESNLRQTEGNGMSTEDLMEECKLFYFAGQETTSVLLVWTMVLLSQHQDWQARAREEVKQVFGDKEPDAEGLNQLKVMTMILYEVLRLYPPVTQLTRAIHKELKLGDLTLPGGVQISLPILLVQHDIELWGNDAAEFNPDRFKDGLSKATKSQVSFFPFAWGPRICIGQNFALLEAKMAMALILRRFSFEISPSYVHAPYTVITIHPQFGAQLIMHKL

SEQ ID NO: 44476 - DNA, 1415 bp, Arabidopsis thaliana
  misc_feature (1)..(1415): Ceres Seq. ID no. 14304435
  misc_feature (1)..(1415): Ortholog of  Ceres SEQ ID NO 13596244 as cited in SEQ ID NO 69307
agaaaccaaatgtcgttgataataatagaacactttctttctctctctaaaaagcaaaagtagtctagtcactgatttcttctaatcctccggtggagtgagagatgatatctccgacgttgtttcctcctctgcgctttatttctatgtcttccagtggctgttatcttcacagtccagcgagaactcacctgcgttatctcgccggagtttggtttccgctctctttccgtcttctctctttactctcgaaatgtccccgactcttcttcttcttctccggcggttcggattcgacagccgattcccaaagaagacgaccctcttcttcgactatcttctcgggttaacccgaatctacctcccggttcgacccggaaaatagcttttatgtacttaacgacgtcgcctcttccgttcgcgcctctttgggagatgttcttcgacggaatctccaagaatctttacaatgtctacgttcacgcggatccgacccgagaatacgacccgccgttctccggcgtgttcttgaaccgggtcattcactctaaaccctcgctgagacacactcccactctaactgcggcggcgcgtagactactagcacacgcgcttctcgacgatccattgaattacatgtttgcggttatatcaccttcatgcgtaccaattcgctcctttgacttcacttacaagacattagtctcgtcgcgcaagagcttcatcgagatacttaaagacgagccgtggcagttcgataggtggacggcgattgggagacacgcgatgcttccggaggtgaagctcgaggagtttcggatcgggtctcagttttgggttttgaaacggagacacgcgcgtgtggtggcgcgtgatcggcgtatatgggtgaagtttaaccagacgtgcgtgcgggaagactcgtgttatcctgaagaaagttactttcctacccttcttaatatgcgggatccacgtggatgtgtccccgccacgcttactcacgtggactggactgttaacgacggtggtcacccgaggatgtacgagccggaggaagtcgtgcctgagctggtcttgcggcttagaaagactagaccaagatatggtgaggatggaatcaacggttcggagtggtctaaggttgagcggatggatccgtttctgtttgctaggaagttttcaccgcaggctcttgagccgttgctgggtatggctcgaaccgtcttgttcaatgactcagccggtggtgtgtgaatggtttctctaatggtattgttgtaaattcagttttagttttagtttttttttttttcttttttgtggggaaataataattgtaatttaaatgggtagctgggaaaaacaaaaacccgagtataccattatcgtgagtaaaaaagtaaactcgtcct

SEQ ID NO: 44477 - protein, 288 aa, Arabidopsis thaliana
  peptide (1)..(288): Ceres Seq. ID no. 14304436
MYLTTSPLPFAPLWEMFFDGISKNLYNVYVHADPTREYDPPFSGVFLNRVIHSKPSLRHTPTLTAAARRLLAHALLDDPLNYMFAVISPSCVPIRSFDFTYKTLVSSRKSFIEILKDEPWQFDRWTAIGRHAMLPEVKLEEFRIGSQFWVLKRRHARVVARDRRIWVKFNQTCVREDSCYPEESYFPTLLNMRDPRGCVPATLTHVDWTVNDGGHPRMYEPEEVVPELVLRLRKTRPRYGEDGINGSEWSKVERMDPFLFARKFSPQALEPLLGMARTVLFNDSAGGV

SEQ ID NO: 44478 - protein, 273 aa, Arabidopsis thaliana
  peptide (1)..(273): Ceres Seq. ID no. 14304437
MFFDGISKNLYNVYVHADPTREYDPPFSGVFLNRVIHSKPSLRHTPTLTAAARRLLAHALLDDPLNYMFAVISPSCVPIRSFDFTYKTLVSSRKSFIEILKDEPWQFDRWTAIGRHAMLPEVKLEEFRIGSQFWVLKRRHARVVARDRRIWVKFNQTCVREDSCYPEESYFPTLLNMRDPRGCVPATLTHVDWTVNDGGHPRMYEPEEVVPELVLRLRKTRPRYGEDGINGSEWSKVERMDPFLFARKFSPQALEPLLGMARTVLFNDSAGGV

SEQ ID NO: 44479 - protein, 206 aa, Arabidopsis thaliana
  peptide (1)..(206): Ceres Seq. ID no. 14304438
MFAVISPSCVPIRSFDFTYKTLVSSRKSFIEILKDEPWQFDRWTAIGRHAMLPEVKLEEFRIGSQFWVLKRRHARVVARDRRIWVKFNQTCVREDSCYPEESYFPTLLNMRDPRGCVPATLTHVDWTVNDGGHPRMYEPEEVVPELVLRLRKTRPRYGEDGINGSEWSKVERMDPFLFARKFSPQALEPLLGMARTVLFNDSAGGV

SEQ ID NO: 44480 - DNA, 1283 bp, Arabidopsis thaliana
  misc_feature (1)..(1283): Ceres Seq. ID no. 15174469
  misc_feature (1)..(1283): Ortholog of  Ceres SEQ ID NO 14305026 as cited in SEQ ID NO 52980
  misc_feature (1)..(1283): Ortholog of  Ceres SEQ ID NO 15175670 as cited in SEQ ID NO 55204
  misc_feature (1)..(1283): Ortholog of  Ceres SEQ ID NO 13662391 as cited in SEQ ID NO 68631
ctctggctctctttctcttaacgtgatcataacgtgattcgaaaattggatatagataggtttcttgttggatcttgatccctctggaaaaggaggggagaatagcagttcatgatgggattttgtatctgcccgttggagtcacctgcgagattactatggagtacaagcttcttccgccataagatcatgatcttctaatccttcctacttcttcccatctttttaatcatcttctcgctatctctgcttcctctttctctctgtttcctctttctcagaactcagaagtagttgttgttttatttctgttgatcaaaaatggaatccaattcgtttttcttcgatccatctgcttcacacggcaacagcatgttcttccttgggaatctcaatcccgtcgtccaaggaggaggagcaagatcgatgatgaacatggaggaaacatcaaagcgaaggcccttctttagctcccctgaggatctctacgacgatgacttttacgacgaccagttgcctgaaaagaagcgtcgcctcactaccgaacaagtgcatctgctggagaaaagcttcgagacagagaacaagctagagcctgaacgcaagactcagcttgccaagaagcttggtctacagccaaggcaagtggctgtctggtttcagaatcgccgagctcgttggaaaacaaaacagcttgagagagactacgatcttctcaagtccacttacgaccaacttctttctaactacgactccatcgtcatggacaacgataagctcagatccgaggttacttccctgaccgaaaagcttcagggcaaacaagagacagctaatgaaccacctggtcaagtgcccgaaccaaaccaacttgatccggtttacattaatgcggcagcaatcaaaaccgaggaccggttaagttcagggagcgttgggagcgcggtactagacgacgacgcacctcaactactagacagctgtgactcttacttcccaagcatcgtacccatccaagacaacagcaacgccagtgatcatgacaatgaccggagctgtttcgccgacgtctttgtgcccaccacttcaccgtcgcacgatcatcacggtgaatcattggctttctggggatggccttagaaaaccactctgataataaatgtgtgtttatttaagttcaagagtcatcttcttgttgtttccatgttgacgataattgttgactcgtggaataattccgctgttcaacggtatttttatcagttgcattatatgcttttacg

SEQ ID NO: 44481 - protein, 272 aa, Arabidopsis thaliana
  peptide (1)..(272): Ceres Seq. ID no. 15174470
MESNSFFFDPSASHGNSMFFLGNLNPVVQGGGARSMMNMEETSKRRPFFSSPEDLYDDDFYDDQLPEKKRRLTTEQVHLLEKSFETENKLEPERKTQLAKKLGLQPRQVAVWFQNRRARWKTKQLERDYDLLKSTYDQLLSNYDSIVMDNDKLRSEVTSLTEKLQGKQETANEPPGQVPEPNQLDPVYINAAAIKTEDRLSSGSVGSAVLDDDAPQLLDSCDSYFPSIVPIQDNSNASDHDNDRSCFADVFVPTTSPSHDHHGESLAFWGWP

SEQ ID NO: 44482 - protein, 255 aa, Arabidopsis thaliana
  peptide (1)..(255): Ceres Seq. ID no. 15174471
MFFLGNLNPVVQGGGARSMMNMEETSKRRPFFSSPEDLYDDDFYDDQLPEKKRRLTTEQVHLLEKSFETENKLEPERKTQLAKKLGLQPRQVAVWFQNRRARWKTKQLERDYDLLKSTYDQLLSNYDSIVMDNDKLRSEVTSLTEKLQGKQETANEPPGQVPEPNQLDPVYINAAAIKTEDRLSSGSVGSAVLDDDAPQLLDSCDSYFPSIVPIQDNSNASDHDNDRSCFADVFVPTTSPSHDHHGESLAFWGWP

SEQ ID NO: 44483 - protein, 237 aa, Arabidopsis thaliana
  peptide (1)..(237): Ceres Seq. ID no. 15174472
MMNMEETSKRRPFFSSPEDLYDDDFYDDQLPEKKRRLTTEQVHLLEKSFETENKLEPERKTQLAKKLGLQPRQVAVWFQNRRARWKTKQLERDYDLLKSTYDQLLSNYDSIVMDNDKLRSEVTSLTEKLQGKQETANEPPGQVPEPNQLDPVYINAAAIKTEDRLSSGSVGSAVLDDDAPQLLDSCDSYFPSIVPIQDNSNASDHDNDRSCFADVFVPTTSPSHDHHGESLAFWGWP

SEQ ID NO: 44484 - DNA, 602 bp, Arabidopsis thaliana
  misc_feature (1)..(602): Ceres Seq. ID no. 12466041
  misc_feature (1)..(602): Ortholog of  Ceres SEQ ID NO 12623263 as cited in SEQ ID NO 60988
  misc_feature (1)..(602): Ortholog of  Ceres SEQ ID NO 12635807 as cited in SEQ ID NO 0
ataatcctcaaaaatctcaactttatctcccaaaacacaaaacaaaaaaaaatggcttccactgctctctcaagcgccatcgtcggaacttcattcatccgtcgttccccagctccaatcagtctccgttcccttccatcagccaacacacaatccctcttcggtctcaaatcaggcaccgctcgtggtggacgtgtcacagccatggctacatacaaggtgagctagaggttgagtgtgacgacgacgtctacgttcttgatgctgctgaggaagctggaatcgatttgccttactcttgccgtgctggttcttgttcgagctgtgctggtaaagttgtgtctggatctgttgatcagtctgaccagagtttccttgatgatgaacagatttgtgaagggtttgttctcacttgtgctgcttaccctacctctgatgttaccattgaaacccacaaagaagaagacattgtttaagcctcacctactcaccagcttttgatggtttaaaaatcatgtctttataattgagtttgttgttacaaaactattgttatctgttgttattgttcctggtttggctcaccatcaatcgatgacatt

SEQ ID NO: 44485 - protein, 157 aa, Arabidopsis thaliana
  peptide (1)..(157): Ceres Seq. ID no. 12466042
NPQKSQLYLPKHKTKKNGFHCSLKRHRRNFIHPSFPSSNQSPFPSISQHTIPLRSQIRHRSWWTCHSHGYIQGELEVECDDDVYVLDAAEEAGIDLPYSCRAGSCSSCAGKVVSGSVDQSDQSFLDDEQICEGFVLTCAAYPTSDVTIETHKEEDIV

SEQ ID NO: 44486 - protein, 79 aa, Arabidopsis thaliana
  peptide (1)..(79): Ceres Seq. ID no. 12466043
MLLRKLESICLTLAVLVLVRAVLVKLCLDLLISLTRVSLMMNRFVKGLFSLVLLTLPLMLPLKPTKKKTLFKPHLLTSF

SEQ ID NO: 44487 - DNA, 1381 bp, Arabidopsis thaliana
  misc_feature (1)..(1381): Ceres Seq. ID no. 12489347
  misc_feature (1)..(1381): Ortholog of  Ceres SEQ ID NO 12615296 as cited in SEQ ID NO 62724
  misc_feature (1)..(1381): Ortholog of  Ceres SEQ ID NO 15225093 as cited in SEQ ID NO 65177
  misc_feature (1)..(1381): Ortholog of  Ceres SEQ ID NO 15179532 as cited in SEQ ID NO 0
aaaagctgtctctttagctctgacgttgtttcctgtcgaagtcgcagactcgtcatcacagctcaggcgagtaattctgagtttcttctatctacgcgcaatatctctcaaaggaggcctcttcaaaggtaccacaatcatatcctctcgtttctatctgaagaatcagagagaagagatatatagaggatgcctgtgatctccaaagcttcatctaccaccaccaattcatcgattccttcgtgttctaggattggaggtcagctttgtgtgtggcctggtttgagacaactttgcctcaggaaaagcttattatacggagtaatgtggttattatccatgccactgaaaacattgcgtggagctagaaaaactcttaagattactcacttttgtagcatttccaacatgccatcctcattaaaaatcgaactggtgccctgcagtaaggacaactatgcttatctgttgcacgatgaagacaccggaacagttggagtcgttgatccttctgaggctgcacctgttatagaagcattgagcaggaagaattggaatttaacttacattttgaatactcatcatcatgatgatcacattggggggaatgctgaattgaaagaaaggtatggcgcaaaggtgattggatcagctgtagataaagatcggattcctggaattgacatacttctgaaggatagtgataagtggatgtttgctggccatgaggttcggatacttgacactcctggccatacacaaggccatattagcttctactttcccgggtcagcgacaatattcacaggagacctgatatatagcttatcctgtggtaccctttcagaaggtacccctgagcagatgctttcatcactccaaaagatcgtgtctctaccagacgatacaaatatatactgcggccgtgaaaacacagcaggcaatctcaagtttgctctatccgtagaaccaaagaatgaaactcttcagtcctatgcaactcgagtcgcccatcttcgcagccaggggctcccatcgattccaacgactgtcaaggttgagaaagcgtgtaacccattcctcagaatatcgagcaaagatatccgaaaatctttaagcattccagactcagcaaccgaagctgaagcattgcgtcgtatacagagagccagagatcgtttctgaaaacttgggtatattttcttatttgtatagaaaaatttgcaagtcaatcatcagctgcaaagatcaatattttatatgttttgggctttcttcagttatcatttgaagttgtgtattcaacacaaaaaaatctaaatatttagtttaaactcaattattaaattatgagattttcaagtgtaatgaatgcttcaac

SEQ ID NO: 44488 - protein, 331 aa, Arabidopsis thaliana
  peptide (1)..(331): Ceres Seq. ID no. 12489348
MPVISKASSTTTNSSIPSCSRIGGQLCVWPGLRQLCLRKSLLYGVMWLLSMPLKTLRGARKTLKITHFCSISNMPSSLKIELVPCSKDNYAYLLHDEDTGTVGVVDPSEAAPVIEALSRKNWNLTYILNTHHHDDHIGGNAELKERYGAKVIGSAVDKDRIPGIDILLKDSDKWMFAGHEVRILDTPGHTQGHISFYFPGSATIFTGDLIYSLSCGTLSEGTPEQMLSSLQKIVSLPDDTNIYCGRENTAGNLKFALSVEPKNETLQSYATRVAHLRSQGLPSIPTTVKVEKACNPFLRISSKDIRKSLSIPDSATEAEALRRIQRARDRF

SEQ ID NO: 44489 - protein, 286 aa, Arabidopsis thaliana
  peptide (1)..(286): Ceres Seq. ID no. 12489349
MWLLSMPLKTLRGARKTLKITHFCSISNMPSSLKIELVPCSKDNYAYLLHDEDTGTVGVVDPSEAAPVIEALSRKNWNLTYILNTHHHDDHIGGNAELKERYGAKVIGSAVDKDRIPGIDILLKDSDKWMFAGHEVRILDTPGHTQGHISFYFPGSATIFTGDLIYSLSCGTLSEGTPEQMLSSLQKIVSLPDDTNIYCGRENTAGNLKFALSVEPKNETLQSYATRVAHLRSQGLPSIPTTVKVEKACNPFLRISSKDIRKSLSIPDSATEAEALRRIQRARDRF

SEQ ID NO: 44490 - protein, 281 aa, Arabidopsis thaliana
  peptide (1)..(281): Ceres Seq. ID no. 12489350
MPLKTLRGARKTLKITHFCSISNMPSSLKIELVPCSKDNYAYLLHDEDTGTVGVVDPSEAAPVIEALSRKNWNLTYILNTHHHDDHIGGNAELKERYGAKVIGSAVDKDRIPGIDILLKDSDKWMFAGHEVRILDTPGHTQGHISFYFPGSATIFTGDLIYSLSCGTLSEGTPEQMLSSLQKIVSLPDDTNIYCGRENTAGNLKFALSVEPKNETLQSYATRVAHLRSQGLPSIPTTVKVEKACNPFLRISSKDIRKSLSIPDSATEAEALRRIQRARDRF

SEQ ID NO: 44491 - DNA, 1062 bp, Arabidopsis thaliana
  misc_feature (1)..(1062): Ceres Seq. ID no. 13509522
  misc_feature (1)..(1062): Ortholog of  Ceres SEQ ID NO 14311044 as cited in SEQ ID NO 53643
aaagaggaaaatcccaacaataaagagcaaaagatcttacagctcataatatttcgttaattatcaaattgctaataggtataaagttttgtaatttacttttcaggagaaaaaaatgggtcaagctttgggttgtattcaagttgatcagtcgaatgtagcaatcaaagagacttttgggaaattcgacgaagttcttgagccgggttgtcactgtttgccatggtgtttgggaagtcaagtcgctggtcacctttctttacgtgttcaacagctcgatgttcgctgcgagacaaagactaaggataatgtgtttgtcacggttgttgcttccattcaataccgtgccttagcggagagtgctcaagatgctttttacaagctcagcaacacgaggaatcagattcaagcttatgtctttgatgtgatccgagcaagtgtacctaagctggatctagactctacctttgagcaaaagaatgacattgcaaaaaccgttgagactgagctcgaaaaggctatgtcgcattacgggtatgagattgttcagacactgattgtggatatcgagcctgatgtgcacgtcaagagggcaatgaatgagatcaatgctgcttctagaatgagagaggcagcgagtgagaaagctgaggcagagaagattctgcagatcaagcgtgctgagggagaagctgaatcgaaatacctttcaggtatgggtatagcccgtcagagacaagccattgtggacggtctgagaaacagcgtcctcgccttctccgagtctgttccaggaacatcttccaaagacgtgatggatatggttcttgtgactcagtactttgacacattgaaggaaattggtgcttcttcgaagtcaaactcggtgttcataccgcacggtccaggcgctgttagggacattgcttcacagatcagggatggtcttcttcagggtaactctgctgctgagtagagaaatgtctcaaagtacaaaaaggctttttcagagttttagagttgtgttactacttgctactcagtttatcttttagcggttgg

SEQ ID NO: 44492 - protein, 286 aa, Arabidopsis thaliana; identical to SEQ ID NO: 23094
  peptide (1)..(286): Ceres Seq. ID no. 13509523

SEQ ID NO: 44493 - protein, 151 aa, Arabidopsis thaliana; identical to SEQ ID NO: 23095
  peptide (1)..(151): Ceres Seq. ID no. 13509524

SEQ ID NO: 44494 - DNA, 1602 bp, Arabidopsis thaliana
  misc_feature (1)..(1602): Ceres Seq. ID no. 15174457
  misc_feature (1)..(1602): Ortholog of  Ceres SEQ ID NO 13654409 as cited in SEQ ID NO 68534
aaagaaaaagtctattagagatcgatgaaggattaaagacgatcaataacggagatagagatcgattacaataatggatgaagagtatgatgtgattgtccttgggactggtcttaaggagtgtatccttagtggcctcctctctgtcgatggcctcaaggtactacatatggatagaaacgactactatggaggagaatcatcctctcttaacctcactcagctatggaagcgttttaggggaagtgacactcctgaagaaaatcttggagcaagcagagaatacaatgtcgatatgatcccaaagtttataatggctaatggactccttgttcaaaccctaatccacaccgatgttaccaagtatcttaactttaaggccgttgatggtagctttgtctacaagaaaggcaagatctacaaagtcccagccactgatgtggaagccctgaaatcgccattgatgggtcttttcgagaagcgacgtgcgagaaagttctttatctatgtgcaagactatgatgagaaggatcctaagtctcacgaaggacttgacctaagcaaagtcactgctagagagatcatctcaaagtatggacttgaagatgacacaatcgacttcatagggcatgccttagcgcttcacaacgatgatgactacttggatcaacccgccattgattttgttaagagaatcaagctctatgcggagtctctggctcgattccaaggaggatccccttacatctatccgttgtacggtctaggagagctgccacaggcttttgcacgtttgagtgctgtgtacggtgggacttacatgctcaacaagcccgaatgcaaggtagagtttgatggttctggaaaagctattggtgtcacttctgcaggagaaactgctaaatgcaagaaagttgtatgtgatccttcttacctgtctgaaaaggttaagaaagttggaaaagtaactcgagcggtgtgtataatgagccatcctattccagacacaaatgatgctcactcggttcaaatcattcttcctcagaagcaactcggtcgcaaatcagacatgtacttgttctgttgctcatacgctcacaatgtggcaccaaagggcaaatacatagcttttgtctctgcagaagctgaaactgacaatccagaagaggagcttaaacccggaatcgaattgcttggacctactgatgagatcttctatcattcttatgacacatacgttccaaccaatattcaagaagaagataactgtttcatctctgctacttacgatgcaacaacacatttcgagagtacagttgtagatgtacttgacatgtacaccaagatcactggaaagactcttgatttgtctgtggacttgagtgctgcaagtgctgctgcagagaattgataacttgcgtttttccttccgctgagtggttttaaattgcaagtgattgtttatttttctattggataaagacataaagttcaaagtaacacaagtttgcgtttttgttcatcttacttaaaacactggttgattttgctttcatttgtattttttttttttgagaaatacttacctttctaagtttattt

SEQ ID NO: 44495 - protein, 445 aa, Arabidopsis thaliana
  peptide (1)..(445): Ceres Seq. ID no. 15174458
MDEEYDVIVLGTGLKECILSGLLSVDGLKVLHMDRNDYYGGESSSLNLTQLWKRFRGSDTPEENLGASREYNVDMIPKFIMANGLLVQTLIHTDVTKYLNFKAVDGSFVYKKGKIYKVPATDVEALKSPLMGLFEKRRARKFFIYVQDYDEKDPKSHEGLDLSKVTAREIISKYGLEDDTIDFIGHALALHNDDDYLDQPAIDFVKRIKLYAESLARFQGGSPYIYPLYGLGELPQAFARLSAVYGGTYMLNKPECKVEFDGSGKAIGVTSAGETAKCKKVVCDPSYLSEKVKKVGKVTRAVCIMSHPIPDTNDAHSVQIILPQKQLGRKSDMYLFCCSYAHNVAPKGKYIAFVSAEAETDNPEEELKPGIELLGPTDEIFYHSYDTYVPTNIQEEDNCFISATYDATTHFESTVVDVLDMYTKITGKTLDLSVDLSAASAAAEN

SEQ ID NO: 44496 - protein, 413 aa, Arabidopsis thaliana
  peptide (1)..(413): Ceres Seq. ID no. 15174459
MDRNDYYGGESSSLNLTQLWKRFRGSDTPEENLGASREYNVDMIPKFIMANGLLVQTLIHTDVTKYLNFKAVDGSFVYKKGKIYKVPATDVEALKSPLMGLFEKRRARKFFIYVQDYDEKDPKSHEGLDLSKVTAREIISKYGLEDDTIDFIGHALALHNDDDYLDQPAIDFVKRIKLYAESLARFQGGSPYIYPLYGLGELPQAFARLSAVYGGTYMLNKPECKVEFDGSGKAIGVTSAGETAKCKKVVCDPSYLSEKVKKVGKVTRAVCIMSHPIPDTNDAHSVQIILPQKQLGRKSDMYLFCCSYAHNVAPKGKYIAFVSAEAETDNPEEELKPGIELLGPTDEIFYHSYDTYVPTNIQEEDNCFISATYDATTHFESTVVDVLDMYTKITGKTLDLSVDLSAASAAAEN

SEQ ID NO: 44497 - protein, 371 aa, Arabidopsis thaliana
  peptide (1)..(371): Ceres Seq. ID no. 15174460
MIPKFIMANGLLVQTLIHTDVTKYLNFKAVDGSFVYKKGKIYKVPATDVEALKSPLMGLFEKRRARKFFIYVQDYDEKDPKSHEGLDLSKVTAREIISKYGLEDDTIDFIGHALALHNDDDYLDQPAIDFVKRIKLYAESLARFQGGSPYIYPLYGLGELPQAFARLSAVYGGTYMLNKPECKVEFDGSGKAIGVTSAGETAKCKKVVCDPSYLSEKVKKVGKVTRAVCIMSHPIPDTNDAHSVQIILPQKQLGRKSDMYLFCCSYAHNVAPKGKYIAFVSAEAETDNPEEELKPGIELLGPTDEIFYHSYDTYVPTNIQEEDNCFISATYDATTHFESTVVDVLDMYTKITGKTLDLSVDLSAASAAAEN

SEQ ID NO: 44498 - DNA, 1620 bp, Arabidopsis thaliana
  misc_feature (1)..(1620): Ceres Seq. ID no. 14306838
  misc_feature (1)..(1620): Ortholog of  Ceres SEQ ID NO 14311854 as cited in SEQ ID NO 51455
  misc_feature (1)..(1620): Ortholog of  Ceres SEQ ID NO 14313097 as cited in SEQ ID NO 58902
atcttcttgctttcttcacttcttcaactctttgagttatttatttccagaagcttcatagtttctggaaaatgctaatccactagcggaataaaagacagatctttaatccactatagaaaccgcgttttctgaaaatgcggttgcgttttccgatgaaatctgccgttttagcgtttgctatctttctggtgtttattccactgttttccgtcggaatacggatgattccgggaagactcaccgccgtatccgccaccgtcggaaatggctttgatctggggtcgttcgtggaagctccggagtacagaaacggcaaggagtgcgtgtctcaatcgttaaacagagagaacttcgtgtcgtcttgcgacgcttcgttagttcatgtagctatgacgcttgactcagagtacttacgtggctcaatcgcagccgttcattccatgctccgccacgcgtcatgtccagaaaacgtcttcttccatctcatcgctgcagagtttgacccggcgagtccacgcgttctgagtcaactcgtccgatctactttcccgtcgctaaacttcaaagtatacattttccgggaagatacggtgatcaaccttatctcttcttcaatcagacaagctttagagaatccattgaactatgctcggaactacctcggagatattcttgatccatgcgtagacagagtcatttacctagactcggacatcatcgtcgtcgacgacataacaaagctttggaacacgactttaacagagtcaagaatcatcggagctccggagtattgtcacgctaacttcacaaagtacttcacttcagggttctggtccgacccggctttacccggattcttctcgggtcgaaagccttgttatttcaacacgggtgtgatggtgatggatctagttagatggagagaaggaaactacagagaaaagcttgaaacttggatgcagatacagaagaagaagagaatctacgatttgggttctttgcctccgtttcttctagtcttcgcagggaacgttgaagcaattgatcataggtggaaccaacatggtctaggaggagacaatgtacgaggaagttgtaggtctttgcataaaggaccagtgagtttgttgcattggagtgggaaaggtaagccatgggtgagacttgatgagaagagaccgtgtccgttggatcatttatgggaaccgtatgatttatatgagcataagattgaaagagctaaagatcagtctttgtttgggttctcttctttgtctgagttaacagaagattcaagctttttctgaagagttgtgtaagtcaacaacattctttttacttgtttttgtagttttgggttattacaaatacattgttgagttgttgagagatatatttttttgactgttggttgtgtaaaaaattgactagtgagaaaagagtttgtagaagctattgatgaggactagttaggagaattttttgtttggaatttgtattttgttgtgttctttccctaaatggttatgttgatctcaattttctgtatgtggagtcttttcaagaatatgcagcaagtgttgttagcctgaaataaaacccaagtttgttaaactg

SEQ ID NO: 44499 - protein, 390 aa, Arabidopsis thaliana
  peptide (1)..(390): Ceres Seq. ID no. 14306839
MRLRFPMKSAVLAFAIFLVFIPLFSVGIRMIPGRLTAVSATVGNGFDLGSFVEAPEYRNGKECVSQSLNRENFVSSCDASLVHVAMTLDSEYLRGSIAAVHSMLRHASCPENVFFHLIAAEFDPASPRVLSQLVRSTFPSLNFKVYIFREDTVINLISSSIRQALENPLNYARNYLGDILDPCVDRVIYLDSDIIVVDDITKLWNTTLTESRIIGAPEYCHANFTKYFTSGFWSDPALPGFFSGRKPCYFNTGVMVMDLVRWREGNYREKLETWMQIQKKKRIYDLGSLPPFLLVFAGNVEAIDHRWNQHGLGGDNVRGSCRSLHKGPVSLLHWSGKGKPWVRLDEKRPCPLDHLWEPYDLYEHKIERAKDQSLFGFSSLSELTEDSSFF

SEQ ID NO: 44500 - protein, 384 aa, Arabidopsis thaliana
  peptide (1)..(384): Ceres Seq. ID no. 14306840
MKSAVLAFAIFLVFIPLFSVGIRMIPGRLTAVSATVGNGFDLGSFVEAPEYRNGKECVSQSLNRENFVSSCDASLVHVAMTLDSEYLRGSIAAVHSMLRHASCPENVFFHLIAAEFDPASPRVLSQLVRSTFPSLNFKVYIFREDTVINLISSSIRQALENPLNYARNYLGDILDPCVDRVIYLDSDIIVVDDITKLWNTTLTESRIIGAPEYCHANFTKYFTSGFWSDPALPGFFSGRKPCYFNTGVMVMDLVRWREGNYREKLETWMQIQKKKRIYDLGSLPPFLLVFAGNVEAIDHRWNQHGLGGDNVRGSCRSLHKGPVSLLHWSGKGKPWVRLDEKRPCPLDHLWEPYDLYEHKIERAKDQSLFGFSSLSELTEDSSFF

SEQ ID NO: 44501 - protein, 361 aa, Arabidopsis thaliana
  peptide (1)..(361): Ceres Seq. ID no. 14306841
MIPGRLTAVSATVGNGFDLGSFVEAPEYRNGKECVSQSLNRENFVSSCDASLVHVAMTLDSEYLRGSIAAVHSMLRHASCPENVFFHLIAAEFDPASPRVLSQLVRSTFPSLNFKVYIFREDTVINLISSSIRQALENPLNYARNYLGDILDPCVDRVIYLDSDIIVVDDITKLWNTTLTESRIIGAPEYCHANFTKYFTSGFWSDPALPGFFSGRKPCYFNTGVMVMDLVRWREGNYREKLETWMQIQKKKRIYDLGSLPPFLLVFAGNVEAIDHRWNQHGLGGDNVRGSCRSLHKGPVSLLHWSGKGKPWVRLDEKRPCPLDHLWEPYDLYEHKIERAKDQSLFGFSSLSELTEDSSFF

SEQ ID NO: 44502 - DNA, 1123 bp, Arabidopsis thaliana
  misc_feature (1)..(1123): Ceres Seq. ID no. 13509866
  misc_feature (1)..(1123): Ortholog of  Ceres SEQ ID NO 12466401 as cited in SEQ ID NO 20698
  misc_feature (1)..(1123): Ortholog of  Ceres SEQ ID NO 15224731 as cited in SEQ ID NO 63650
aaacacgccactaggagctaccatctctgttttattgctgcttctgcttcctcttccattactcgtcttaaaacaaaggagaaagagtcaagagacatgcatgcgaagacagactcggaggcaacaagcatcgacgcagcggctttgtctccgccgcgttcagcgattagacctctttactatgtacagagtccatcaaaccatgacgtggagaagatgtcatttggttctggttgcagcctaatgggttcacctacacatccacattactaccattgctcaccaatccatcactcccgtgagtcatccacctctcgcttctctgaccgtgctctcctctcttacaagtccatccgtgaacgtcgccgatacatcaacgacggagacgacaaaactgacggcggagatgacgacgacccgtttcggaatgtgcgactctacgtttggttgctcctctccgtaatcttcttgttcacagtcttctctcttatactctggggtgctagcaaatcctaccctcccaaagttactgtaaaggggatgctggtgagggacttgaacttgcaggcagggaacgatcttagcggagtgcctacggacatgttgtctcttaattcgacggtcaggatatattaccgtaacccatcaactttctttgccgtccacgtcactgcttctcctcttctccttcactactccaacctcctactatcctccggtgagatgaacaagttcacggttggtagaaatggcgaaacgaacgtagtgacggtggtgcaaggccatcagattcccctctacggtggtgtttctttccatcttgatacactctccctgccgcttaatctcactatcgtcctccattcaaaagcttacattttgggaagactcgtcacctccaagttctatacaaggatcatctgctcattcactctcgacgccaaccatctcccaaaatccatctctcttctccgctcctgtattccttaacactgattacacgtgtgtggatgtgtgttcttgtatcttttgccatcaaatattttaatccatcaagtacaacatcaacatttntacatgccacagtcaaataagtgatcacatatatagatgacaccgcttt

SEQ ID NO: 44503 - protein, 329 aa, Arabidopsis thaliana
  peptide (1)..(329): Ceres Seq. ID no. 13509867
KHATRSYHLCFIAASASSSITRLKTKEKESRDMHAKTDSEATSIDAAALSPPRSAIRPLYYVQSPSNHDVEKMSFGSGCSLMGSPTHPHYYHCSPIHHSRESSTSRFSDRALLSYKSIRERRRYINDGDDKTDGGDDDDPFRNVRLYVWLLLSVIFLFTVFSLILWGASKSYPPKVTVKGMLVRDLNLQAGNDLSGVPTDMLSLNSTVRIYYRNPSTFFAVHVTASPLLLHYSNLLLSSGEMNKFTVGRNGETNVVTVVQGHQIPLYGGVSFHLDTLSLPLNLTIVLHSKAYILGRLVTSKFYTRIICSFTLDANHLPKSISLLRSCIP

SEQ ID NO: 44504 - protein, 297 aa, Arabidopsis thaliana
  peptide (1)..(297): Ceres Seq. ID no. 13509868
MHAKTDSEATSIDAAALSPPRSAIRPLYYVQSPSNHDVEKMSFGSGCSLMGSPTHPHYYHCSPIHHSRESSTSRFSDRALLSYKSIRERRRYINDGDDKTDGGDDDDPFRNVRLYVWLLLSVIFLFTVFSLILWGASKSYPPKVTVKGMLVRDLNLQAGNDLSGVPTDMLSLNSTVRIYYRNPSTFFAVHVTASPLLLHYSNLLLSSGEMNKFTVGRNGETNVVTVVQGHQIPLYGGVSFHLDTLSLPLNLTIVLHSKAYILGRLVTSKFYTRIICSFTLDANHLPKSISLLRSCIP

SEQ ID NO: 44505 - protein, 257 aa, Arabidopsis thaliana
  peptide (1)..(257): Ceres Seq. ID no. 13509869
MSFGSGCSLMGSPTHPHYYHCSPIHHSRESSTSRFSDRALLSYKSIRERRRYINDGDDKTDGGDDDDPFRNVRLYVWLLLSVIFLFTVFSLILWGASKSYPPKVTVKGMLVRDLNLQAGNDLSGVPTDMLSLNSTVRIYYRNPSTFFAVHVTASPLLLHYSNLLLSSGEMNKFTVGRNGETNVVTVVQGHQIPLYGGVSFHLDTLSLPLNLTIVLHSKAYILGRLVTSKFYTRIICSFTLDANHLPKSISLLRSCIP

SEQ ID NO: 44506 - DNA, 1736 bp, Arabidopsis thaliana
  misc_feature (1)..(1736): Ceres Seq. ID no. 13509533
  misc_feature (1)..(1736): Ortholog of  Ceres SEQ ID NO 13532807 as cited in SEQ ID NO 53012
  misc_feature (1)..(1736): Ortholog of  Ceres SEQ ID NO 13663060 as cited in SEQ ID NO 60964
  misc_feature (1)..(1736): Ortholog of  Ceres SEQ ID NO 13500573 as cited in SEQ ID NO 67431
  misc_feature (1)..(1736): Ortholog of  Ceres SEQ ID NO 13656501 as cited in SEQ ID NO 69206
gttgtcctaaaattagggttcttccttgtgaatattgcttgatctaggaaactaatcaggatctgggtttgtcttttggatctagggttttattatagcatttctgggttctttgttgaccaagaagaagatttgtattgatggaatgttgttgatgttgttgtgaacagtgagaaatcaataagatgttggagaaagagtttttcacggagtatggtgaagcaagtcaatatcagatccaagaagttgttggcaaaggaagctacggagttgttgcttctgcggaatgtccacacacgggaggcaaagtagccatcaagaagatgacaaatgtgtttgaacatgtctcagatgctattcgtatcctcagagagatcaagcttctcaggcttcttcgacatcctgatatcgtggagatcaagcatatcatgcttcctccttgtcgcaaggaattcaaagatatatatgttgtttttgagttgatggagtctgatcttcaccacgttcttaaggtaaatgacgacctcactcctcagcatcatcaattcttcttgtaccaacttcttcgtggcttaaaattcatgcactcagctcatgtgttccatagagatctgaagcctaagaacatcctcgctaatgctgattgcaaaatcaagatctgtgatttaggacttgctcgtgtctcctttactgattccccttctgctgtgttttggactgactacgttgctacaagatggtaccgtgcgccagagctctgtggttccttctattctaactacacgccggcgattgacatgtggagtgttgggtgcatatttgcagagatgctaactggaaaacctttgtttcctggcaaaaacgttgtgcaccagctagaactcgtgactgatctgcttggaactccgtcgccgataactctatccaggattcggaatgagaaggctagaaagtatttgggaaacatgaggcgaaaggatcctgtacctttcacccataaattccccaatatcgatcctgtggcgctgaagttacttcagcgtttgatcgcttttgacccaaaggaccgtccctctgcagaagaggcattggctgatccgtattttcaaggattggcaaatgtggactatgaaccatcgaggcaacctatctcgaaacttgagtttgagtttgagaggaggaaattgactcgcgatgacgtgagggaactcatgtacagagaggaatctcttaaaacttttttttttgttctctttctggatatgaaacagattttggagtatcatccacagatgttgcaagagtatctacaaggagaagagaacataaactctcattttctatacccaagagaaagtgtgtcttactttggtgaatcaatcttgatatccagcggagttgatcagttcaaacaagagtttgcccgactcgaagaacacaacgacgatgaagaggaacacaactccccaccacatcagagaaagtacacttcactccctagagaacgggtgtgctcatcagaagacgaaggttctgattcagttcatgctcaatcgtcttcagcttcagtggtgtttacacctccacagactccaaacacagcaactggcttatcatcacagaaggcgtcacaagtagacaaagcagcaactccggtaaaacggtctgcatgtctaatgaggagtgatagtatctgtgcttcaagatgtgttggtgtctcctctgcagtgtcatag

SEQ ID NO: 44507 - protein, 516 aa, Arabidopsis thaliana
  peptide (1)..(516): Ceres Seq. ID no. 13509534
MLEKEFFTEYGEASQYQIQEVVGKGSYGVVASAECPHTGGKVAIKKMTNVFEHVSDAIRILREIKLLRLLRHPDIVEIKHIMLPPCRKEFKDIYVVFELMESDLHHVLKVNDDLTPQHHQFFLYQLLRGLKFMHSAHVFHRDLKPKNILANADCKIKICDLGLARVSFTDSPSAVFWTDYVATRWYRAPELCGSFYSNYTPAIDMWSVGCIFAEMLTGKPLFPGKNVVHQLELVTDLLGTPSPITLSRIRNEKARKYLGNMRRKDPVPFTHKFPNIDPVALKLLQRLIAFDPKDRPSAEEALADPYFQGLANVDYEPSRQPISKLEFEFERRKLTRDDVRELMYREESLKTFFFVLFLDMKQILEYHPQMLQEYLQGEENINSHFLYPRESVSYFGESILISSGVDQFKQEFARLEEHNDDEEEHNSPPHQRKYTSLPRERVCSSEDEGSDSVHAQSSSASVVFTPPQTPNTATGLSSQKASQVDKAATPVKRSACLMRSDSICASRCVGVSSAVS

SEQ ID NO: 44508 - protein, 470 aa, Arabidopsis thaliana
  peptide (1)..(470): Ceres Seq. ID no. 13509535
MTNVFEHVSDAIRILREIKLLRLLRHPDIVEIKHIMLPPCRKEFKDIYVVFELMESDLHHVLKVNDDLTPQHHQFFLYQLLRGLKFMHSAHVFHRDLKPKNILANADCKIKICDLGLARVSFTDSPSAVFWTDYVATRWYRAPELCGSFYSNYTPAIDMWSVGCIFAEMLTGKPLFPGKNVVHQLELVTDLLGTPSPITLSRIRNEKARKYLGNMRRKDPVPFTHKFPNIDPVALKLLQRLIAFDPKDRPSAEEALADPYFQGLANVDYEPSRQPISKLEFEFERRKLTRDDVRELMYREESLKTFFFVLFLDMKQILEYHPQMLQEYLQGEENINSHFLYPRESVSYFGESILISSGVDQFKQEFARLEEHNDDEEEHNSPPHQRKYTSLPRERVCSSEDEGSDSVHAQSSSASVVFTPPQTPNTATGLSSQKASQVDKAATPVKRSACLMRSDSICASRCVGVSSAVS

SEQ ID NO: 44509 - protein, 435 aa, Arabidopsis thaliana
  peptide (1)..(435): Ceres Seq. ID no. 13509536
MLPPCRKEFKDIYVVFELMESDLHHVLKVNDDLTPQHHQFFLYQLLRGLKFMHSAHVFHRDLKPKNILANADCKIKICDLGLARVSFTDSPSAVFWTDYVATRWYRAPELCGSFYSNYTPAIDMWSVGCIFAEMLTGKPLFPGKNVVHQLELVTDLLGTPSPITLSRIRNEKARKYLGNMRRKDPVPFTHKFPNIDPVALKLLQRLIAFDPKDRPSAEEALADPYFQGLANVDYEPSRQPISKLEFEFERRKLTRDDVRELMYREESLKTFFFVLFLDMKQILEYHPQMLQEYLQGEENINSHFLYPRESVSYFGESILISSGVDQFKQEFARLEEHNDDEEEHNSPPHQRKYTSLPRERVCSSEDEGSDSVHAQSSSASVVFTPPQTPNTATGLSSQKASQVDKAATPVKRSACLMRSDSICASRCVGVSSAVS

SEQ ID NO: 44510 - DNA, 928 bp, Arabidopsis thaliana
  misc_feature (1)..(928): Ceres Seq. ID no. 13575451
  misc_feature (1)..(928): Ortholog of  Ceres SEQ ID NO 15175941 as cited in SEQ ID NO 1355
  misc_feature (1)..(928): Ortholog of  Ceres SEQ ID NO 13661642 as cited in SEQ ID NO 61598
atctacaaacattaaatccacctgaactagaacagaaagagagagaaactattatttcagcaaaccataccaacaaaaaagacagagatcttttagttaccttatccagtttcttgaaacagagtactcttctgatcaatgaactcattttctgctttttctgaaatgtttggctccgattacgagtcttcggtttcctcaggcggtgattatattccgacgcttgcgagcagctgccccaagaaaccggcgggtcgtaagaagtttcgtgagactcgtcacccaatatacagaggagttcgtcggagaaactccggtaagtgggtttgtgaggttagagaaccaaacaagaaaacaaggatttggctcggaacatttcaaaccgctgagatggcagctcgagctcacgacgttgccgctttagcccttcgtggccgatcagcctgtctcaatttcgctgactcggcttggagactccgaatcccggaatcaacttgcgctaaggacatccaaaaggcggcggctgaagctgcgttggcgtttcaggatgagatgtgtgatgcgacgacggatcatggcttcgacatggaggagacgttggtggaggctatttacacggcggaacagagcgaaaatgcgttttatatgcacgatgaggcgatgtttgagatgccgagtttgttggctaatatggcagaagggatgcttttgccgcttccgtccgtacagtggaatcataatcatgaagtcgacggcgatgatgacgacgtatcgttatggagttattaaaactcagattattatttccatttttagtacgatactttttattttattattatttttagatccttttttagaatggaatcttcattatgtttgtaaaactgagaaacgagtgtaaattaaattgattcagtttcagtat

SEQ ID NO: 44511 - protein, 216 aa, Arabidopsis thaliana
  peptide (1)..(216): Ceres Seq. ID no. 13575452
MNSFSAFSEMFGSDYESSVSSGGDYIPTLASSCPKKPAGRKKFRETRHPIYRGVRRRNSGKWVCEVREPNKKTRIWLGTFQTAEMAARAHDVAALALRGRSACLNFADSAWRLRIPESTCAKDIQKAAAEAALAFQDEMCDATTDHGFDMEETLVEAIYTAEQSENAFYMHDEAMFEMPSLLANMAEGMLLPLPSVQWNHNHEVDGDDDDVSLWSY

SEQ ID NO: 44512 - protein, 207 aa, Arabidopsis thaliana
  peptide (1)..(207): Ceres Seq. ID no. 13575453
MFGSDYESSVSSGGDYIPTLASSCPKKPAGRKKFRETRHPIYRGVRRRNSGKWVCEVREPNKKTRIWLGTFQTAEMAARAHDVAALALRGRSACLNFADSAWRLRIPESTCAKDIQKAAAEAALAFQDEMCDATTDHGFDMEETLVEAIYTAEQSENAFYMHDEAMFEMPSLLANMAEGMLLPLPSVQWNHNHEVDGDDDDVSLWSY

SEQ ID NO: 44513 - protein, 132 aa, Arabidopsis thaliana
  peptide (1)..(132): Ceres Seq. ID no. 13575454
MAARAHDVAALALRGRSACLNFADSAWRLRIPESTCAKDIQKAAAEAALAFQDEMCDATTDHGFDMEETLVEAIYTAEQSENAFYMHDEAMFEMPSLLANMAEGMLLPLPSVQWNHNHEVDGDDDDVSLWSY

SEQ ID NO: 44514 - DNA, 1031 bp, Arabidopsis thaliana
  misc_feature (1)..(1031): Ceres Seq. ID no. 12462090
  misc_feature (1)..(1031): Ortholog of  Ceres SEQ ID NO 13639117 as cited in SEQ ID NO 56691
gtcagccatggcaaagacagagctacaacgatctctctctcttttcttcttcttctgtgtctgtctttaaatagagtctctttgaaacgaagcagctttgtcctgttctgatatccatggctttaccttcgtgcttaaagactggagctttaatgtctccggccactggatttaatttttccggcagtcttatgaagtcagacagcggcttcgccgttccgacaaagttacagagtactcgaaaaggtgatcgagagagattgagagtccaagctattttcagtttccctcctgcgtttctgacaagaaacggtcgagctgagaaacagaaacagctcaaacaagaacttcttgaagccattgagcctcttgaacgtggtgctacggcctcgcctgatgaccagcttcggattgatcagttagcgcgtaaagtggaagcagttaatcccaccaaggagcctttgaagtctgatttggtcaatggaaaatgggagctcatttatacaacctctgcttcgattttgcaggcaaagaaaccaaggttcttaagatcaataaccaactaccaatctatcaatgtggatacacttaaggtgcaaaacatggagacttggcctttctataactcggtaactggagacataaaacccctcaattcgaagaaggttgctgtgaaactccaagtgtttaaaattctcggatttattcctataaaagcacctgatagcgcccgcggtgaacttgagattacctatgtggacgaggaactacggttatcaagaggtgacaaagggaacttgtttatattgaagatgtttgatcccacttatcgaatccctctttgatctaccaaacaaatggtaccgagccatccatcatacatacttgctacaacttgctatgtctctcttcatcatgtatgtaatctaacataagaaaaattaataagagggaaaaaatgagacgagcttctgtcattgtttcaacttgttcaaatcaaagattctgaatcttgatttggttgagcagtt

SEQ ID NO: 44515 - protein, 242 aa, Arabidopsis thaliana
  peptide (1)..(242): Ceres Seq. ID no. 12462091
MALPSCLKTGALMSPATGFNFSGSLMKSDSGFAVPTKLQSTRKGDRERLRVQAIFSFPPAFLTRNGRAEKQKQLKQELLEAIEPLERGATASPDDQLRIDQLARKVEAVNPTKEPLKSDLVNGKWELIYTTSASILQAKKPRFLRSITNYQSINVDTLKVQNMETWPFYNSVTGDIKPLNSKKVAVKLQVFKILGFIPIKAPDSARGELEITYVDEELRLSRGDKGNLFILKMFDPTYRIPL

SEQ ID NO: 44516 - protein, 230 aa, Arabidopsis thaliana
  peptide (1)..(230): Ceres Seq. ID no. 12462092
MSPATGFNFSGSLMKSDSGFAVPTKLQSTRKGDRERLRVQAIFSFPPAFLTRNGRAEKQKQLKQELLEAIEPLERGATASPDDQLRIDQLARKVEAVNPTKEPLKSDLVNGKWELIYTTSASILQAKKPRFLRSITNYQSINVDTLKVQNMETWPFYNSVTGDIKPLNSKKVAVKLQVFKILGFIPIKAPDSARGELEITYVDEELRLSRGDKGNLFILKMFDPTYRIPL

SEQ ID NO: 44517 - protein, 217 aa, Arabidopsis thaliana
  peptide (1)..(217): Ceres Seq. ID no. 12462093
MKSDSGFAVPTKLQSTRKGDRERLRVQAIFSFPPAFLTRNGRAEKQKQLKQELLEAIEPLERGATASPDDQLRIDQLARKVEAVNPTKEPLKSDLVNGKWELIYTTSASILQAKKPRFLRSITNYQSINVDTLKVQNMETWPFYNSVTGDIKPLNSKKVAVKLQVFKILGFIPIKAPDSARGELEITYVDEELRLSRGDKGNLFILKMFDPTYRIPL

SEQ ID NO: 44518 - DNA, 865 bp, Arabidopsis thaliana; identical to SEQ ID NO: 30666
  misc_feature (1)..(865): Ceres Seq. ID no. 12603611
  misc_feature (1)..(865): Ortholog of  Ceres SEQ ID NO 14303437 as cited in SEQ ID NO 54411
  misc_feature (1)..(865): Ortholog of  Ceres SEQ ID NO 12611816 as cited in SEQ ID NO 56754
  misc_feature (1)..(865): Ortholog of  Ceres SEQ ID NO 15170943 as cited in SEQ ID NO 59454

SEQ ID NO: 44519 - protein, 190 aa, Arabidopsis thaliana; identical to SEQ ID NO: 30667
  peptide (1)..(190): Ceres Seq. ID no. 12603612

SEQ ID NO: 44520 - DNA, 1281 bp, Arabidopsis thaliana
  misc_feature (1)..(1281): Ceres Seq. ID no. 13509543
  misc_feature (1)..(1281): Ortholog of  Ceres SEQ ID NO 14308120 as cited in SEQ ID NO 58423
  misc_feature (1)..(1281): Ortholog of  Ceres SEQ ID NO 15169380 as cited in SEQ ID NO 58483
  misc_feature (1)..(1281): Ortholog of  Ceres SEQ ID NO 15177787 as cited in SEQ ID NO 59431
  misc_feature (1)..(1281): Ortholog of  Ceres SEQ ID NO 13595647 as cited in SEQ ID NO 59884
  misc_feature (1)..(1281): Ortholog of  Ceres SEQ ID NO 12617197 as cited in SEQ ID NO 63406
  misc_feature (1)..(1281): Ortholog of  Ceres SEQ ID NO 13597804 as cited in SEQ ID NO 64182
  misc_feature (1)..(1281): Ortholog of  Ceres SEQ ID NO 14301622 as cited in SEQ ID NO 65156
  misc_feature (1)..(1281): Ortholog of  Ceres SEQ ID NO 13598597 as cited in SEQ ID NO 65496
  misc_feature (1)..(1281): Ortholog of  Ceres SEQ ID NO 13596284 as cited in SEQ ID NO 68273
caataacaactaaatctctatctctgtaatttcaaaagtacaatcatggaccagactcttacacacaccggatcgaagaaggcttgtgtcattggtggcacgggaaacttagcctctattctcatcaagcatttgcttcaaagtggctacaaagttaacactacagttagagatccagaaaacgagaagaaaatagctcaccttaggaaacttcaagagcttggcgacctgaagatcttcaaggcagatttgactgatgaagacagtttcgaatcctcattctccggctgtgaatacatcttccatgtcgcaactccgatcaactttaaatccgaagatcccgagaaagacatgatcaagccggcgatacaaggagtgatcaatgtgttgaaatcttgcttaaaatcgaaatcagtcaagcgtgtgatctacacatcttcagctgctgctgtttccatcaacaatctttctggaaccggaatcgtgatgaacgaagaaaactggactgacgttgaatttctcacagaggagaagccttttaactggggttacccaatctcgaaggtgttagcagaaaagacagcttgggaatttgcaaaagagaataagatcaatctcgttaccgtgattccggcacttatagccggaaactctctcctctccgatcctccgagtagcttatctctctcgatgtctttcatcaccgggaaagaaatgcatgtgaccggtctcaaggaaatgcagaagctatctggctcgatctcgttcgtccacgtagacgatttagctcgtgcccatttgtttcttgcggagaaagaaactgcttctggtcgctacatttgctgtgcttacaacacaagtgttccagagattgcggattttctcatacagagatatcctaagtacaatgtgttgtcagaattcgaagagggcttgtcgattccgaaattgacactatcttcgcaaaaacttatcaatgaaggctttcgattcgaatatgggatcaatgagatgtatgatcaaatgatagagtacttcgagtcaaaaggattgatcaaagctaaataaacttgacttttataatgtcaaaatggattcaaagagtatatgagtctttggtctcattctcattctataaaatggtattgaataattatgtattatatgttggttgatttaatgtcttttgatacataaatattacatactytymaaatgaacttgtgaaaaacaagattatttgatcgagctttatatgaaagactacttcacatttcacgc

SEQ ID NO: 44521 - protein, 340 aa, Arabidopsis thaliana
  peptide (1)..(340): Ceres Seq. ID no. 15222825
MDQTLTHTGSKKACVIGGTGNLASILIKHLLQSGYKVNTTVRDPENEKKIAHLRKLQELGDLKIFKADLTDEDSFESSFSGCEYIFHVATPINFKSEDPEKDMIKPAIQGVINVLKSCLKSKSVKRVIYTSSAAAVSINNLSGTGIVMNEENWTDVEFLTEEKPFNWGYPISKVLAEKTAWEFAKENKINLVTVIPALIAGNSLLSDPPSSLSLSMSFITGKEMHVTGLKEMQKLSGSISFVHVDDLARAHLFLAEKETASGRYICCAYNTSVPEIADFLIQRYPKYNVLSEFEEGLSIPKLTLSSQKLINEGFRFEYGINEMYDQMIEYFESKGLIKAK

SEQ ID NO: 44522 - protein, 238 aa, Arabidopsis thaliana
  peptide (1)..(238): Ceres Seq. ID no. 15222826
MIKPAIQGVINVLKSCLKSKSVKRVIYTSSAAAVSINNLSGTGIVMNEENWTDVEFLTEEKPFNWGYPISKVLAEKTAWEFAKENKINLVTVIPALIAGNSLLSDPPSSLSLSMSFITGKEMHVTGLKEMQKLSGSISFVHVDDLARAHLFLAEKETASGRYICCAYNTSVPEIADFLIQRYPKYNVLSEFEEGLSIPKLTLSSQKLINEGFRFEYGINEMYDQMIEYFESKGLIKAK

SEQ ID NO: 44523 - protein, 193 aa, Arabidopsis thaliana
  peptide (1)..(193): Ceres Seq. ID no. 15222827
MNEENWTDVEFLTEEKPFNWGYPISKVLAEKTAWEFAKENKINLVTVIPALIAGNSLLSDPPSSLSLSMSFITGKEMHVTGLKEMQKLSGSISFVHVDDLARAHLFLAEKETASGRYICCAYNTSVPEIADFLIQRYPKYNVLSEFEEGLSIPKLTLSSQKLINEGFRFEYGINEMYDQMIEYFESKGLIKAK

SEQ ID NO: 44524 - DNA, 1146 bp, Arabidopsis thaliana; identical to SEQ ID NO: 39458
  misc_feature (1)..(1146): Ceres Seq. ID no. 12489106
  misc_feature (1)..(1146): Ortholog of  Ceres SEQ ID NO 13599030 as cited in SEQ ID NO 0

SEQ ID NO: 44525 - protein, 336 aa, Arabidopsis thaliana; identical to SEQ ID NO: 39459
  peptide (1)..(336): Ceres Seq. ID no. 12489107

SEQ ID NO: 44526 - protein, 319 aa, Arabidopsis thaliana; identical to SEQ ID NO: 39460
  peptide (1)..(319): Ceres Seq. ID no. 12489108

SEQ ID NO: 44527 - DNA, 1721 bp, Arabidopsis thaliana
  misc_feature (1)..(1721): Ceres Seq. ID no. 13509702
  misc_feature (1)..(1721): Ortholog of  Ceres SEQ ID NO 13656161 as cited in SEQ ID NO 64908
  misc_feature (1)..(1721): Ortholog of  Ceres SEQ ID NO 13597600 as cited in SEQ ID NO 65142
actccattccactctcgtcccgcttcgcctcttttagggcgcaaccaagagacagagaagaagagagagactcgtaagcaacaataaccaatagctctctctctctctctctctctctcctctgctgattcttcgctgactcttgcctcctcgacgtcgtcttcggctttgtagcatctcgccgaagcgtcgttgatttgagagagacccaatttggattgttagaaaatgggttacataggagctcatggtgtagctgctcttaagaaacacaaatacagtggtgttgatcactcttatcttgccaaatatgttctccaacctttttggaaccgttttgtcaaaatcttccctctatggatgccccccaacatgataacacttatggggttcatgtttcttctcacatctgctctcttaggctatatatactcacctaagttggattctccacctcctcgatgggtccactttgcacacggcttacttctgtttttatatcagacatttgatgcggttgatgggaagcaagcacgaagaacaaattcatctagcccactaggagagctttttgaccatggttgcgatgcacttggctgtgcgttagaaacaatggcatatgggagtactgctatgtgtggaagagatactttctggttttgggttatttctgctgttccattttttggagcaacatgggaacactattttaccaatacgcttactcttccggtagtcaatggtcctacagaaggtcttgcacttatatactgtggccatttcttcacagccattgttggtgcggagtggtgggctcagccgtttgggaagtcgattcctttgtttagttgggttccgtttttgaacgagatgcaaatgtccagaataatactattctccatgattttctttgctgttataccaacccttgcaatcaacacgtctaatgtttacaaagttgtacattcaagaaatggaagcatgcttctagcattagctatgctatatcccttagtcacgttaattgcaggagttctgatttgggattacttgtctccaattgatctcataagaaactaccctcacttagttgtgttgggaactggtcttgcatttggattccttgtgggaagaatgattctagctcacttatgtgacgaaccaaaaggattgaaaacaaacatgtgtatgtcactgctttaccttccatttgcactagcaaatgctctaaccgctagactcaacgacggggttcctcttgtggatgagttttgggttcttcttggatattgtatattcacattgtcactatatgcgcattttgcaacttcagtcattcatgagatcacaactgcacttggaatctactgcttcaggattactcggaaagaagcttgaagaaacaaaatgtgattgaaatttttatttataagaaaaagcaaatcttaagggagaaaaaaaatgcaaatcccaacacgaatctgaatattttgttacttggaattaaaaatgattgactgatatgcttttggatgtatactcattaatgtttttgttttagtgttttttttcttgttcggttgaaatagggtaattcatgtagaacctttttgtgtaacgtttctaagaaaaaaaaatatgggattgttctagatttttttttttttaatttaaacctcgttattgatccaacttttagctttttaagctttattttatgc

SEQ ID NO: 44528 - protein, 389 aa, Arabidopsis thaliana
  peptide (1)..(389): Ceres Seq. ID no. 13509703
MGYIGAHGVAALKKHKYSGVDHSYLAKYVLQPFWNRFVKIFPLWMPPNMITLMGFMFLLTSALLGYIYSPKLDSPPPRWVHFAHGLLLFLYQTFDAVDGKQARRTNSSSPLGELFDHGCDALGCALETMAYGSTAMCGRDTFWFWVISAVPFFGATWEHYFTNTLTLPVVNGPTEGLALIYCGHFFTAIVGAEWWAQPFGKSIPLFSWVPFLNEMQMSRIILFSMIFFAVIPTLAINTSNVYKVVHSRNGSMLLALAMLYPLVTLIAGVLIWDYLSPIDLIRNYPHLVVLGTGLAFGFLVGRMILAHLCDEPKGLKTNMCMSLLYLPFALANALTARLNDGVPLVDEFWVLLGYCIFTLSLYAHFATSVIHEITTALGIYCFRITRKEA

SEQ ID NO: 44529 - protein, 345 aa, Arabidopsis thaliana
  peptide (1)..(345): Ceres Seq. ID no. 13509704
MPPNMITLMGFMFLLTSALLGYIYSPKLDSPPPRWVHFAHGLLLFLYQTFDAVDGKQARRTNSSSPLGELFDHGCDALGCALETMAYGSTAMCGRDTFWFWVISAVPFFGATWEHYFTNTLTLPVVNGPTEGLALIYCGHFFTAIVGAEWWAQPFGKSIPLFSWVPFLNEMQMSRIILFSMIFFAVIPTLAINTSNVYKVVHSRNGSMLLALAMLYPLVTLIAGVLIWDYLSPIDLIRNYPHLVVLGTGLAFGFLVGRMILAHLCDEPKGLKTNMCMSLLYLPFALANALTARLNDGVPLVDEFWVLLGYCIFTLSLYAHFATSVIHEITTALGIYCFRITRKEA

SEQ ID NO: 44530 - protein, 341 aa, Arabidopsis thaliana
  peptide (1)..(341): Ceres Seq. ID no. 13509705
MITLMGFMFLLTSALLGYIYSPKLDSPPPRWVHFAHGLLLFLYQTFDAVDGKQARRTNSSSPLGELFDHGCDALGCALETMAYGSTAMCGRDTFWFWVISAVPFFGATWEHYFTNTLTLPVVNGPTEGLALIYCGHFFTAIVGAEWWAQPFGKSIPLFSWVPFLNEMQMSRIILFSMIFFAVIPTLAINTSNVYKVVHSRNGSMLLALAMLYPLVTLIAGVLIWDYLSPIDLIRNYPHLVVLGTGLAFGFLVGRMILAHLCDEPKGLKTNMCMSLLYLPFALANALTARLNDGVPLVDEFWVLLGYCIFTLSLYAHFATSVIHEITTALGIYCFRITRKEA

SEQ ID NO: 44531 - DNA, 840 bp, Arabidopsis thaliana
  misc_feature (1)..(840): Ceres Seq. ID no. 12466029
  misc_feature (1)..(840): Ortholog of  Ceres SEQ ID NO 15168904 as cited in SEQ ID NO 20611
  misc_feature (1)..(840): Ortholog of  Ceres SEQ ID NO 15172900 as cited in SEQ ID NO 51859
agggatagttttatatataaagagagacgcatctctttatttcattcatcgcttctccaaaattttcttcaaagaacaaatctcccaaatctaaaatctttctcttctctcttcgtttccataaccatgtctgcgaagaagattgtgttgaagagttccgatggtgaatctttcgaggttgaggaggcggtggctctcgagtcacaaaccatagcgcatatggttgaagacgactgcgtcgacaacggagtccctcttcctaacgtcacgagcaagatcctcgccaaggtgatcgagtattgcaagaggcacgtcgaggctgctgcctctaaggccgaggccgtcgagggtgctgctacctccgatgacgatcttaaggcctgggacgctgattttatgaagatcgatcaagctactctctttgaactcattctggctgctaattacctgaatatcaagaacttgcttgatctaacatgtcagacagttgcggatatgatcaaaggaaagactccagaagagatccgcacaacgttcaacattaagaacgacttcacaccagaggaagaggaagaggttcgcagagagaaccaatgggcttttgaatgattgatcttcagagagaagaatcaaaagcagcaagcaaccagtttcttcttccttatgtttattgccgttttcaagtgttgttgatgacttgctttttaatattcttcatgaatcatgactatcttcttcctcttctttctttcttatcaagaaccaatgtttcttactctttgtgggatggataatttgtgcttttagataatcttcaagagtgatgttggtttgtcttac

SEQ ID NO: 44532 - protein, 202 aa, Arabidopsis thaliana
  peptide (1)..(202): Ceres Seq. ID no. 12466030
RDSFIYKERRISLFHSSLLQNFLQRTNLPNLKSFSSLFVSITMSAKKIVLKSSDGESFEVEEAVALESQTIAHMVEDDCVDNGVPLPNVTSKILAKVIEYCKRHVEAAASKAEAVEGAATSDDDLKAWDADFMKIDQATLFELILAANYLNIKNLLDLTCQTVADMIKGKTPEEIRTTFNIKNDFTPEEEEEVRRENQWAFE

SEQ ID NO: 44533 - protein, 160 aa, Arabidopsis thaliana
  peptide (1)..(160): Ceres Seq. ID no. 12466031
MSAKKIVLKSSDGESFEVEEAVALESQTIAHMVEDDCVDNGVPLPNVTSKILAKVIEYCKRHVEAAASKAEAVEGAATSDDDLKAWDADFMKIDQATLFELILAANYLNIKNLLDLTCQTVADMIKGKTPEEIRTTFNIKNDFTPEEEEEVRRENQWAFE

SEQ ID NO: 44534 - protein, 129 aa, Arabidopsis thaliana
  peptide (1)..(129): Ceres Seq. ID no. 12466032
MVEDDCVDNGVPLPNVTSKILAKVIEYCKRHVEAAASKAEAVEGAATSDDDLKAWDADFMKIDQATLFELILAANYLNIKNLLDLTCQTVADMIKGKTPEEIRTTFNIKNDFTPEEEEEVRRENQWAFE

SEQ ID NO: 44535 - DNA, 1545 bp, Arabidopsis thaliana
  misc_feature (1)..(1545): Ceres Seq. ID no. 13494693
  misc_feature (1)..(1545): Ortholog of  Ceres SEQ ID NO 14310024 as cited in SEQ ID NO 20634
  misc_feature (1)..(1545): Ortholog of  Ceres SEQ ID NO 15177184 as cited in SEQ ID NO 58157
atggagaaacccatctccatcacgacggggaagtttcggaccaacaacaacaacaatcataacaatgtctggttcgttgttccactcttctttatcctctgtttcgttctcctctgtttcgactactctgctctcttcaccgacacagacgaaaccgctttctcaattcccgacgttacccagaaatcaacatcctctgaattcacgaaagatgacaacttttctcgatttcccgacgacccatctcctgattcttcctgctccggtcggtatatttacgttcatgaacttccgtatagattcaatggtgatttgcttgataattgctttaagattactagaggaaccgagaaagatatttgtccttacatcgaaaactatggttttggtcctgtcattaagaattacgagaatgtgttgttgaaacaaagttggtttacgaccaatcagttcatgctcgaggtgatattccacaacaagatgataaattacagatgtttgactaatgattcgtcactagcgtctgcggttttcgtgccgttttacgcaggtcttgatatgagtaggtatctttggggtttcaacattacggttagagattcttcgtctcatgagctgatggattggcttgtggtacagaaagagtggggtcgaatgtctggtagagaccatttcttggtttcaggaaggattgcttgggatttcaggagacagactgataacgaatctgattggggaagcaagcttcggttcttacccgagtcgcggaacatgtcgatgttgtccatcgaatcgagttcttggaagaatgattacgctattccgtatccgacttgtttccatccaagatcagtggatgagattgtggagtggcaggagctaatgaggtctcgaaaacgcgagtatctattcacctttgcgggtgctccaaggcctgaatataaagactcggttcgagggaagattatagatgagtgtttggagtcaaagaagcaatgttacttgctagactgtaactatgggaatgtgaattgtgacaaccctgtcaatgtgatgaaggttttcaggaactcggtgttttgtcttcagccaccgggtgattcttacactagaaggtcaatgtttgattcaatattggcaggctgcattccggtgttcttccatccagggacagcgtacgctcaatacaagtggcatttgcccaagaatcactcgagttactcggtttatctaccggttaaggatgtgaaggagtggaatatcaaaatcaaggagaggttgattgagattccagaggaaagagtggtgaggttgagagaagaggttataaggttgataccgaaggttgtctacgctgatccgaagtacggatcggatgggagtgaagatgcatttgagttggctgtgaagggaatgttggagaggattgaagaagtgagagagatgatgagacaagggaaagatggtagtgatgggtttgatgatagagatgattataagtatactttttctccatatgaagaacctcaagtagaagcaatttag

SEQ ID NO: 44536 - protein, 514 aa, Arabidopsis thaliana
  peptide (1)..(514): Ceres Seq. ID no. 13494694
MEKPISITTGKFRTNNNNNHNNVWFVVPLFFILCFVLLCFDYSALFTDTDETAFSIPDVTQKSTSSEFTKDDNFSRFPDDPSPDSSCSGRYIYVHELPYRFNGDLLDNCFKITRGTEKDICPYIENYGFGPVIKNYENVLLKQSWFTTNQFMLEVIFHNKMINYRCLTNDSSLASAVFVPFYAGLDMSRYLWGFNITVRDSSSHELMDWLVVQKEWGRMSGRDHFLVSGRIAWDFRRQTDNESDWGSKLRFLPESRNMSMLSIESSSWKNDYAIPYPTCFHPRSVDEIVEWQELMRSRKREYLFTFAGAPRPEYKDSVRGKIIDECLESKKQCYLLDCNYGNVNCDNPVNVMKVFRNSVFCLQPPGDSYTRRSMFDSILAGCIPVFFHPGTAYAQYKWHLPKNHSSYSVYLPVKDVKEWNIKIKERLIEIPEERVVRLREEVIRLIPKVVYADPKYGSDGSEDAFELAVKGMLERIEEVREMMRQGKDGSDGFDDRDDYKYTFSPYEEPQVEAI

SEQ ID NO: 44537 - protein, 363 aa, Arabidopsis thaliana
  peptide (1)..(363): Ceres Seq. ID no. 13494695
MLEVIFHNKMINYRCLTNDSSLASAVFVPFYAGLDMSRYLWGFNITVRDSSSHELMDWLVVQKEWGRMSGRDHFLVSGRIAWDFRRQTDNESDWGSKLRFLPESRNMSMLSIESSSWKNDYAIPYPTCFHPRSVDEIVEWQELMRSRKREYLFTFAGAPRPEYKDSVRGKIIDECLESKKQCYLLDCNYGNVNCDNPVNVMKVFRNSVFCLQPPGDSYTRRSMFDSILAGCIPVFFHPGTAYAQYKWHLPKNHSSYSVYLPVKDVKEWNIKIKERLIEIPEERVVRLREEVIRLIPKVVYADPKYGSDGSEDAFELAVKGMLERIEEVREMMRQGKDGSDGFDDRDDYKYTFSPYEEPQVEAI

SEQ ID NO: 44538 - protein, 354 aa, Arabidopsis thaliana
  peptide (1)..(354): Ceres Seq. ID no. 13494696
MINYRCLTNDSSLASAVFVPFYAGLDMSRYLWGFNITVRDSSSHELMDWLVVQKEWGRMSGRDHFLVSGRIAWDFRRQTDNESDWGSKLRFLPESRNMSMLSIESSSWKNDYAIPYPTCFHPRSVDEIVEWQELMRSRKREYLFTFAGAPRPEYKDSVRGKIIDECLESKKQCYLLDCNYGNVNCDNPVNVMKVFRNSVFCLQPPGDSYTRRSMFDSILAGCIPVFFHPGTAYAQYKWHLPKNHSSYSVYLPVKDVKEWNIKIKERLIEIPEERVVRLREEVIRLIPKVVYADPKYGSDGSEDAFELAVKGMLERIEEVREMMRQGKDGSDGFDDRDDYKYTFSPYEEPQVEAI

SEQ ID NO: 44539 - DNA, 1156 bp, Arabidopsis thaliana
  misc_feature (1)..(1156): Ceres Seq. ID no. 13509544
  misc_feature (1)..(1156): Ortholog of  Ceres SEQ ID NO 14304650 as cited in SEQ ID NO 53817
ttctccaagcacaggtttcagttcagagacgagaacaggctatggctgtcacaagcttggctcctccatgggtcatcttgagactagctttccggtcagtagcagcttcttcttgtctccacacaaatcaaaaaaccctaatcacgaatctctccattcccacttcgtttcctctccgacagtcagctttgagaagatgttacagtgcagaagctataaaaggagatgtagattttctcctcaaaggagttggagaccaagctgttgccaaagaagtcaagcaaattcttgaaatggcaagacgtgcatcatcaaaaagagaagttcttcatacagattttctcacaccacctattgttaaggaatcagtttcactattggaaaaatttgctgatgttaagatagttgctcaaggaggttaccctgaggctgaacggtgtaggatctcgattggacatcctgatgtcctaactagtgatccagatatagttgctgctttgagtatcacagggaatttcgggtttcaaccttgttctcacggtgacttccttggtgctattcttggcacgggaatttccagggaaaaacttggagatatcttaattcaggaagaaaagggagcccaagtcctgatagttcctgaactagttgactttgttgttaccgctcttgacaaggttggaaatgttggtgtaacttgtagtaagatacctttgcttgctcttgaatacgaaccgcctaggactaattcctttaaaaccgtggaggcctcgttgagaattgatgcagtagctagtgctggtttcaagatttcgcggtcaaagctagttgatttgattagtagcaaggatgttcgggttaactgggcaaccgttacaaagaacggaaccatagtgaagactggtgatgttgtctccgttagcgggaaagggagactcaagattggagagatcaatgaaacgaagaaaggtaaatttgcagttgaaatcatcagatatctttagaaagaagctgtaaacaaattatcaatcattctttttcttctcttctcatagttttttattttttttggactagttctaattaatctctattaatgtaaaagaaccgacgaaaaaatctacaaagttataacaatttatttatttatttctat

SEQ ID NO: 44540 - protein, 333 aa, Arabidopsis thaliana
  peptide (1)..(333): Ceres Seq. ID no. 13509545
LQAQVSVQRREQAMAVTSLAPPWVILRLAFRSVAASSCLHTNQKTLITNLSIPTSFPLRQSALRRCYSAEAIKGDVDFLLKGVGDQAVAKEVKQILEMARRASSKREVLHTDFLTPPIVKESVSLLEKFADVKIVAQGGYPEAERCRISIGHPDVLTSDPDIVAALSITGNFGFQPCSHGDFLGAILGTGISREKLGDILIQEEKGAQVLIVPELVDFVVTALDKVGNVGVTCSKIPLLALEYEPPRTNSFKTVEASLRIDAVASAGFKISRSKLVDLISSKDVRVNWATVTKNGTIVKTGDVVSVSGKGRLKIGEINETKKGKFAVEIIRYL

SEQ ID NO: 44541 - protein, 320 aa, Arabidopsis thaliana
  peptide (1)..(320): Ceres Seq. ID no. 13509546
MAVTSLAPPWVILRLAFRSVAASSCLHTNQKTLITNLSIPTSFPLRQSALRRCYSAEAIKGDVDFLLKGVGDQAVAKEVKQILEMARRASSKREVLHTDFLTPPIVKESVSLLEKFADVKIVAQGGYPEAERCRISIGHPDVLTSDPDIVAALSITGNFGFQPCSHGDFLGAILGTGISREKLGDILIQEEKGAQVLIVPELVDFVVTALDKVGNVGVTCSKIPLLALEYEPPRTNSFKTVEASLRIDAVASAGFKISRSKLVDLISSKDVRVNWATVTKNGTIVKTGDVVSVSGKGRLKIGEINETKKGKFAVEIIRYL

SEQ ID NO: 44542 - protein, 236 aa, Arabidopsis thaliana
  peptide (1)..(236): Ceres Seq. ID no. 13509547
MARRASSKREVLHTDFLTPPIVKESVSLLEKFADVKIVAQGGYPEAERCRISIGHPDVLTSDPDIVAALSITGNFGFQPCSHGDFLGAILGTGISREKLGDILIQEEKGAQVLIVPELVDFVVTALDKVGNVGVTCSKIPLLALEYEPPRTNSFKTVEASLRIDAVASAGFKISRSKLVDLISSKDVRVNWATVTKNGTIVKTGDVVSVSGKGRLKIGEINETKKGKFAVEIIRYL

SEQ ID NO: 44543 - DNA, 1284 bp, Arabidopsis thaliana
  misc_feature (1)..(1284): Ceres Seq. ID no. 12488583
  misc_feature (1)..(1284): Ortholog of  Ceres SEQ ID NO 14302919 as cited in SEQ ID NO 20338
  misc_feature (1)..(1284): Ortholog of  Ceres SEQ ID NO 13595497 as cited in SEQ ID NO 51127
  misc_feature (1)..(1284): Ortholog of  Ceres SEQ ID NO 14314046 as cited in SEQ ID NO 59316
aataatgatggattgtaattagccacctgacaaaatctctcatcattcaaagtactatattaatcccctctcttcttcattaccatctcacatctctctctatttctcttccacaaagagtcctaacttcgagttgaaacaaacaccatttctcatctctatctcagaaagaacaaaccatttcgtgttctttctttctctattctcataaggaaatataattcctgaaactgttgagttcttgtgaaaggaaataaaaaacatgatgatgggcaaagaagatctaggtttgagcctaagcttagggttttcacaaaatcacaatcctcttcagatgaatctgaatcctaactcttcattatcaaacaatctccagagactcccatggaaccaaacattcgatcctacatcagatcttcgcaagatagacgtgaacagttttccatcaacggttaactgcgaggaagacacaggagtttcgtcaccaaacagtacgatctcaagcaccattagcgggaagagaagtgagagagaaggaatctccggaaccggcgttggctccggcgacgatcacgacgagatcactccggatcgagggtactcacgtggaacctcagatgaagaagaagacgggggcgaaacgtcgaggaagaagctcaggttatcaaaagatcagtctgcttttctcgaagagactttcaaagaacacaacactctcaatcccaaacagaagctagctttggctaagaagctgaacttgacggcaagacaagtggaagtgtggttccaaaacagaagagctagaaccaagttaaagcaaacggaggtagattgcgaatacttgaaacggtgcgtagagaagctaacggaagagaaccggagacttcagaaagaggctatggagcttcgaactctcaagctgtctccacaattctacggtcagatgactccaccaactacactcatcatgtgtccttcgtgcgagcgtgtgggtggcccatcatcatcgaaccatcaccacaatcacaggcccgtttctatcaatccgtgggttgcttgtgctggtcaggtggctcatgggctgaattttgaagccttgcgtccacgatcgtgattttttattttagtggtgggaaaagggtgttttggtatttttcgttatcgttatatagtctatctgtgtggggtcattgtaattttggatgattggccttctcatgaactagtcctatgtatgatgcaaccttaaaaagatttaaattagcaaaaattagttacaaactt

SEQ ID NO: 44544 - protein, 283 aa, Arabidopsis thaliana
  peptide (1)..(283): Ceres Seq. ID no. 12488584
MMMGKEDLGLSLSLGFSQNHNPLQMNLNPNSSLSNNLQRLPWNQTFDPTSDLRKIDVNSFPSTVNCEEDTGVSSPNSTISSTISGKRSEREGISGTGVGSGDDHDEITPDRGYSRGTSDEEEDGGETSRKKLRLSKDQSAFLEETFKEHNTLNPKQKLALAKKLNLTARQVEVWFQNRRARTKLKQTEVDCEYLKRCVEKLTEENRRLQKEAMELRTLKLSPQFYGQMTPPTTLIMCPSCERVGGPSSSNHHHNHRPVSINPWVACAGQVAHGLNFEALRPRS

SEQ ID NO: 44545 - protein, 282 aa, Arabidopsis thaliana
  peptide (1)..(282): Ceres Seq. ID no. 12488585
MMGKEDLGLSLSLGFSQNHNPLQMNLNPNSSLSNNLQRLPWNQTFDPTSDLRKIDVNSFPSTVNCEEDTGVSSPNSTISSTISGKRSEREGISGTGVGSGDDHDEITPDRGYSRGTSDEEEDGGETSRKKLRLSKDQSAFLEETFKEHNTLNPKQKLALAKKLNLTARQVEVWFQNRRARTKLKQTEVDCEYLKRCVEKLTEENRRLQKEAMELRTLKLSPQFYGQMTPPTTLIMCPSCERVGGPSSSNHHHNHRPVSINPWVACAGQVAHGLNFEALRPRS

SEQ ID NO: 44546 - protein, 281 aa, Arabidopsis thaliana
  peptide (1)..(281): Ceres Seq. ID no. 12488586
MGKEDLGLSLSLGFSQNHNPLQMNLNPNSSLSNNLQRLPWNQTFDPTSDLRKIDVNSFPSTVNCEEDTGVSSPNSTISSTISGKRSEREGISGTGVGSGDDHDEITPDRGYSRGTSDEEEDGGETSRKKLRLSKDQSAFLEETFKEHNTLNPKQKLALAKKLNLTARQVEVWFQNRRARTKLKQTEVDCEYLKRCVEKLTEENRRLQKEAMELRTLKLSPQFYGQMTPPTTLIMCPSCERVGGPSSSNHHHNHRPVSINPWVACAGQVAHGLNFEALRPRS

SEQ ID NO: 44547 - DNA, 1120 bp, Arabidopsis thaliana
  misc_feature (1)..(1120): Ceres Seq. ID no. 13509548
  misc_feature (1)..(1120): Ortholog of  Ceres SEQ ID NO 14303263 as cited in SEQ ID NO 1224
  misc_feature (1)..(1120): Ortholog of  Ceres SEQ ID NO 13597380 as cited in SEQ ID NO 64054
  misc_feature (1)..(1120): Ortholog of  Ceres SEQ ID NO 12625474 as cited in SEQ ID NO 64169
  misc_feature (1)..(1120): Ortholog of  Ceres SEQ ID NO 13597502 as cited in SEQ ID NO 64681
aaagaaacaaagagtaacaatgaaacgaaacagtataaatattcatcacgttacttctttttcttcgagtccgttttggtgtgttttctttctcgtgttgttatgtaagacgtccaccaacgctttggtgaagcagccgccaaacgaaacgactccggcgataattgtgttcggagattcaatcgttgatgccggaaataatgacgacattatgacaacgttggctagatgcaattatcctccttacggcatcgattttgacggtggaattcctaccggaagattttgcaacggcaaagttgcgactgattttatagcgggaaaattcggaattaaaccaagtataccggcatatcgaaatccaaatttgaaaccagaagatctcttaaccggtgtaacatttgcgtctggtggtgctggttacgttcccttcacaacccaattatcgggaggaatagctttatcgcagcaactgaagttattcgaagagtatgtagagaagatgaagaaaatggttggggaagaaaggacaaagctcataattaaaaacagtttgttcatggttatatgtggcagtaatgatataaccaacacctactttggtcttccttctgttcaacaacaatacgacgtcgcttcctttaccactcttatggccgacaatgctcgatcttttgctcaaaaattacatgaatatggagcgaggagaatacaagtattcggtgcaccaccagtaggatgtgtcccatcacagagaaccttagcaggagggccaacaagaaattgtgttgttaggttcaatgatgcaacaaagctctacaatgttaagctcgctgcaaatttgggttctttgtcaagaactttaggagacaagacaataatctacgttgacatatatgattctctccttgatatcattcttgaccctcgacaatatggatttaaggtggttgataaaggatgttgtggaactggactaattgaagttgctcttttatgcaacaactttgcagctgatgtatgtccaaatagagatgaatatgtgttttgggatagtttccatccgactgagaagacttacagaattatggccacaaaatattttgagagatatgtatga

SEQ ID NO: 44548 - protein, 372 aa, Arabidopsis thaliana
  peptide (1)..(372): Ceres Seq. ID no. 13509549
KKQRVTMKRNSINIHHVTSFSSSPFWCVFFLVLLCKTSTNALVKQPPNETTPAIIVFGDSIVDAGNNDDIMTTLARCNYPPYGIDFDGGIPTGRFCNGKVATDFIAGKFGIKPSIPAYRNPNLKPEDLLTGVTFASGGAGYVPFTTQLSGGIALSQQLKLFEEYVEKMKKMVGEERTKLIIKNSLFMVICGSNDITNTYFGLPSVQQQYDVASFTTLMADNARSFAQKLHEYGARRIQVFGAPPVGCVPSQRTLAGGPTRNCVVRFNDATKLYNVKLAANLGSLSRTLGDKTIIYVDIYDSLLDIILDPRQYGFKVVDKGCCGTGLIEVALLCNNFAADVCPNRDEYVFWDSFHPTEKTYRIMATKYFERYV

SEQ ID NO: 44549 - protein, 366 aa, Arabidopsis thaliana
  peptide (1)..(366): Ceres Seq. ID no. 13509550
MKRNSINIHHVTSFSSSPFWCVFFLVLLCKTSTNALVKQPPNETTPAIIVFGDSIVDAGNNDDIMTTLARCNYPPYGIDFDGGIPTGRFCNGKVATDFIAGKFGIKPSIPAYRNPNLKPEDLLTGVTFASGGAGYVPFTTQLSGGIALSQQLKLFEEYVEKMKKMVGEERTKLIIKNSLFMVICGSNDITNTYFGLPSVQQQYDVASFTTLMADNARSFAQKLHEYGARRIQVFGAPPVGCVPSQRTLAGGPTRNCVVRFNDATKLYNVKLAANLGSLSRTLGDKTIIYVDIYDSLLDIILDPRQYGFKVVDKGCCGTGLIEVALLCNNFAADVCPNRDEYVFWDSFHPTEKTYRIMATKYFERYV

SEQ ID NO: 44550 - protein, 302 aa, Arabidopsis thaliana
  peptide (1)..(302): Ceres Seq. ID no. 13509551
MTTLARCNYPPYGIDFDGGIPTGRFCNGKVATDFIAGKFGIKPSIPAYRNPNLKPEDLLTGVTFASGGAGYVPFTTQLSGGIALSQQLKLFEEYVEKMKKMVGEERTKLIIKNSLFMVICGSNDITNTYFGLPSVQQQYDVASFTTLMADNARSFAQKLHEYGARRIQVFGAPPVGCVPSQRTLAGGPTRNCVVRFNDATKLYNVKLAANLGSLSRTLGDKTIIYVDIYDSLLDIILDPRQYGFKVVDKGCCGTGLIEVALLCNNFAADVCPNRDEYVFWDSFHPTEKTYRIMATKYFERYV

SEQ ID NO: 44551 - DNA, 1868 bp, Arabidopsis thaliana
  misc_feature (1)..(1868): Ceres Seq. ID no. 13509820
  misc_feature (1)..(1868): Ortholog of  Ceres SEQ ID NO 13596816 as cited in SEQ ID NO 62287
agattctccatcttagttcttgtaacctctccctcttcttctccaaattccacctgagagaagagaactcattccacccaaaaagcaataatatatagtaccgtactttgattttttcgataatctgttgattgaagttaagccaaaactcagctctgttcttattcttcttcaaacccaagtttcccacttcactgattctttcatcttagctcgttttaaccacaaagttcagttcttttttggtgtgtttctttttcgttattggcttttgccttttttgggtatagggtgtttacgatttatctctcggttccgatgttgttcaaaggtgtttttgctgtctttttcgtaatcactttgttgtacgcaagtttgttaattgaagttgaagggattggtgtgaactggggctcacaggcgaggcatcccctacctccggctacggtggtgaggcttctccgagaaaacggtatccaaaaggtgaaacttttcgaggccgactctgcgattctcaaagctttaagtcggacagggattcaagttatggtcggaatccctaacgacttgcttgctcctttagccggtagcgttgcagccgctgagagatgggtctctcagaatgtatctgctcatgtctcctctaatggcgtcgatatcaggtatgtggcagttgggaatgagccttttctaaaagcattcaatggaacatttgagggtataactctacctgctcttcagaatatacaatcagctatcatcaaagctggtttagcgactcaggtgaaagtcacagtgcctcttaacgcagatgtgtaccaaagtgcgtctaatctcccttcggatggagatttcaggcctgaaatccgtgatctcatgttgaacattgttaagtttctgagtgataacggagcaccattcactatcaacatttaccctttcatcagtctctacaacgacccgaatttccctgtggagtttgctttctttgatggaactggtactccgataaacgacaatggaagaatctacgacaatgttcttgatgcaaactacgatacacttgtgtggtcgttgcagaagaatgggtttgggaatttgactattattgttggggaagttgggtggccaacagatggagataagaacgcaaacttgatgtatgccaggcggtataatcaaggttttatgaaccgtcaaaaggctaataaaggaacacctatgagacctggggcaatggatgcttacttgtttggtcttatcgatgaagatgccaaaagcattcagcctggaaactttgaaagacactgggggatattttatattgatggacagcctaagtatcagctcagtcttggcagtggtaacgggctgatccctgcaaaggatgttcattatttggctaagaaatggtgtattcttgcgccaaatgctaatcttcaggatcctcagttgggaccaagcgtgagctacgcttgtgatcatgctgattgcaccagtcttggttatggctcctcttgtggtaacctgaatctagcacagaatgtttcgtatgcgttcaatagctattaccaggtaagtaatcagctcgacagtgcgtgtaagttcccgggtctctctatagtcagtactagggatccttctgttgggagttgcaaattcaagataatgatcaagtcagaagatgctagtgaagcaagtgccatgatgcctataacacgatcaacggcagtgctgctacttctctccatctgtctgtatattgttctgtgaatactgaagaaaatttgatgggtttgattatttctttttttccttttttcttttgcaaaacttttggtgtttatggagaaacagaaaagttttgc

SEQ ID NO: 44552 - protein, 484 aa, Arabidopsis thaliana
  peptide (1)..(484): Ceres Seq. ID no. 13509821
MLFKGVFAVFFVITLLYASLLIEVEGIGVNWGSQARHPLPPATVVRLLRENGIQKVKLFEADSAILKALSRTGIQVMVGIPNDLLAPLAGSVAAAERWVSQNVSAHVSSNGVDIRYVAVGNEPFLKAFNGTFEGITLPALQNIQSAIIKAGLATQVKVTVPLNADVYQSASNLPSDGDFRPEIRDLMLNIVKFLSDNGAPFTINIYPFISLYNDPNFPVEFAFFDGTGTPINDNGRIYDNVLDANYDTLVWSLQKNGFGNLTIIVGEVGWPTDGDKNANLMYARRYNQGFMNRQKANKGTPMRPGAMDAYLFGLIDEDAKSIQPGNFERHWGIFYIDGQPKYQLSLGSGNGLIPAKDVHYLAKKWCILAPNANLQDPQLGPSVSYACDHADCTSLGYGSSCGNLNLAQNVSYAFNSYYQVSNQLDSACKFPGLSIVSTRDPSVGSCKFKIMIKSEDASEASAMMPITRSTAVLLLLSICLYIVL

SEQ ID NO: 44553 - protein, 408 aa, Arabidopsis thaliana
  peptide (1)..(408): Ceres Seq. ID no. 13509822
MVGIPNDLLAPLAGSVAAAERWVSQNVSAHVSSNGVDIRYVAVGNEPFLKAFNGTFEGITLPALQNIQSAIIKAGLATQVKVTVPLNADVYQSASNLPSDGDFRPEIRDLMLNIVKFLSDNGAPFTINIYPFISLYNDPNFPVEFAFFDGTGTPINDNGRIYDNVLDANYDTLVWSLQKNGFGNLTIIVGEVGWPTDGDKNANLMYARRYNQGFMNRQKANKGTPMRPGAMDAYLFGLIDEDAKSIQPGNFERHWGIFYIDGQPKYQLSLGSGNGLIPAKDVHYLAKKWCILAPNANLQDPQLGPSVSYACDHADCTSLGYGSSCGNLNLAQNVSYAFNSYYQVSNQLDSACKFPGLSIVSTRDPSVGSCKFKIMIKSEDASEASAMMPITRSTAVLLLLSICLYIVL

SEQ ID NO: 44554 - protein, 298 aa, Arabidopsis thaliana
  peptide (1)..(298): Ceres Seq. ID no. 13509823
MLNIVKFLSDNGAPFTINIYPFISLYNDPNFPVEFAFFDGTGTPINDNGRIYDNVLDANYDTLVWSLQKNGFGNLTIIVGEVGWPTDGDKNANLMYARRYNQGFMNRQKANKGTPMRPGAMDAYLFGLIDEDAKSIQPGNFERHWGIFYIDGQPKYQLSLGSGNGLIPAKDVHYLAKKWCILAPNANLQDPQLGPSVSYACDHADCTSLGYGSSCGNLNLAQNVSYAFNSYYQVSNQLDSACKFPGLSIVSTRDPSVGSCKFKIMIKSEDASEASAMMPITRSTAVLLLLSICLYIVL

SEQ ID NO: 44555 - DNA, 1687 bp, Arabidopsis thaliana
  misc_feature (1)..(1687): Ceres Seq. ID no. 13509518
  misc_feature (1)..(1687): Ortholog of  Ceres SEQ ID NO 15172174 as cited in SEQ ID NO 60481
  misc_feature (1)..(1687): Ortholog of  Ceres SEQ ID NO 13660287 as cited in SEQ ID NO 67316
  misc_feature (1)..(1687): Ortholog of  Ceres SEQ ID NO 14307892 as cited in SEQ ID NO 67490
aaatcacacatcaatagggacaaagcgagagagaagagagagaccggaccaaacacaaagcccttaaagataggaagatactttgtcatagctttgctatttctcaaaaaaaaatgagggacgacagagaaagaggagagggtgatttgtcatggcctttgatcggagagaaaagtagtgtcaaggaagaagtgaagaagcagctatggctttcaggcccactcatcgccgtgagtcttcttcagttttgtctacaagttatctccgtcatgttcgttggccatcttggctctcttcctctctccgccgcatccatcgccacctctttcgcctccgtcaccggtttcagcttcctcatgggaacagcaagtgcgttagatacgctttgtggccaagcgtacggagcaaagaagtacggaatgttaggaatacaaatgcaaagagctatgtttgttcttacactagcttctattcctctctccatcatttgggctaacacagagcaccttctcgtcttctttggacaaaacaaatccattgctacactcgctggctcctacgcaaaattcatgatcccaagcatcttcgcctacggtcttcttcaatgctttaacaggttcttgcaggcccaaaacaatgtgtttcctgtggttttctgctctggagtaacaacttctctacatgtcctcctttgttgggtcttggttttcaaatctggtttagggtttcaaggagctgctcttgccaactccatttcgtattggcttaatgtcgttctcttgttctgttacgtcaagttttcgccttcttgctcactaacttggaccggtttctctaaggaggctctacgcgatatcctcccttttctgagactagctgttccttctgcacttatggtctgcttagagatgtggtcctttgaacttttagttctcttatcaggacttcttccaaacccggttctagaaacttctgttctctcaatctgccttaatacatcaggaacaatgtggatgatcccatttggtctaagtggcgctgcaagcacgaggatctcaaatgaattaggagcgggtaacccgaaagtggctaagcttgcggtgcgtgtggtcatttgcattgcagtagcagaaagtatagtgatcggatcagtcttgatattgataaggaatatatggggattagcttatagtagtgaactagaagtagtcagctacgtagcctcgatgatgccaattctcgccttaggaaattttctagacagtcttcaatgcgttctctcaggggttgctagaggatgtggatggcagaagataggagcaatcattaatcttggttcatattatcttgttggagttccttcaggattgttacttgcttttcactttcacgttggtggtcgggggctttggcttggaatcatatgtgccctcgttgttcaagtttttggtcttggcctcgtcactatttttacaaattgggatgaagaggccaagaaagctacaaacagaattgagtcttcttcaagtgtgaaagattttgcagtcgatgacagatcagttgttgtattttgagaaccattgtgtgtgttttgttcttaacaacaaagacactcaatcattgtcattgatagtttaaaaaatgtattttacttcatcatttttaaccaatatggaagagaaatggt

SEQ ID NO: 44556 - protein, 486 aa, Arabidopsis thaliana
  peptide (1)..(486): Ceres Seq. ID no. 13509519
MRDDRERGEGDLSWPLIGEKSSVKEEVKKQLWLSGPLIAVSLLQFCLQVISVMFVGHLGSLPLSAASIATSFASVTGFSFLMGTASALDTLCGQAYGAKKYGMLGIQMQRAMFVLTLASIPLSIIWANTEHLLVFFGQNKSIATLAGSYAKFMIPSIFAYGLLQCFNRFLQAQNNVFPVVFCSGVTTSLHVLLCWVLVFKSGLGFQGAALANSISYWLNVVLLFCYVKFSPSCSLTWTGFSKEALRDILPFLRLAVPSALMVCLEMWSFELLVLLSGLLPNPVLETSVLSICLNTSGTMWMIPFGLSGAASTRISNELGAGNPKVAKLAVRVVICIAVAESIVIGSVLILIRNIWGLAYSSELEVVSYVASMMPILALGNFLDSLQCVLSGVARGCGWQKIGAIINLGSYYLVGVPSGLLLAFHFHVGGRGLWLGIICALVVQVFGLGLVTIFTNWDEEAKKATNRIESSSSVKDFAVDDRSVVVF

SEQ ID NO: 44557 - protein, 434 aa, Arabidopsis thaliana
  peptide (1)..(434): Ceres Seq. ID no. 13509520
MFVGHLGSLPLSAASIATSFASVTGFSFLMGTASALDTLCGQAYGAKKYGMLGIQMQRAMFVLTLASIPLSIIWANTEHLLVFFGQNKSIATLAGSYAKFMIPSIFAYGLLQCFNRFLQAQNNVFPVVFCSGVTTSLHVLLCWVLVFKSGLGFQGAALANSISYWLNVVLLFCYVKFSPSCSLTWTGFSKEALRDILPFLRLAVPSALMVCLEMWSFELLVLLSGLLPNPVLETSVLSICLNTSGTMWMIPFGLSGAASTRISNELGAGNPKVAKLAVRVVICIAVAESIVIGSVLILIRNIWGLAYSSELEVVSYVASMMPILALGNFLDSLQCVLSGVARGCGWQKIGAIINLGSYYLVGVPSGLLLAFHFHVGGRGLWLGIICALVVQVFGLGLVTIFTNWDEEAKKATNRIESSSSVKDFAVDDRSVVVF

SEQ ID NO: 44558 - protein, 405 aa, Arabidopsis thaliana
  peptide (1)..(405): Ceres Seq. ID no. 13509521
MGTASALDTLCGQAYGAKKYGMLGIQMQRAMFVLTLASIPLSIIWANTEHLLVFFGQNKSIATLAGSYAKFMIPSIFAYGLLQCFNRFLQAQNNVFPVVFCSGVTTSLHVLLCWVLVFKSGLGFQGAALANSISYWLNVVLLFCYVKFSPSCSLTWTGFSKEALRDILPFLRLAVPSALMVCLEMWSFELLVLLSGLLPNPVLETSVLSICLNTSGTMWMIPFGLSGAASTRISNELGAGNPKVAKLAVRVVICIAVAESIVIGSVLILIRNIWGLAYSSELEVVSYVASMMPILALGNFLDSLQCVLSGVARGCGWQKIGAIINLGSYYLVGVPSGLLLAFHFHVGGRGLWLGIICALVVQVFGLGLVTIFTNWDEEAKKATNRIESSSSVKDFAVDDRSVVVF

SEQ ID NO: 44559 - DNA, 2413 bp, Arabidopsis thaliana
  misc_feature (1)..(2413): Ceres Seq. ID no. 12488993
  misc_feature (1)..(2413): Ortholog of  Ceres SEQ ID NO 13646680 as cited in SEQ ID NO 20737
acactgtttcgcaccggcgcggacaaagttttttttttgttcgaaatccgacaacaaccctagattataaacaaaataaaccagtgtctgcatagaggcaatgtagatgtgatttttgctggaaaatggacaaatcccagaagaatcctacttcccagatcggaacttcaactcccaaatccaaattcgaggattctccagtgttcaactacataagcaacctctctccaattgagtcggtcaaatctatctccactgctcaaacgtttagctctcttagtttcacatctcctcctcctgtgtttacttctcctcacgtcatttctcacagagaatccagattcttcagatgtcataactctgttgatcgttcaaagcacttagaatctttagatggatctgctgttaaaggagaagttgtagtaccattagttgaagatctaaataaagaagcttctttggaagatgaagaagaaacttctgttgaaacgtcttctgagctgccacagatcatgaagttcgatagccaaacttctgagcatagtgattcaccttgcactgaagatgttgttattgaagcttcatctgatcctcctcgaggagacaatggttcgtcatccgaggatgtcacgatgggacttcagaatatgcttgttgttcgggaagggaatgacactcctggttgtggacgtttgatctcagatgcaactgagctgttagtatttcgatctccgaatgattctgaggcttttagatgcttggtcgataaaatatcaagctcagaaagacggttctgtgctggtgtcaagtctacaaagcggcctgatatcaacaaagatattccagccaatggatctagtaatgaaaatcagcctttggctgtgcttcctacaaacgagtctgtctttaacttgcatcgtggtggcatgcgaagacgctgccttgactttgagatgccagggaaacggaagaaggatattgttgatgatcagcaatctgtgtgtgacaataatgtggctggtgaatcttcctcgagctgtgttgtacctggtattggtcttcatctaaacgccgttgcaatgtctgcaaaggacagtaacatcagtgtcatacatggctattccatatctggagagattcaaaagagtttctcaggctctaccactccaattcagtcccaagacactgtgcaagaaacttcggaccaggcagaaaacgaacctgtagaagaagttcccaaagcattggtgttcccagagttgaatctaggcagccttaagaaaaagatgcgtaaatctgaacaagctggggagggtgagtcatgtaaacgatgcaactgcaaaaagtctaagtgtttgaagctttactgtgaatgctttgctgctggggtttattgcatagagccatgttcatgtatagattgcttcaacaaacctatccatgaagaaactgttttggctacccgcaaacagattgaatcccgaaatccacttgcatttgctcctaaagtcatcagaaatgcagattccatcatggaagctagtgatgatgccagtaaaaccccggcttctgcacgacacaaacgtggctgcaactgcaagaaatcaaactgtatgaagaaatactgtgaatgctatcagggtggagtcggctgttccatgaactgtagatgcgaaggatgcacaaatgtattcggcagaaaagatgggtctttacttgttatcatggaaagcaaactagaggagaatcaggagacatatgagaaaagaatagcaaaaatccaacacaacgtcgaggtgtcgaaagaagtggagcagaacccaagttctgatcaaccttcgacaccactgccaccgtacagacatttggtggttcatcagccattcttgtctaagaacagactgcctccgacacagttttttcttggcacaggttcttcctctttcagaaaaccaaacagtgatttggcgcaatcacagaatgagaagaagcctcttgaaactgtgactgaggacaaaacagagattatgcctgagattctcctcaattcccctatagctaacatcaaggccatctctcccaacagcaagagagtctctccccctcaacccggctcctcggagtcaggctcaatcctaaggagaagaggtaatggccggaagctgatactacggtctattccagcatttccttctctcaacccaaatcagtgaatcaaaaacaatttggttaagctatggaaaaattctttgtatctttgtaatgttccagatcctattagcctatcattgtttccataacataaggcataagcaacgttattgtaagatactttattctagtagtagtaggtaatgtaatagtacattctagttcataatcttccagaaagaacgtcctaaactggactttg

SEQ ID NO: 44560 - protein, 695 aa, Arabidopsis thaliana
  peptide (1)..(695): Ceres Seq. ID no. 12488994
MDKSQKNPTSQIGTSTPKSKFEDSPVFNYISNLSPIESVKSISTAQTFSSLSFTSPPPVFTSPHVISHRESRFFRCHNSVDRSKHLESLDGSAVKGEVVVPLVEDLNKEASLEDEEETSVETSSELPQIMKFDSQTSEHSDSPCTEDVVIEASSDPPRGDNGSSSEDVTMGLQNMLVVREGNDTPGCGRLISDATELLVFRSPNDSEAFRCLVDKISSSERRFCAGVKSTKRPDINKDIPANGSSNENQPLAVLPTNESVFNLHRGGMRRRCLDFEMPGKRKKDIVDDQQSVCDNNVAGESSSSCVVPGIGLHLNAVAMSAKDSNISVIHGYSISGEIQKSFSGSTTPIQSQDTVQETSDQAENEPVEEVPKALVFPELNLGSLKKKMRKSEQAGEGESCKRCNCKKSKCLKLYCECFAAGVYCIEPCSCIDCFNKPIHEETVLATRKQIESRNPLAFAPKVIRNADSIMEASDDASKTPASARHKRGCNCKKSNCMKKYCECYQGGVGCSMNCRCEGCTNVFGRKDGSLLVIMESKLEENQETYEKRIAKIQHNVEVSKEVEQNPSSDQPSTPLPPYRHLVVHQPFLSKNRLPPTQFFLGTGSSSFRKPNSDLAQSQNEKKPLETVTEDKTEIMPEILLNSPIANIKAISPNSKRVSPPQPGSSESGSILRRRGNGRKLILRSIPAFPSLNPNQ

SEQ ID NO: 44561 - protein, 566 aa, Arabidopsis thaliana
  peptide (1)..(566): Ceres Seq. ID no. 12488995
MKFDSQTSEHSDSPCTEDVVIEASSDPPRGDNGSSSEDVTMGLQNMLVVREGNDTPGCGRLISDATELLVFRSPNDSEAFRCLVDKISSSERRFCAGVKSTKRPDINKDIPANGSSNENQPLAVLPTNESVFNLHRGGMRRRCLDFEMPGKRKKDIVDDQQSVCDNNVAGESSSSCVVPGIGLHLNAVAMSAKDSNISVIHGYSISGEIQKSFSGSTTPIQSQDTVQETSDQAENEPVEEVPKALVFPELNLGSLKKKMRKSEQAGEGESCKRCNCKKSKCLKLYCECFAAGVYCIEPCSCIDCFNKPIHEETVLATRKQIESRNPLAFAPKVIRNADSIMEASDDASKTPASARHKRGCNCKKSNCMKKYCECYQGGVGCSMNCRCEGCTNVFGRKDGSLLVIMESKLEENQETYEKRIAKIQHNVEVSKEVEQNPSSDQPSTPLPPYRHLVVHQPFLSKNRLPPTQFFLGTGSSSFRKPNSDLAQSQNEKKPLETVTEDKTEIMPEILLNSPIANIKAISPNSKRVSPPQPGSSESGSILRRRGNGRKLILRSIPAFPSLNPNQ

SEQ ID NO: 44562 - protein, 526 aa, Arabidopsis thaliana
  peptide (1)..(526): Ceres Seq. ID no. 12488996
MGLQNMLVVREGNDTPGCGRLISDATELLVFRSPNDSEAFRCLVDKISSSERRFCAGVKSTKRPDINKDIPANGSSNENQPLAVLPTNESVFNLHRGGMRRRCLDFEMPGKRKKDIVDDQQSVCDNNVAGESSSSCVVPGIGLHLNAVAMSAKDSNISVIHGYSISGEIQKSFSGSTTPIQSQDTVQETSDQAENEPVEEVPKALVFPELNLGSLKKKMRKSEQAGEGESCKRCNCKKSKCLKLYCECFAAGVYCIEPCSCIDCFNKPIHEETVLATRKQIESRNPLAFAPKVIRNADSIMEASDDASKTPASARHKRGCNCKKSNCMKKYCECYQGGVGCSMNCRCEGCTNVFGRKDGSLLVIMESKLEENQETYEKRIAKIQHNVEVSKEVEQNPSSDQPSTPLPPYRHLVVHQPFLSKNRLPPTQFFLGTGSSSFRKPNSDLAQSQNEKKPLETVTEDKTEIMPEILLNSPIANIKAISPNSKRVSPPQPGSSESGSILRRRGNGRKLILRSIPAFPSLNPNQ

SEQ ID NO: 44563 - DNA, 931 bp, Arabidopsis thaliana
  misc_feature (1)..(931): Ceres Seq. ID no. 13646306
  misc_feature (1)..(931): Ortholog of  Ceres SEQ ID NO 15170337 as cited in SEQ ID NO 57970
atcctaatcgaaaaaaccagatataacagaattaacctacacaactgaaactcgagttaagaaccggaaacagaatccaattcaaccaaaccgaatcgaaccgaaccggagtttttatccaatggtgaagcaagcgatgaaggaagaggagaagaagagaaacacggcgatgcagtcaaagtacaaaggagtgaggaagaggaaatggggaaaatgggtatcggagatcagactttcacacagcagagaacgaatttggttaggctcttacgacactcccgagaaggcgccgcgtgctttcgacgccgctcaattttgtctccgcggcggcgatgctaatttcaatttccctaataatccaccgtcgatctccgtagaaaagtcgttgacgcctccggagattcaggaagctgctgctagattcgctaacacattccaagacattgtcaagggagaagaagaatcgggtttagtacccggatccgagatccgaccagagtctccttctacatctgcatctgttgctacatcgacggtggattatgatttttcgtttttggatttgcttccgatgaatttcgggtttgattccttctccgacgacttctctggcttctccggtggtgatcgatttacagagattttacccatcgaagattacggaggagagagtttattagatgaatctttgattctttgggatttttgaattcccaaacataatatttttttagagcgaactgtgagattttccttggagtcatggagaaatctggagattttttgtaacacggagctccaatgacccgggaatttctttcgtttcggatccgaatttgatgtggatcatattcacacctatattttttcatttttttgttgtaaagaaaaatcggataagattctagtaataaatgttaaaagtccattt

SEQ ID NO: 44564 - protein, 195 aa, Arabidopsis thaliana
  peptide (1)..(195): Ceres Seq. ID no. 13646307
MVKQAMKEEEKKRNTAMQSKYKGVRKRKWGKWVSEIRLSHSRERIWLGSYDTPEKAPRAFDAAQFCLRGGDANFNFPNNPPSISVEKSLTPPEIQEAAARFANTFQDIVKGEEESGLVPGSEIRPESPSTSASVATSTVDYDFSFLDLLPMNFGFDSFSDDFSGFSGGDRFTEILPIEDYGGESLLDESLILWDF

SEQ ID NO: 44565 - protein, 190 aa, Arabidopsis thaliana
  peptide (1)..(190): Ceres Seq. ID no. 13646308
MKEEEKKRNTAMQSKYKGVRKRKWGKWVSEIRLSHSRERIWLGSYDTPEKAPRAFDAAQFCLRGGDANFNFPNNPPSISVEKSLTPPEIQEAAARFANTFQDIVKGEEESGLVPGSEIRPESPSTSASVATSTVDYDFSFLDLLPMNFGFDSFSDDFSGFSGGDRFTEILPIEDYGGESLLDESLILWDF

SEQ ID NO: 44566 - protein, 179 aa, Arabidopsis thaliana
  peptide (1)..(179): Ceres Seq. ID no. 13646309
MQSKYKGVRKRKWGKWVSEIRLSHSRERIWLGSYDTPEKAPRAFDAAQFCLRGGDANFNFPNNPPSISVEKSLTPPEIQEAAARFANTFQDIVKGEEESGLVPGSEIRPESPSTSASVATSTVDYDFSFLDLLPMNFGFDSFSDDFSGFSGGDRFTEILPIEDYGGESLLDESLILWDF

SEQ ID NO: 44567 - DNA, 907 bp, Arabidopsis thaliana
  misc_feature (1)..(907): Ceres Seq. ID no. 12603686
  misc_feature (1)..(907): Ortholog of  Ceres SEQ ID NO 15172948 as cited in SEQ ID NO 51777
  misc_feature (1)..(907): Ortholog of  Ceres SEQ ID NO 12784416 as cited in SEQ ID NO 61324
attttttgtttttgtccctttgaaacgaaagaagatccaaagatgagtgaagaagcatatgaagaaactcaggaatcaagtcaatctcctcgtccggttccaaaactgaacgagaggattctctcaacactatccaggagatctgtagctgcacatccatggcacgaccttgagattggtcctgaagctccattggtcttcaatgtggtggttgagatcacaaagggaagcaaagtgaaatatgaactcgacaaaaagaccggtcttatcaaggttgaccggatcttgtactcctccgttgtttatccacacaattacggattcatcccacggacattgtgtgaagacaacgatcctcttgatgtccttgtccttatgcaggaaccagtgcttcccggatgtttcctccgtgctagagccattggattaatgcccatgattgatcagggagagaaagacgacaaaatcatagccgtatgtgctgatgatccagagtacaaacatttcacagacatcaaacaactcgctcctcatcgtctccaagaaatccgccgtttcttcgaagactataagaagaacgagaacaagaaagtggctgtcaacgatttcttgccatcagagagtgcacatgaagctattcagtactccatggatctatacgctgagtatattctccacacgttgaggagatgaacaacaacaacaacatatgattctcttcgcagcatccgcatataaatatatttaaatggaatattattttacataattcataaccatatgattggctttttgcagttttttgttttgttttgttttctgtttgtttttttccttgtgatgatgcaattttgttcaattgtataatttgaaactggtaagatataatgacaaacgcagttttgcc

SEQ ID NO: 44568 - protein, 230 aa, Arabidopsis thaliana
  peptide (1)..(230): Ceres Seq. ID no. 12603687
IFCFCPFETKEDPKMSEEAYEETQESSQSPRPVPKLNERILSTLSRRSVAAHPWHDLEIGPEAPLVFNVVVEITKGSKVKYELDKKTGLIKVDRILYSSVVYPHNYGFIPRTLCEDNDPLDVLVLMQEPVLPGCFLRARAIGLMPMIDQGEKDDKIIAVCADDPEYKHFTDIKQLAPHRLQEIRRFFEDYKKNENKKVAVNDFLPSESAHEAIQYSMDLYAEYILHTLRR

SEQ ID NO: 44569 - protein, 216 aa, Arabidopsis thaliana
  peptide (1)..(216): Ceres Seq. ID no. 12603688
MSEEAYEETQESSQSPRPVPKLNERILSTLSRRSVAAHPWHDLEIGPEAPLVFNVVVEITKGSKVKYELDKKTGLIKVDRILYSSVVYPHNYGFIPRTLCEDNDPLDVLVLMQEPVLPGCFLRARAIGLMPMIDQGEKDDKIIAVCADDPEYKHFTDIKQLAPHRLQEIRRFFEDYKKNENKKVAVNDFLPSESAHEAIQYSMDLYAEYILHTLRR

SEQ ID NO: 44570 - DNA, 736 bp, Arabidopsis thaliana
  misc_feature (1)..(736): Ceres Seq. ID no. 12466142
  misc_feature (1)..(736): Ortholog of  Ceres SEQ ID NO 12583413 as cited in SEQ ID NO 56816
  misc_feature (1)..(736): Ortholog of  Ceres SEQ ID NO 15168480 as cited in SEQ ID NO 57927
  misc_feature (1)..(736): Ortholog of  Ceres SEQ ID NO 15177738 as cited in SEQ ID NO 0
cacttctatggctgttatggctgtttactacagattctcttggcaaatggagggaggtgagatctcaatgttggaaatgtttggtacatttgctctctctgttggtgctgctgttggtatggaattctgggcaagatgggctcatagagctctgtggcacgcttctctatggaatatgcatgagtcacatcacaaaccaagagaaggaccgtttgagctaaacgatgtttttgctatagtgaacgctggtccagcgattggtctcctctcttatggattcttcaataaaggactcgttcctggtctctgctttggcgccgggttaggcataacggtgtttggaatcgcctacatgtttgtccccgatggtctcgtgcccaagcgtttccctgtaggtcccatcgccgacgtcccttacctccgaaaggtcgccgccgctcaccagttacatcacacagacaaattcaatggtgtaccatatggactgtttcttggacccaaggaattggaagaagttggaggaaatgaagagttagataaggggattagtcggggaatcaaatcatacaaaaaggcctcgggttccgggtcgagttcttgacttgaaacaagttttaaatcccaaattcttttttgtcttctgtcattatgatcatcttaagacggtctatgttgataaatcctatatgccgatttttgattttaatgaatatttataaaaaatatagatacctcc

SEQ ID NO: 44571 - protein, 199 aa, Arabidopsis thaliana
  peptide (1)..(199): Ceres Seq. ID no. 12466143
TSMAVMAVYYRFSWQMEGGEISMLEMFGTFALSVGAAVGMEFWARWAHRALWHASLWNMHESHHKPREGPFELNDVFAIVNAGPAIGLLSYGFFNKGLVPGLCFGAGLGITVFGIAYMFVPDGLVPKRFPVGPIADVPYLRKVAAAHQLHHTDKFNGVPYGLFLGPKELEEVGGNEELDKGISRGIKSYKKASGSGSSS

SEQ ID NO: 44572 - protein, 197 aa, Arabidopsis thaliana
  peptide (1)..(197): Ceres Seq. ID no. 12466144
MAVMAVYYRFSWQMEGGEISMLEMFGTFALSVGAAVGMEFWARWAHRALWHASLWNMHESHHKPREGPFELNDVFAIVNAGPAIGLLSYGFFNKGLVPGLCFGAGLGITVFGIAYMFVPDGLVPKRFPVGPIADVPYLRKVAAAHQLHHTDKFNGVPYGLFLGPKELEEVGGNEELDKGISRGIKSYKKASGSGSSS

SEQ ID NO: 44573 - protein, 194 aa, Arabidopsis thaliana
  peptide (1)..(194): Ceres Seq. ID no. 12466145
MAVYYRFSWQMEGGEISMLEMFGTFALSVGAAVGMEFWARWAHRALWHASLWNMHESHHKPREGPFELNDVFAIVNAGPAIGLLSYGFFNKGLVPGLCFGAGLGITVFGIAYMFVPDGLVPKRFPVGPIADVPYLRKVAAAHQLHHTDKFNGVPYGLFLGPKELEEVGGNEELDKGISRGIKSYKKASGSGSSS

SEQ ID NO: 44574 - DNA, 2976 bp, Arabidopsis thaliana
  misc_feature (1)..(2976): Ceres Seq. ID no. 12488998
  misc_feature (1)..(2976): Ortholog of  Ceres SEQ ID NO 13503610 as cited in SEQ ID NO 62416
  misc_feature (1)..(2976): Ortholog of  Ceres SEQ ID NO 13657610 as cited in SEQ ID NO 66165
  misc_feature (1)..(2976): Ortholog of  Ceres SEQ ID NO 13598312 as cited in SEQ ID NO 68448
  misc_feature (1)..(2976): Ortholog of  Ceres SEQ ID NO 13596100 as cited in SEQ ID NO 68573
  misc_feature (2861)..(2861): n is a, c, t, g, unknown, or other
ctagtcacttggcataagcaaaccaagctatccagccaaataattagtgttgggctagtggtgaacgtcatgcgaatagtctggataccctagtttgagtttaagttgagagggtttctaaacgatttttggaaatacattaactttggttcagactttctcgattaattaccattaaaaatcaaaaggtcaatgttgtcgaaaatgtaaaagtataggcttcaaatagtacaatggtacaatcaatgcccaacgaaacgaacgaagcatatgaaacaaatatagtggtagatacatgtgatcgtgtatgattagaatttgctactctcgaattatttctgtttagtttctagagagtttggttggtttactatttgcagatagatcatggagaatgctacttcgacctcaatctctgggaaccatatactcactaatcatcttcaaacgatttgtcccaaaacaacgtatattactaactgcgtttgatgttttgaatatgtatgataaggttaaacatatagagcgtatagattttcaaaagcatggtagctgttggtgaaaatgcatggcttattagtgtttcttttagagaagctaacgttgtatatagcattaatttacatatctaattttgtcaattgtaatgagactttggatacaacaacatccggctgcgaaataattgtgactttatatgtatttttaataaattaaatggtccaactaacacagaaaacgtacgagtacactgtctcaatatttgtttctcattggtccacgtccaacttggccagccactgaccacttcaactacaatttaaaatgaactgacaaatctccaaccaaacactgacccgtaataaattctatctatctttagagacttcgagtcctttcccttttctactttcctcttttggattcattaattaactacacaaatcaatttgaggaaaatcacatgattctaacacacttctttcaggtaaagtgtcaaaagtttcacagaccatatcaattcaaatactccatgcgaaattaatttattaatgctatgaaagtgtgcaaccggtgcacccatgggaaacaatcataacacaaataattggtatacatattttgtaataaacatggtaacaattagaatggttaaaatgtttaaacagtgaattgagataagttttaactcgtgatcagaactatttttatgctcttttgtttaaaatggtcgtattcatgtgttcttatacgtataaagtcacaaaaagacgaccattttttaaaagtgcgttcacctatttgtacaacttgcggtaacgattttgtgttttaataaacggtaaccttaaaacgcagaccacattttccgcggcacaaacgcgcttaacgccatctctataaattaaaacccacccaatgcccaatattttctcatatgttcattgcaatggcagatttcaaaattcttttgcttatactcatccttatatctctctttgaacttgatctacttcattttcaccatgacttcttctctccttttccggtcaagatcggtttactcctgatatccatcttcttctatgcctactcaaccacccggtctaaaccggtttacctagtggatttctcatgtcaccaacccacggattcttgcaaaatctcatccgaaacgttcttcaacatggccaaaggcgctcaactctacaccgatgaaacaatccaattcatgacgaggatattaaaccggtccggtttaggagacgatacgtactccccacgttgcatgttaacctctccaccaactccatcaatgtacgaggcgagacatgaatccgaattagttatcttcggagctcttaactcactattcaagaaaaccggaatcgaaccgagagaagtcggaatcttcattgtaaactgcagcttgtttaaccctaacccatctctctcgtccatgatcgtaaaccggtacaagcttaaaaccgacgtcaaaacttacaatctctccggtatgggatgcagcgccggcgcaatctccgtcgacctcgccacaaatctactaaaggcaaaccctaatacctacgcagttattgttagtacggagaacatgaccctaagcatgtatcgaggcaacgaccggtcaatgttagtccctaactgtctattccgagtaggtggcgctgcggttatgctctcaaaccggagtcaagaccgagtccggtctaagtacgaattgactcatattgtaaggactcacaaaggctctagcgataaacactacacttgtgctgaacaaaaagaagatagtaaaggtatcgttggagtcgcactctctaaagaactaacggttgttgctggtgactcgttaaagacgaatctaacagcacttggtccgcttgtgttgcctttatctgaaaaactccggtttatcctctttttggtaaagagtaagcttttccggttaaaggttagtccatatgttccggattttaaactatgtttcaagcatttctgtattcacgctggtggtagagcgttacttgacgcggttgaaaaaggtcttggacttagtgagtttgatcttgagccgtctcggatgactttgcaccgctttggaaacacttcaagctcgtcgctgtggtacgagctggcttacgtggaggctaaatgtcgggtcaaacgaggagatagggtttggcagttggcgtttgggtcgggttttaaatgtaatagtattgtgtggagagcgttgagaacgattccggctaacgagtcattggtgggtaacccgtggggtgactcggttcataagtatccagttcacgtgacctaagttttaagtaatactactacgngtgtgaagtcacgttataagttatcataagtcaacaatatgttattagctttctattaaagtgtagtttttttttttttttccccacaaatatgtattatttgcttgtttttgcc

SEQ ID NO: 44575 - protein, 466 aa, Arabidopsis thaliana
  peptide (1)..(466): Ceres Seq. ID no. 12488999
MFIAMADFKILLLILILISLFELDLLHFHHDFFSPFPVKIGLLLISIFFYAYSTTRSKPVYLVDFSCHQPTDSCKISSETFFNMAKGAQLYTDETIQFMTRILNRSGLGDDTYSPRCMLTSPPTPSMYEARHESELVIFGALNSLFKKTGIEPREVGIFIVNCSLFNPNPSLSSMIVNRYKLKTDVKTYNLSGMGCSAGAISVDLATNLLKANPNTYAVIVSTENMTLSMYRGNDRSMLVPNCLFRVGGAAVMLSNRSQDRVRSKYELTHIVRTHKGSSDKHYTCAEQKEDSKGIVGVALSKELTVVAGDSLKTNLTALGPLVLPLSEKLRFILFLVKSKLFRLKVSPYVPDFKLCFKHFCIHAGGRALLDAVEKGLGLSEFDLEPSRMTLHRFGNTSSSSLWYELAYVEAKCRVKRGDRVWQLAFGSGFKCNSIVWRALRTIPANESLVGNPWGDSVHKYPVHVT

SEQ ID NO: 44576 - protein, 462 aa, Arabidopsis thaliana
  peptide (1)..(462): Ceres Seq. ID no. 12489000
MADFKILLLILILISLFELDLLHFHHDFFSPFPVKIGLLLISIFFYAYSTTRSKPVYLVDFSCHQPTDSCKISSETFFNMAKGAQLYTDETIQFMTRILNRSGLGDDTYSPRCMLTSPPTPSMYEARHESELVIFGALNSLFKKTGIEPREVGIFIVNCSLFNPNPSLSSMIVNRYKLKTDVKTYNLSGMGCSAGAISVDLATNLLKANPNTYAVIVSTENMTLSMYRGNDRSMLVPNCLFRVGGAAVMLSNRSQDRVRSKYELTHIVRTHKGSSDKHYTCAEQKEDSKGIVGVALSKELTVVAGDSLKTNLTALGPLVLPLSEKLRFILFLVKSKLFRLKVSPYVPDFKLCFKHFCIHAGGRALLDAVEKGLGLSEFDLEPSRMTLHRFGNTSSSSLWYELAYVEAKCRVKRGDRVWQLAFGSGFKCNSIVWRALRTIPANESLVGNPWGDSVHKYPVHVT

SEQ ID NO: 44577 - protein, 383 aa, Arabidopsis thaliana
  peptide (1)..(383): Ceres Seq. ID no. 12489001
MAKGAQLYTDETIQFMTRILNRSGLGDDTYSPRCMLTSPPTPSMYEARHESELVIFGALNSLFKKTGIEPREVGIFIVNCSLFNPNPSLSSMIVNRYKLKTDVKTYNLSGMGCSAGAISVDLATNLLKANPNTYAVIVSTENMTLSMYRGNDRSMLVPNCLFRVGGAAVMLSNRSQDRVRSKYELTHIVRTHKGSSDKHYTCAEQKEDSKGIVGVALSKELTVVAGDSLKTNLTALGPLVLPLSEKLRFILFLVKSKLFRLKVSPYVPDFKLCFKHFCIHAGGRALLDAVEKGLGLSEFDLEPSRMTLHRFGNTSSSSLWYELAYVEAKCRVKRGDRVWQLAFGSGFKCNSIVWRALRTIPANESLVGNPWGDSVHKYPVHVT

SEQ ID NO: 44578 - DNA, 1490 bp, Arabidopsis thaliana
  misc_feature (1)..(1490): Ceres Seq. ID no. 13509561
  misc_feature (1)..(1490): Ortholog of  Ceres SEQ ID NO 14303790 as cited in SEQ ID NO 55525
gagaaaaatggattcctctccatcagaagtaaagattatctcaaaatgcttcgtcaaacccaaaaccatacctgaaaaatggaaagagccataccatttttcaccaatggatcatgtaatactctcaatccattacatccaaaagggtcttctctttctcaaaccatcgttttctgaatctgtcacaccaaaagagttcatggagactttgctgcagaagcttaaagactctctagccatagcacttgtccatttctatccgcttgcaggtcgcatctcgactttgaaaaccaacgactcaagatctcactcggtgtttgtggattgtaataacagtcctgctggatttatccatgctgaatcagatctaagtgtatcagacattcttggttccaaatatgttcctttggttgttcaatctttctttgaccatcacaaagcattgagtcgtgatggtgacaccatgactctcttatcagtcaaggtaacagaattggtagatggagtgttcataggattgtctatgaatcattcgcttggagatggaagttccttctggcacttcttcaactctttgtccgagattttcaattctcaagaagataacaacaagtttctctgtctgaagaatcctccaatctttcgtgaagtgtccggtcctatgtacagccttcccttcagtgaacctgatgagtccattagtcaatcagaacgtccggttttgaaggagagaatgttccatttctcatcagaaacagtgagatcactaaaatcaaaggcgaatgaagaatgcggaacaacaaagatatcttctttgcagtcgctgactgcattgatatggagaagcattacaagagcaagaaaactaccaaatgatcaagaaactacttgcaggcttgctgctggcaatagatcaagaatgaatccaccattgccgatgaatcactttggaaattacatctctcttgtgatagctactactacaactggtgatctattggagaatgagtttggatgtgctgctttgaaactgcatcaagctgtaaccgaacacactggcgaaaagatctctgccgacatggaccgttggttgaaggctcatttgaaactagatggatttttcagtccaaatattgttcacatgggaagctctccgaggtttaacaagtacggaagcgagtttgggatggggaaagcagtggcggttagaagcggttatggtggtaagtatgacgggaaggtatcagcttatccagggagagaaggaggagcaagcatagatttggaagtatgtctacctccagagtgtatggaagctttggaattagatcaagagtttatgtctcttgtctcttcttcttcttcttcttgatctaatattcttattcatatgtgctcccatcatatctctatctaaactggatttgttagattggagtattttgtgttgctgttaaaactcaatcaatattatgtgacaatgtgttatt

SEQ ID NO: 44579 - protein, 456 aa, Arabidopsis thaliana
  peptide (1)..(456): Ceres Seq. ID no. 13509562
RKMDSSPSEVKIISKCFVKPKTIPEKWKEPYHFSPMDHVILSIHYIQKGLLFLKPSFSESVTPKEFMETLLQKLKDSLAIALVHFYPLAGRISTLKTNDSRSHSVFVDCNNSPAGFIHAESDLSVSDILGSKYVPLVVQSFFDHHKALSRDGDTMTLLSVKVTELVDGVFIGLSMNHSLGDGSSFWHFFNSLSEIFNSQEDNNKFLCLKNPPIFREVSGPMYSLPFSEPDESISQSERPVLKERMFHFSSETVRSLKSKANEECGTTKISSLQSLTALIWRSITRARKLPNDQETTCRLAAGNRSRMNPPLPMNHFGNYISLVIATTTTGDLLENEFGCAALKLHQAVTEHTGEKISADMDRWLKAHLKLDGFFSPNIVHMGSSPRFNKYGSEFGMGKAVAVRSGYGGKYDGKVSAYPGREGGASIDLEVCLPPECMEALELDQEFMSLVSSSSSS

SEQ ID NO: 44580 - protein, 454 aa, Arabidopsis thaliana
  peptide (1)..(454): Ceres Seq. ID no. 13509563
MDSSPSEVKIISKCFVKPKTIPEKWKEPYHFSPMDHVILSIHYIQKGLLFLKPSFSESVTPKEFMETLLQKLKDSLAIALVHFYPLAGRISTLKTNDSRSHSVFVDCNNSPAGFIHAESDLSVSDILGSKYVPLVVQSFFDHHKALSRDGDTMTLLSVKVTELVDGVFIGLSMNHSLGDGSSFWHFFNSLSEIFNSQEDNNKFLCLKNPPIFREVSGPMYSLPFSEPDESISQSERPVLKERMFHFSSETVRSLKSKANEECGTTKISSLQSLTALIWRSITRARKLPNDQETTCRLAAGNRSRMNPPLPMNHFGNYISLVIATTTTGDLLENEFGCAALKLHQAVTEHTGEKISADMDRWLKAHLKLDGFFSPNIVHMGSSPRFNKYGSEFGMGKAVAVRSGYGGKYDGKVSAYPGREGGASIDLEVCLPPECMEALELDQEFMSLVSSSSSS

SEQ ID NO: 44581 - protein, 421 aa, Arabidopsis thaliana
  peptide (1)..(421): Ceres Seq. ID no. 13509564
MDHVILSIHYIQKGLLFLKPSFSESVTPKEFMETLLQKLKDSLAIALVHFYPLAGRISTLKTNDSRSHSVFVDCNNSPAGFIHAESDLSVSDILGSKYVPLVVQSFFDHHKALSRDGDTMTLLSVKVTELVDGVFIGLSMNHSLGDGSSFWHFFNSLSEIFNSQEDNNKFLCLKNPPIFREVSGPMYSLPFSEPDESISQSERPVLKERMFHFSSETVRSLKSKANEECGTTKISSLQSLTALIWRSITRARKLPNDQETTCRLAAGNRSRMNPPLPMNHFGNYISLVIATTTTGDLLENEFGCAALKLHQAVTEHTGEKISADMDRWLKAHLKLDGFFSPNIVHMGSSPRFNKYGSEFGMGKAVAVRSGYGGKYDGKVSAYPGREGGASIDLEVCLPPECMEALELDQEFMSLVSSSSSS

SEQ ID NO: 44582 - DNA, 640 bp, Arabidopsis thaliana
  misc_feature (1)..(640): Ceres Seq. ID no. 13575440
  misc_feature (1)..(640): Ortholog of  Ceres SEQ ID NO 15177758 as cited in SEQ ID NO 57504
  misc_feature (1)..(640): Ortholog of  Ceres SEQ ID NO 13624040 as cited in SEQ ID NO 0
atcaaccagctcaccaagaacaagaacaagaagaagaagaacaagacaagaagaacaaagtacccaagaaaacacacaagaaggaaacacaaagattgatattgatccaaaagcaatggcgtacgagaaagtcaacgagcttaaccttaaggacacagagctatgtcttggattacccggaagaacagagaagatcaaagaagaacaagaggtttcttgcgttaaaagtaacaacaagcgtctatttgaggaaactcgtgatgaagaagaatctacacctcctaccaaaactcaaatcgttggttggccaccagtgagatcttcccgtaagaacaacaacagtgtgagctacgtgaaagtgagtatggacggagctccttaccttcgcaagatcgatctcaagacatacaaaaactaccccgagcttctcaaagcgttagagaatatgttcaaagtcatgattggtgaatattgtgagagagaaggatacaaaggatctggatttgtaccaacatacgaagataaagatggtgactggatgttggttggtgatgttccatgggacatgttctcttcttcttgtaagagactcagaatcatgaagggatccgacgctcctgctctagactcttccttatga

SEQ ID NO: 44583 - protein, 212 aa, Arabidopsis thaliana
  peptide (1)..(212): Ceres Seq. ID no. 13575441
STSSPRTRTRRRRTRQEEQSTQENTQEGNTKIDIDPKAMAYEKVNELNLKDTELCLGLPGRTEKIKEEQEVSCVKSNNKRLFEETRDEEESTPPTKTQIVGWPPVRSSRKNNNSVSYVKVSMDGAPYLRKIDLKTYKNYPELLKALENMFKVMIGEYCEREGYKGSGFVPTYEDKDGDWMLVGDVPWDMFSSSCKRLRIMKGSDAPALDSSL

SEQ ID NO: 44584 - protein, 174 aa, Arabidopsis thaliana
  peptide (1)..(174): Ceres Seq. ID no. 13575442
MAYEKVNELNLKDTELCLGLPGRTEKIKEEQEVSCVKSNNKRLFEETRDEEESTPPTKTQIVGWPPVRSSRKNNNSVSYVKVSMDGAPYLRKIDLKTYKNYPELLKALENMFKVMIGEYCEREGYKGSGFVPTYEDKDGDWMLVGDVPWDMFSSSCKRLRIMKGSDAPALDSSL

SEQ ID NO: 44585 - DNA, 608 bp, Arabidopsis thaliana
  misc_feature (1)..(608): Ceres Seq. ID no. 12489400
  misc_feature (1)..(608): Ortholog of  Ceres SEQ ID NO 12556956 as cited in SEQ ID NO 78
gtttcttcgacagtggcaatgttttcatcttcgattaggttaatcgtaactgggttccaccggactcaacccctaaaatcgccggtaaattctccgagcgtcttcatctccgtacctaaattcttcaactctgagtcaaaatcgacgggaactggttcaagatccgtagcaatgagcagcgttgagaaaaccgggtcggattctggagcaatagagaatcgagcgagcaggatgagagagaagcttcaaaaagagctcgaaccagtggagttagtgatcgaagatgtttcgtatcagcacgctggtcacgccggaatgaaaggtagaaccgacgatgagacgcatttcaatgtgaagatcgtttctaaaggattcgagggaatgaatttggtgaagagacacaggttggtctatcatttgctccgggaagagttggatactggattgcacgctctttctatcgtctccaagacgccgtctgagtctccttctaaagactagtgtactggtactgtttaatgtatcttctgtttctgttatcagagtttctcatcaaactctgttcgattcaaagattgaatttttaccatcaaagtgctctgttttgg

SEQ ID NO: 44586 - protein, 166 aa, Arabidopsis thaliana
  peptide (1)..(166): Ceres Seq. ID no. 12489401
VSSTVAMFSSSIRLIVTGFHRTQPLKSPVNSPSVFISVPKFFNSESKSTGTGSRSVAMSSVEKTGSDSGAIENRASRMREKLQKELEPVELVIEDVSYQHAGHAGMKGRTDDETHFNVKIVSKGFEGMNLVKRHRLVYHLLREELDTGLHALSIVSKTPSESPSKD

SEQ ID NO: 44587 - protein, 160 aa, Arabidopsis thaliana
  peptide (1)..(160): Ceres Seq. ID no. 12489402
MFSSSIRLIVTGFHRTQPLKSPVNSPSVFISVPKFFNSESKSTGTGSRSVAMSSVEKTGSDSGAIENRASRMREKLQKELEPVELVIEDVSYQHAGHAGMKGRTDDETHFNVKIVSKGFEGMNLVKRHRLVYHLLREELDTGLHALSIVSKTPSESPSKD

SEQ ID NO: 44588 - protein, 109 aa, Arabidopsis thaliana; identical to SEQ ID NO: 36885
  peptide (1)..(109): Ceres Seq. ID no. 12489403

SEQ ID NO: 44589 - DNA, 1528 bp, Arabidopsis thaliana
  misc_feature (1)..(1528): Ceres Seq. ID no. 13593371
  misc_feature (1)..(1528): Ortholog of  Ceres SEQ ID NO 14315481 as cited in SEQ ID NO 56990
ttgaagacagagagagaaagtgagtgtgtctgtgagggcgaatcaatgtctctgctttctccagaagatgatatttactttttgtgtcaattagctgtataacgtcttcttcacataaaacaagaacactccacttactaaaaaaaataattatttcttcttgaagagtggaattctttctcgaatcttagaaaattccatttagaactaaagaagagagagagatccagtttctcgtcccagttaagctatggccatgttcaaaaccttatcttttttgttccttttgtgctttcagatacatggaacggtggctgcagatgaaaattccttgttttcattcaatggttttgtaaaatctccgagctttgacaagagggttgctctgtttggagattcgaagctggtcaatgacagttctttgattcagctgactgactcagtgactcgaagcgttggtcgagtcgtttacaagaaacccatcaatcttttcaaaggtaaacagaggaattcgagatctttctctactcacttctcgttttcttccatgtccaacgagattggtgatgatgtcttggcttttgtaatggttccatctagtttggatcttagtctgtttggtaagaaggacaacagttcctctgctttaggttttttatcacaatatgcaaagaacgagacagttgttgctgtcgagtttggtatctccaggacaggaaacagtgcaagaattttagttggtagacctgaatctgctgaaattagaaacctttcgtttgtgggtgacttgatgatggacaatggaaggactctgagctgtatgattgagtatgaggcaagttctaagagaatgatggttcgattcagaaaatctggttcggtaaagctgtttgatccgttcttctctttctcggtagacttggccaagttatggaaaggtggtgaagtcactgtgggtttaagctctgccaatgggaactcttcttccaaggcacattttctccattcatggagatttgaaataagacatcctcctccgatgtggatgcattcagtgccgcttgaaccgaatgaagtttcaaaggaggaggaaaatggtcgagggagaagtgagtgtacgcggaaaatgcttggtgctttgatctttggtgcagcttgtggagccttaggggcactgctgggtttgtatctctggacgatatgccgtgttaggcggtcaatggccgtggttccagaggaatgtgctattgaacaaggcaagaagtagtgagtagtttggttttggtgttgaaaagttgtcttgtgttgtggtgtaaatttaggaactttctcttcttcttcttccctcttgtttacttgatcgttctttagtgattcttatgtctgtttacttagttgcaggttttgtgaaatgacttttcacatgtaaaatctaaactgtgagaagatgtaagcttattgatatgttgcaaattaacttagttgttcatgttgttcttgatccatttggattatgagctgtgcattt

SEQ ID NO: 44590 - protein, 338 aa, Arabidopsis thaliana
  peptide (1)..(338): Ceres Seq. ID no. 13593372
MAMFKTLSFLFLLCFQIHGTVAADENSLFSFNGFVKSPSFDKRVALFGDSKLVNDSSLIQLTDSVTRSVGRVVYKKPINLFKGKQRNSRSFSTHFSFSSMSNEIGDDVLAFVMVPSSLDLSLFGKKDNSSSALGFLSQYAKNETVVAVEFGISRTGNSARILVGRPESAEIRNLSFVGDLMMDNGRTLSCMIEYEASSKRMMVRFRKSGSVKLFDPFFSFSVDLAKLWKGGEVTVGLSSANGNSSSKAHFLHSWRFEIRHPPPMWMHSVPLEPNEVSKEEENGRGRSECTRKMLGALIFGAACGALGALLGLYLWTICRVRRSMAVVPEECAIEQGKK

SEQ ID NO: 44591 - protein, 336 aa, Arabidopsis thaliana
  peptide (1)..(336): Ceres Seq. ID no. 13593373
MFKTLSFLFLLCFQIHGTVAADENSLFSFNGFVKSPSFDKRVALFGDSKLVNDSSLIQLTDSVTRSVGRVVYKKPINLFKGKQRNSRSFSTHFSFSSMSNEIGDDVLAFVMVPSSLDLSLFGKKDNSSSALGFLSQYAKNETVVAVEFGISRTGNSARILVGRPESAEIRNLSFVGDLMMDNGRTLSCMIEYEASSKRMMVRFRKSGSVKLFDPFFSFSVDLAKLWKGGEVTVGLSSANGNSSSKAHFLHSWRFEIRHPPPMWMHSVPLEPNEVSKEEENGRGRSECTRKMLGALIFGAACGALGALLGLYLWTICRVRRSMAVVPEECAIEQGKK

SEQ ID NO: 44592 - protein, 239 aa, Arabidopsis thaliana
  peptide (1)..(239): Ceres Seq. ID no. 13593374
MSNEIGDDVLAFVMVPSSLDLSLFGKKDNSSSALGFLSQYAKNETVVAVEFGISRTGNSARILVGRPESAEIRNLSFVGDLMMDNGRTLSCMIEYEASSKRMMVRFRKSGSVKLFDPFFSFSVDLAKLWKGGEVTVGLSSANGNSSSKAHFLHSWRFEIRHPPPMWMHSVPLEPNEVSKEEENGRGRSECTRKMLGALIFGAACGALGALLGLYLWTICRVRRSMAVVPEECAIEQGKK

SEQ ID NO: 44593 - DNA, 1116 bp, Arabidopsis thaliana; identical to SEQ ID NO: 23062
  misc_feature (1)..(1116): Ceres Seq. ID no. 13509194
  misc_feature (1)..(1116): Ortholog of  Ceres SEQ ID NO 13598387 as cited in SEQ ID NO 62757
  misc_feature (1)..(1116): Ortholog of  Ceres SEQ ID NO 13662984 as cited in SEQ ID NO 64419

SEQ ID NO: 44594 - protein, 307 aa, Arabidopsis thaliana; identical to SEQ ID NO: 23063
  peptide (1)..(307): Ceres Seq. ID no. 13509195

SEQ ID NO: 44595 - protein, 279 aa, Arabidopsis thaliana; identical to SEQ ID NO: 23064
  peptide (1)..(279): Ceres Seq. ID no. 13509196

SEQ ID NO: 44596 - protein, 190 aa, Arabidopsis thaliana; identical to SEQ ID NO: 23065
  peptide (1)..(190): Ceres Seq. ID no. 13509197

SEQ ID NO: 44597 - DNA, 732 bp, Arabidopsis thaliana; identical to SEQ ID NO: 36879
  misc_feature (1)..(732): Ceres Seq. ID no. 13580657
  misc_feature (1)..(732): Ortholog of  Ceres SEQ ID NO 12388689 as cited in SEQ ID NO 0

SEQ ID NO: 44598 - protein, 170 aa, Arabidopsis thaliana; identical to SEQ ID NO: 36880
  peptide (1)..(170): Ceres Seq. ID no. 13580658

SEQ ID NO: 44599 - protein, 134 aa, Arabidopsis thaliana; identical to SEQ ID NO: 36881
  peptide (1)..(134): Ceres Seq. ID no. 13580659

SEQ ID NO: 44600 - protein, 99 aa, Arabidopsis thaliana; identical to SEQ ID NO: 36882
  peptide (1)..(99): Ceres Seq. ID no. 13580660

SEQ ID NO: 44601 - DNA, 1338 bp, Arabidopsis thaliana; identical to SEQ ID NO: 43868
  misc_feature (1)..(1338): Ceres Seq. ID no. 12462175
  misc_feature (1)..(1338): Ortholog of  Ceres SEQ ID NO 15169316 as cited in SEQ ID NO 54821
  misc_feature (1)..(1338): Ortholog of  Ceres SEQ ID NO 13598294 as cited in SEQ ID NO 61982

SEQ ID NO: 44602 - protein, 346 aa, Arabidopsis thaliana; identical to SEQ ID NO: 43869
  peptide (1)..(346): Ceres Seq. ID no. 12462176

SEQ ID NO: 44603 - protein, 340 aa, Arabidopsis thaliana; identical to SEQ ID NO: 43870
  peptide (1)..(340): Ceres Seq. ID no. 12462177

SEQ ID NO: 44604 - protein, 224 aa, Arabidopsis thaliana; identical to SEQ ID NO: 43871
  peptide (1)..(224): Ceres Seq. ID no. 12462178

SEQ ID NO: 44605 - DNA, 799 bp, Arabidopsis thaliana
  misc_feature (1)..(799): Ceres Seq. ID no. 12466246
  misc_feature (1)..(799): Ortholog of  Ceres SEQ ID NO 15172885 as cited in SEQ ID NO 51883
  misc_feature (1)..(799): Ortholog of  Ceres SEQ ID NO 13594663 as cited in SEQ ID NO 51894
  misc_feature (1)..(799): Ortholog of  Ceres SEQ ID NO 15226128 as cited in SEQ ID NO 60215
  misc_feature (1)..(799): Ortholog of  Ceres SEQ ID NO 14302271 as cited in SEQ ID NO 68360
  misc_feature (1)..(799): Ortholog of  Ceres SEQ ID NO 12635134 as cited in SEQ ID NO 0
  misc_feature (1)..(799): Ortholog of  Ceres SEQ ID NO 13623037 as cited in SEQ ID NO 0
  misc_feature (1)..(799): Ortholog of  Ceres SEQ ID NO 15175141 as cited in SEQ ID NO 0
gtcgtaagaatataataataagccgttcggtgagtgcactctttctctctcactgttgttgttgtgtatctgtgcgagatctctccaacgaaaaaatggcttgtagactcttttgggcttctagggttgcttctcatctaaggatctccgttgctcaacgagggttttcttccgtggttttgaaggatttgaaatatgctgattcacatgaatgggtgaagattgacgggaataaagcaacctttggtataacggatcacgcgcaggaccatttaggagatgtggtctatgtggagttacctgatgtaggacattcggtgtcacaagggaagagttttggagcagttgaaagtgtgaaagcaactagcgatatcaattctccagtctcgggtaaggtggttgaagtcaatgaggagctgaccgagtcccctggattggtgaactctagcccgtatgaacaaggatggatcataaaagttgagctgagtgatgcaggcgaggcagagaagctgatggattcagacaagtactctaagttctgcgaagaagaagacgccaagcactgagctttttctattttttccagcatccttctccaagcttccaccgcaacacagattgttgttttctcaatcgaggatcaaaacgagatttctccatctttgtcccttggactgaaaattcccatctctcgttctccttttttcttttcatgtttttcttttaatgaaatgaaattgtttgaataatggtagagaataatgagctttggcgttgaaattgattggatctttcatgg

SEQ ID NO: 44606 - protein, 187 aa, Arabidopsis thaliana
  peptide (1)..(187): Ceres Seq. ID no. 12466247
RKNIIISRSVSALFLSHCCCCVSVRDLSNEKMACRLFWASRVASHLRISVAQRGFSSVVLKDLKYADSHEWVKIDGNKATFGITDHAQDHLGDVVYVELPDVGHSVSQGKSFGAVESVKATSDINSPVSGKVVEVNEELTESPGLVNSSPYEQGWIIKVELSDAGEAEKLMDSDKYSKFCEEEDAKH

SEQ ID NO: 44607 - protein, 156 aa, Arabidopsis thaliana
  peptide (1)..(156): Ceres Seq. ID no. 12466248
MACRLFWASRVASHLRISVAQRGFSSVVLKDLKYADSHEWVKIDGNKATFGITDHAQDHLGDVVYVELPDVGHSVSQGKSFGAVESVKATSDINSPVSGKVVEVNEELTESPGLVNSSPYEQGWIIKVELSDAGEAEKLMDSDKYSKFCEEEDAKH

SEQ ID NO: 44608 - DNA, 1571 bp, Arabidopsis thaliana
  misc_feature (1)..(1571): Ceres Seq. ID no. 12488514
  misc_feature (1)..(1571): Ortholog of  Ceres SEQ ID NO 15171265 as cited in SEQ ID NO 52326
agaagtgatattaaagtgcttttgagctgtctcgtagaaaccatgaaaccttaataaaagcaaccttgtcttcaacattctccatcttcctcctcacttaatccccaagttcacacttcaaatccactctttctatttctctccttcttcttctatgtctcgcctcctccctcctcatctctccgtcaaccttcctaccatggagaaaactacttcttccgagttaaccccaactcgactcggttttcctaacgagttcccttacgagttcgactctccttccttctcccctggtttcacttctcccggtgactccactgagacggaagacgaaagcagtgatgacgaggaagacttcctcgctgggttaactcgccgactcgctccttcgactcagcgtcttccttcccctctcttcaagtctgaggagaaacgtcaagttgcagctacttcaccacagtcaacactgagtggactcggaagcttttcaaactcaggaagtagaagccctatccttccatctccaccggctcctacgtcatcatttcgtagagacaacgcgtgggatgtgatttctgcggctgctggagaagtcgctagacttaagctcggaagctacgagcctcatcaccttccccttcaaacccctgagtctcttctccgccgtcaaaacgctgccatacatgctgaactccaacaccagcgtctcatcgaacagatgtggctctgctctgctcagtcaagattcaagctctcagagaatcgtatcccaaggagagtagttaatgaagaaggcttatttgagaatccgagatacgtgagacgcaacaatcctacgtggttgcctccgcaacaagccgcagctcctttgaaacgtccttctgctggaaccggtgtttttcttccccggcgatacccatcggccgccccttccgattccctgaaaacaccagtcaacactccagctatgttgcagcctaaagtgaaacctcaaaatctcaactttgatgagttcaccaatattgttgggccaaggcgtagccaattcgattacgagtgcatgttggcgagaagtacagtacttgctcgtcagggaaatttcagagcagttagtggtggtggtcttccacaggattggatgtactgatgttgttggagttttagctgttgtttttgtcttacaagttcgaaattcggaaggagcgtcttagtttagaaggtggttcggtttaggttatagttgaactagtgaagtttgcgttctggttagtaataaggatttgaattataagaataaatttagggggatattcaagtttgtattaataaatatatatatatatatatatatttatgtatttttagttactaagaccaagctctctgtaatttttttgttgaccttgggagggtttttaaggagtggagtggggaaattgaaaatttgttgggtgggatttgttatttgtgatacataaatagtgttttctgctatttttggtaaaatctaatgggtctgtagtaaaaacatcggaattattttgtttgtttattaataattaattattgat

SEQ ID NO: 44609 - protein, 330 aa, Arabidopsis thaliana
  peptide (1)..(330): Ceres Seq. ID no. 12488515
MSRLLPPHLSVNLPTMEKTTSSELTPTRLGFPNEFPYEFDSPSFSPGFTSPGDSTETEDESSDDEEDFLAGLTRRLAPSTQRLPSPLFKSEEKRQVAATSPQSTLSGLGSFSNSGSRSPILPSPPAPTSSFRRDNAWDVISAAAGEVARLKLGSYEPHHLPLQTPESLLRRQNAAIHAELQHQRLIEQMWLCSAQSRFKLSENRIPRRVVNEEGLFENPRYVRRNNPTWLPPQQAAAPLKRPSAGTGVFLPRRYPSAAPSDSLKTPVNTPAMLQPKVKPQNLNFDEFTNIVGPRRSQFDYECMLARSTVLARQGNFRAVSGGGLPQDWMY

SEQ ID NO: 44610 - protein, 315 aa, Arabidopsis thaliana
  peptide (1)..(315): Ceres Seq. ID no. 12488516
MEKTTSSELTPTRLGFPNEFPYEFDSPSFSPGFTSPGDSTETEDESSDDEEDFLAGLTRRLAPSTQRLPSPLFKSEEKRQVAATSPQSTLSGLGSFSNSGSRSPILPSPPAPTSSFRRDNAWDVISAAAGEVARLKLGSYEPHHLPLQTPESLLRRQNAAIHAELQHQRLIEQMWLCSAQSRFKLSENRIPRRVVNEEGLFENPRYVRRNNPTWLPPQQAAAPLKRPSAGTGVFLPRRYPSAAPSDSLKTPVNTPAMLQPKVKPQNLNFDEFTNIVGPRRSQFDYECMLARSTVLARQGNFRAVSGGGLPQDWMY

SEQ ID NO: 44611 - DNA, 955 bp, Arabidopsis thaliana
  misc_feature (1)..(955): Ceres Seq. ID no. 13503845
  misc_feature (1)..(955): Ortholog of  Ceres SEQ ID NO 15177803 as cited in SEQ ID NO 54174
  misc_feature (1)..(955): Ortholog of  Ceres SEQ ID NO 13596550 as cited in SEQ ID NO 62777
agaaattttactttttctttttgggaacccgtgatcaaatgataggaggaacaaatcaggagagacacaattctttattgacagagaaattgataatcgaagaaccctattaccaccgattctcctcttttctctctgtttcgtcgtcatctagggtttcctaatgcatgagttctctactgttgatggttttgcggagataaacgagagcttagcggagatgataaagtacattgcaaatgaaccctcagtggggctttactacattcaacagcacatccgaaacgcagcaccgaatgttattaatctcaacaacaacgttttggagaagtcccgtgaaacaggcttgcataccgaagacttggaagattctatagccatggtgaaatctatgaaagactgtggttcacctattgctgatgagatgataggagacattaagaactctttagcgataatgtcttcgaaacaaccgaggagaggggtcatcctcaactccacaagtccttggagcagatccagcagtataacaacaagaacgcgtggttctgataacagccaggataatagtgaaagcagcaactatttcacatcagtcttcatgacggctaaggagaaggcaagcaacatcaaatggccacaacttgatttcaaagaacaaaagtcagaggctgaccccaatgtgcaaagcaatgagttaaaagaagaagaagaagaggactcagggaaaggtgaacatattgtggagacaacaaagtttgaggagttcaaggcaggtaaagaagcgagtctcaaggcatggcttggagatatggatgggaatgtggatgttggtggtcgtgttgccgagagaatttagatgttttttcattaatgtcgctgtggttacgggagactgcttatttatgtaaatcattcacttacacagagaaaaaagagttaaaattttgacttt

SEQ ID NO: 44612 - protein, 231 aa, Arabidopsis thaliana
  peptide (1)..(231): Ceres Seq. ID no. 13503846
MHEFSTVDGFAEINESLAEMIKYIANEPSVGLYYIQQHIRNAAPNVINLNNNVLEKSRETGLHTEDLEDSIAMVKSMKDCGSPIADEMIGDIKNSLAIMSSKQPRRGVILNSTSPWSRSSSITTRTRGSDNSQDNSESSNYFTSVFMTAKEKASNIKWPQLDFKEQKSEADPNVQSNELKEEEEEDSGKGEHIVETTKFEEFKAGKEASLKAWLGDMDGNVDVGGRVAERI

SEQ ID NO: 44613 - protein, 212 aa, Arabidopsis thaliana
  peptide (1)..(212): Ceres Seq. ID no. 13503847
MIKYIANEPSVGLYYIQQHIRNAAPNVINLNNNVLEKSRETGLHTEDLEDSIAMVKSMKDCGSPIADEMIGDIKNSLAIMSSKQPRRGVILNSTSPWSRSSSITTRTRGSDNSQDNSESSNYFTSVFMTAKEKASNIKWPQLDFKEQKSEADPNVQSNELKEEEEEDSGKGEHIVETTKFEEFKAGKEASLKAWLGDMDGNVDVGGRVAERI

SEQ ID NO: 44614 - protein, 159 aa, Arabidopsis thaliana
  peptide (1)..(159): Ceres Seq. ID no. 13503848
MVKSMKDCGSPIADEMIGDIKNSLAIMSSKQPRRGVILNSTSPWSRSSSITTRTRGSDNSQDNSESSNYFTSVFMTAKEKASNIKWPQLDFKEQKSEADPNVQSNELKEEEEEDSGKGEHIVETTKFEEFKAGKEASLKAWLGDMDGNVDVGGRVAERI

SEQ ID NO: 44615 - DNA, 1260 bp, Arabidopsis thaliana
  misc_feature (1)..(1260): Ceres Seq. ID no. 13503078
  misc_feature (1)..(1260): Ortholog of  Ceres SEQ ID NO 15177221 as cited in SEQ ID NO 53046
  misc_feature (1)..(1260): Ortholog of  Ceres SEQ ID NO 12616332 as cited in SEQ ID NO 63449
  misc_feature (1)..(1260): Ortholog of  Ceres SEQ ID NO 13597498 as cited in SEQ ID NO 64648
  misc_feature (1)..(1260): Ortholog of  Ceres SEQ ID NO 14308053 as cited in SEQ ID NO 67790
aatctcaaaattcagtccttttggtgtctcatatgcgcttatagagagatttagcactaaggaggcgcggagatgagggcgaaagctgcttcggggaaagccataatagtgctttgtctagccagctttcttgcaggctcactgttcatgagtcgaactttgagtcgctcttacatacctgaagaagaagatcaccatctcacaaagcatttgtccaaacatttagagattcaaaaggactgcgatgaacataaacgcaaattgatagaaagcaaatccagagacataataggagaagtatcgagaactcaccaagcagtaaaatcattggagagaacaatgtcaacattggagatggagttagcagcagcacgtaccagcgatagaagcagtgagttctggagcgaacggtcggcgaaaaaccagagccgtctgcagaaagtgtttgcagtgataggcattaacacagcattcagcagcaagaaaagacgtgactcggtgagacaaacgtggatgccaacaggagaaaagctaaagaaaatcgagaaagagaaagggattgttgtaaggtttgtgataggacacagtgcaacaccaggaggagtattagataaagccatagatgaagaagattcagagcataaagatttcttaagactaaaacacattgaaggatatcaccaactctcgacaaagacaagactgtacttctcaacagcaactgcaatgtatgacgcagagttctacgtgaaagtggatgatgatgttcatgtcaatttaggtatgcttgttacaacacttgcgagatatcaatcaagaccaaggatttacattggatgcatgaagtctggtcctgttctttcacaaaaaggagtgaagtaccacgagccagagttttggaaatttggagaagaaggtaacaaatactttaggcatgcaacaggtcaaatttacgcaatctctaaagacttagctacatatatctccactaaccaaggaatactacaccggtacgcgaacgaggatgtgtcgttaggagcatggatgttagggttagaagtggagcatgtggacgagaggtcaatgtgttgtggaactccacctgattgtcaatggaaagcacaagctggtaacgtatgtgctgcgtcgttcgattggtcttgcagcgggatttgtaagtccgttgaccggatggctcgtgtgcatcgagcttgtgctgaaggagacactcctctagctaattttcgcttcttcgtctga

SEQ ID NO: 44616 - protein, 395 aa, Arabidopsis thaliana
  peptide (1)..(395): Ceres Seq. ID no. 13503079
MRAKAASGKAIIVLCLASFLAGSLFMSRTLSRSYIPEEEDHHLTKHLSKHLEIQKDCDEHKRKLIESKSRDIIGEVSRTHQAVKSLERTMSTLEMELAAARTSDRSSEFWSERSAKNQSRLQKVFAVIGINTAFSSKKRRDSVRQTWMPTGEKLKKIEKEKGIVVRFVIGHSATPGGVLDKAIDEEDSEHKDFLRLKHIEGYHQLSTKTRLYFSTATAMYDAEFYVKVDDDVHVNLGMLVTTLARYQSRPRIYIGCMKSGPVLSQKGVKYHEPEFWKFGEEGNKYFRHATGQIYAISKDLATYISTNQGILHRYANEDVSLGAWMLGLEVEHVDERSMCCGTPPDCQWKAQAGNVCAASFDWSCSGICKSVDRMARVHRACAEGDTPLANFRFFV

SEQ ID NO: 44617 - protein, 370 aa, Arabidopsis thaliana
  peptide (1)..(370): Ceres Seq. ID no. 13503080
MSRTLSRSYIPEEEDHHLTKHLSKHLEIQKDCDEHKRKLIESKSRDIIGEVSRTHQAVKSLERTMSTLEMELAAARTSDRSSEFWSERSAKNQSRLQKVFAVIGINTAFSSKKRRDSVRQTWMPTGEKLKKIEKEKGIVVRFVIGHSATPGGVLDKAIDEEDSEHKDFLRLKHIEGYHQLSTKTRLYFSTATAMYDAEFYVKVDDDVHVNLGMLVTTLARYQSRPRIYIGCMKSGPVLSQKGVKYHEPEFWKFGEEGNKYFRHATGQIYAISKDLATYISTNQGILHRYANEDVSLGAWMLGLEVEHVDERSMCCGTPPDCQWKAQAGNVCAASFDWSCSGICKSVDRMARVHRACAEGDTPLANFRFFV

SEQ ID NO: 44618 - protein, 306 aa, Arabidopsis thaliana
  peptide (1)..(306): Ceres Seq. ID no. 13503081
MSTLEMELAAARTSDRSSEFWSERSAKNQSRLQKVFAVIGINTAFSSKKRRDSVRQTWMPTGEKLKKIEKEKGIVVRFVIGHSATPGGVLDKAIDEEDSEHKDFLRLKHIEGYHQLSTKTRLYFSTATAMYDAEFYVKVDDDVHVNLGMLVTTLARYQSRPRIYIGCMKSGPVLSQKGVKYHEPEFWKFGEEGNKYFRHATGQIYAISKDLATYISTNQGILHRYANEDVSLGAWMLGLEVEHVDERSMCCGTPPDCQWKAQAGNVCAASFDWSCSGICKSVDRMARVHRACAEGDTPLANFRFFV

SEQ ID NO: 44619 - DNA, 887 bp, Arabidopsis thaliana
  misc_feature (1)..(887): Ceres Seq. ID no. 12466239
  misc_feature (1)..(887): Ortholog of  Ceres SEQ ID NO 12609185 as cited in SEQ ID NO 55761
  misc_feature (1)..(887): Ortholog of  Ceres SEQ ID NO 12615291 as cited in SEQ ID NO 62444
actttctctctttttaacctttttctaattaccactttcttctccatatacaaaaaaaacagagaactcacaatgtgcgattcagattttctctctcgttgctcttcctacgaagcagacgttgattccgacagcgagatctcgacctccagtttcagttcttgttcgtacagtgaatctgaggaagaagagatcaacaatggttttggtgttgttcagtcgaagaagcaaacgaagaaactggagaagaagaagagtaatgtgttgttagaaggttacgttgtagattcagctgtgaatgatgatttgaagagaaccaagagtttaacggacgatgatctcgaggagcttaagggatgtgtagatctagggtttgggtttaattacgaggagattcctgaactttgtaatactttaccagctcttgagctctgttactcgatgagtcagaagtttattgatcaagatcatcatcaccattcttcttcttcgccagagaagaaatcatcggttcttgattctcctgttagtcctattgctagctggaagatctctagtcctggtgataatcctgatgatgttaaagcaaggttgaaattttgggcacaagctgtggcatgtactgtgaggttatgtacttgaagatgagatttggatttgatcaaccaaaagctgaggaatcaatggaggaggaagaagatggtgaaaccagacaatttgcaggagtgaaatctcttatgagactgacctgcttgaaaacaaccattgttgtagagctctttgctcacactgtatgtataaaaagattaatgatctaagaagattttgctaggacattgttgtaatggatgattaataagagagaaataaataaaactttgttcttt

SEQ ID NO: 44620 - protein, 213 aa, Arabidopsis thaliana
  peptide (1)..(213): Ceres Seq. ID no. 12466240
TFSLFNLFLITTFFSIYKKNRELTMCDSDFLSRCSSYEADVDSDSEISTSSFSSCSYSESEEEEINNGFGVVQSKKQTKKLEKKKSNVLLEGYVVDSAVNDDLKRTKSLTDDDLEELKGCVDLGFGFNYEEIPELCNTLPALELCYSMSQKFIDQDHHHHSSSSPEKKSSVLDSPVSPIASWKISSPGDNPDDVKARLKFWAQAVACTVRLCT

SEQ ID NO: 44621 - protein, 189 aa, Arabidopsis thaliana
  peptide (1)..(189): Ceres Seq. ID no. 12466241
MCDSDFLSRCSSYEADVDSDSEISTSSFSSCSYSESEEEEINNGFGVVQSKKQTKKLEKKKSNVLLEGYVVDSAVNDDLKRTKSLTDDDLEELKGCVDLGFGFNYEEIPELCNTLPALELCYSMSQKFIDQDHHHHSSSSPEKKSSVLDSPVSPIASWKISSPGDNPDDVKARLKFWAQAVACTVRLCT

SEQ ID NO: 44622 - DNA, 937 bp, Arabidopsis thaliana
  misc_feature (1)..(937): Ceres Seq. ID no. 13503841
  misc_feature (1)..(937): Ortholog of  Ceres SEQ ID NO 12585640 as cited in SEQ ID NO 63164
tctccgacagagagagagagaagcagatcgtatcatcacgagacgaccatcggaataacagagaaagagagaaaaagagagagagagagagagagagagagagagagaggatgtctggtgtggttgctcttggtcatgcgagctcgtggggcgcagcgctggtaaggatctcgccgtatactttctccgcaatcggaatcgccatctcgatcggtgtctcagtcctcggtgccgcctggggaatttacattacgggaagtagtttgatcggtgcggctatagaagctcctcgtattacttcgaagaatctcatcagtgtcatcttttgcgaagctgttgctatatatggagttattgttgcaatcatactgcaaacaaagttggagagtgtcccatcttcaaagatgtatgatgctgagtctcttagagctggatatgcaatctttgcatctggaattatagttggattcgccaaccttgtatgcgggttatgtgtaggaatcattggaagcagttgtgcattgtccgatgctcagaactccacactttttgtaaagattcttgtgatcgagatattcgggagtgctctcgggttgtttggagttattgtgggaattattatgtctgcacaagcgacatggccaacgaaatagatatatatatatccggtctgtatatgttgtggtctacttgcaaatctggaaaaacatggcttcttgattatcttcattgttatatcgttccaatgtctagacgaaaatcttgtgtgaaaactgagaaccacttttggatccccaattttttgtatttgtttaaaacttttgaataagtccttttggagaacatcttcatgtttgtattctcttataatcaaagacaaagagtttgtatatgatttgttaaaactgaactagtcattttatcaagtctgtttcct

SEQ ID NO: 44623 - protein, 216 aa, Arabidopsis thaliana
  peptide (1)..(216): Ceres Seq. ID no. 13503842
SDREREKQIVSSRDDHRNNREREKKRERERERERERMSGVVALGHASSWGAALVRISPYTFSAIGIAISIGVSVLGAAWGIYITGSSLIGAAIEAPRITSKNLISVIFCEAVAIYGVIVAIILQTKLESVPSSKMYDAESLRAGYAIFASGIIVGFANLVCGLCVGIIGSSCALSDAQNSTLFVKILVIEIFGSALGLFGVIVGIIMSAQATWPTK

SEQ ID NO: 44624 - protein, 180 aa, Arabidopsis thaliana; identical to SEQ ID NO: 38413
  peptide (1)..(180): Ceres Seq. ID no. 13503843

SEQ ID NO: 44625 - protein, 115 aa, Arabidopsis thaliana; identical to SEQ ID NO: 38414
  peptide (1)..(115): Ceres Seq. ID no. 13503844

SEQ ID NO: 44626 - DNA, 1838 bp, Arabidopsis thaliana; identical to SEQ ID NO: 44454
  misc_feature (1)..(1838): Ceres Seq. ID no. 12488934
  misc_feature (1)..(1838): Ortholog of  Ceres SEQ ID NO 15172237 as cited in SEQ ID NO 55116
  misc_feature (1)..(1838): Ortholog of  Ceres SEQ ID NO 13657258 as cited in SEQ ID NO 66023

SEQ ID NO: 44627 - protein, 495 aa, Arabidopsis thaliana; identical to SEQ ID NO: 44455
  peptide (1)..(495): Ceres Seq. ID no. 12488935

SEQ ID NO: 44628 - protein, 475 aa, Arabidopsis thaliana; identical to SEQ ID NO: 44456
  peptide (1)..(475): Ceres Seq. ID no. 12488936

SEQ ID NO: 44629 - protein, 429 aa, Arabidopsis thaliana; identical to SEQ ID NO: 44457
  peptide (1)..(429): Ceres Seq. ID no. 12488937

SEQ ID NO: 44630 - DNA, 1855 bp, Arabidopsis thaliana
  misc_feature (1)..(1855): Ceres Seq. ID no. 13509584
  misc_feature (1)..(1855): Ortholog of  Ceres SEQ ID NO 15171406 as cited in SEQ ID NO 51661
atcaacatcactggtcgtctctccacgtgtaccggaaaatgaatgaagatccttaaaaacacgccggagtgaaaccgagccaccattgtttttttccaaatctgccagagtccgtaccatgtccaccatgcctccacaatttcccttggagatccgctcagctcttcgccgggcttcctccaccgtctatctccaccgttccatcagcaccgtcactactactccttcgtttcgtcaccgaacgacgttgttacgaccgagagctttctcttcttcctctgttaagctccccacgaaaccttctctttgcaccgccgacgagcttcattacgtctccgttcctaacaccgattggcgtctcgctctctggcgctacttgcctcctcctcaggctccgacgaggaatcatccattgttactgttgtctggagtaggaactaatgccatcggatatgatttatctcctggttgctcttttgcaaggcatatgtctggacagggatttgagacttggattctcgaggttcgtggagctggattgagtacacgagtatctgatcttaaggacgttgaggaatctgctcatgaattgtcgaatcagatagaatctactgctagagctgctgcaggtaaagaaacttgttctgatgaaaagcagactactgatattatggacagtagtgcacctgcaccagcgtcggatgtttcagttgttggcgaagcatcggcttgggacgagtcacagcttgtggcgagattgacatcaactttcatgagtttgtcagaaagactttctggctttctcagtgaaggtcagtctgtgttcatgtctgctaagttgtttgacaaaattgcaatgcttgtagatgatacacagctgtacgagcgctttaatgatataagatcgaagcttttgagtttgatagagtcaaagcaaaactcaggacttgttaaccaagtcagagatttggctcagcgccttgtgaatcttttcgacgatggtcaaaggtctgtctcgcctccgctgattgatttacaagagcgcctcactgcgaccatagaagattttcagaagcaactggatttgatagttaaatatgactgggattttgatcactacctggaagaggatgtccctgctgcgattgagtatgtaagagcacaaagcaagcccaaggacggcaaactattcgcaattgggcactccatggggggtatcctactctatgcaatgctatcacgttgtgcttttgaaggacgagaaccttccgtggcagctgtggcaactctggcatcatcggttgattacacaacctcaaattctgcactcaaattgctcatacctcttgccaatcctgcagaagctctgagtgttccagttgttcctctgggtgctttgttggctgccgcttttcctctttcgacacgtcctccatatgtattatcttggcttaatgatttgatatcatcaacagatatgatgcaccctgaaatgttagaaaagcttgtcttgaataacttctgtaccatacctgcaaaactacttattcagctgacaacggcctttcgagagggaggcttacgtgatcgtagtggtaaattttactataaggatcatcttcccagaaccagtgtccctgtcttagctcttgcaggtgatcgggacttgatctgcccccctgcggctgtggaagacactgttaagctgtttccggagaacttggtcacttataagttacttggagaaccagatggaccacattatgcacactatgatttggttggaggacgactggtggtgtcgaagaagtgtgtttcagaagcgcctgttaaaaaggatgccatttccgtttaa

SEQ ID NO: 44631 - protein, 578 aa, Arabidopsis thaliana
  peptide (1)..(578): Ceres Seq. ID no. 13509585
MSTMPPQFPLEIRSALRRASSTVYLHRSISTVTTTPSFRHRTTLLRPRAFSSSSVKLPTKPSLCTADELHYVSVPNTDWRLALWRYLPPPQAPTRNHPLLLLSGVGTNAIGYDLSPGCSFARHMSGQGFETWILEVRGAGLSTRVSDLKDVEESAHELSNQIESTARAAAGKETCSDEKQTTDIMDSSAPAPASDVSVVGEASAWDESQLVARLTSTFMSLSERLSGFLSEGQSVFMSAKLFDKIAMLVDDTQLYERFNDIRSKLLSLIESKQNSGLVNQVRDLAQRLVNLFDDGQRSVSPPLIDLQERLTATIEDFQKQLDLIVKYDWDFDHYLEEDVPAAIEYVRAQSKPKDGKLFAIGHSMGGILLYAMLSRCAFEGREPSVAAVATLASSVDYTTSNSALKLLIPLANPAEALSVPVVPLGALLAAAFPLSTRPPYVLSWLNDLISSTDMMHPEMLEKLVLNNFCTIPAKLLIQLTTAFREGGLRDRSGKFYYKDHLPRTSVPVLALAGDRDLICPPAAVEDTVKLFPENLVTYKLLGEPDGPHYAHYDLVGGRLVVSKKCVSEAPVKKDAISV

SEQ ID NO: 44632 - protein, 575 aa, Arabidopsis thaliana
  peptide (1)..(575): Ceres Seq. ID no. 13509586
MPPQFPLEIRSALRRASSTVYLHRSISTVTTTPSFRHRTTLLRPRAFSSSSVKLPTKPSLCTADELHYVSVPNTDWRLALWRYLPPPQAPTRNHPLLLLSGVGTNAIGYDLSPGCSFARHMSGQGFETWILEVRGAGLSTRVSDLKDVEESAHELSNQIESTARAAAGKETCSDEKQTTDIMDSSAPAPASDVSVVGEASAWDESQLVARLTSTFMSLSERLSGFLSEGQSVFMSAKLFDKIAMLVDDTQLYERFNDIRSKLLSLIESKQNSGLVNQVRDLAQRLVNLFDDGQRSVSPPLIDLQERLTATIEDFQKQLDLIVKYDWDFDHYLEEDVPAAIEYVRAQSKPKDGKLFAIGHSMGGILLYAMLSRCAFEGREPSVAAVATLASSVDYTTSNSALKLLIPLANPAEALSVPVVPLGALLAAAFPLSTRPPYVLSWLNDLISSTDMMHPEMLEKLVLNNFCTIPAKLLIQLTTAFREGGLRDRSGKFYYKDHLPRTSVPVLALAGDRDLICPPAAVEDTVKLFPENLVTYKLLGEPDGPHYAHYDLVGGRLVVSKKCVSEAPVKKDAISV

SEQ ID NO: 44633 - protein, 455 aa, Arabidopsis thaliana
  peptide (1)..(455): Ceres Seq. ID no. 13509587
MSGQGFETWILEVRGAGLSTRVSDLKDVEESAHELSNQIESTARAAAGKETCSDEKQTTDIMDSSAPAPASDVSVVGEASAWDESQLVARLTSTFMSLSERLSGFLSEGQSVFMSAKLFDKIAMLVDDTQLYERFNDIRSKLLSLIESKQNSGLVNQVRDLAQRLVNLFDDGQRSVSPPLIDLQERLTATIEDFQKQLDLIVKYDWDFDHYLEEDVPAAIEYVRAQSKPKDGKLFAIGHSMGGILLYAMLSRCAFEGREPSVAAVATLASSVDYTTSNSALKLLIPLANPAEALSVPVVPLGALLAAAFPLSTRPPYVLSWLNDLISSTDMMHPEMLEKLVLNNFCTIPAKLLIQLTTAFREGGLRDRSGKFYYKDHLPRTSVPVLALAGDRDLICPPAAVEDTVKLFPENLVTYKLLGEPDGPHYAHYDLVGGRLVVSKKCVSEAPVKKDAISV

SEQ ID NO: 44634 - DNA, 2292 bp, Arabidopsis thaliana
  misc_feature (1)..(2292): Ceres Seq. ID no. 13509239
  misc_feature (1)..(2292): Ortholog of  Ceres SEQ ID NO 13599132 as cited in SEQ ID NO 0
aatcacctagtctcattctcactcactcgcttgccttcttcttccgctcacaatctcttcctttctcgttccttctcttcttcgatcagacgattcaatcgcttctcactcaaaccacttcgctccttcgcatccatgtcttcttcttcccccgacgctgctcagactcctctaaccaccgctccttatggctcctggaaatctccaatcaccgccgacatcgtttccggagcttcaaagcgtcttggcggcaccgccgtcgattctcatggccgtctcgtcttgctcgagtctcgccctaacgaatccgggagaggagttttggtgctacaaggagaaacatcaattgatattactccaaaagacttcgctgtgagaactttaacacaagaatacggtggtggtgctttccagatttcatcagatgatacacttgtgttctctaattacaaggatcagcgattgtacaagcaagacattactgataaagattcatctccaaagccaattactccagattatggtacaccagctgttacttatgcagatggagtctttgattcacgctttaaccgttatgttactgttagggaagatggtcgccaggatagatcaaacccaattacaacaatcgtggaggttaatctaagtggagagacacttgaagatccagaaccaaaagtactcgtaagtggcaatgatttctatgcatttccacggttggatcccaagtgtgagcgattggcatggattgaatggagtcaccctaatatgccatgggataaagcagagctgtgggttgggtacatttccgagggcggaaatattgataagcgcgtatgtgttgctggttgtgatcccaaatacgtcgaatcacccactgagccgaagtggtcatcaagaggggaactcttttttgtaactgacagaaagaatggatgttggaatattcataaatggattgagagtaccaatgaggttgtttctgtatatcctctcgacggtgagtttgcgaaaccactatggattttcggtactaactcctacgagataatcgagtgttctgaagagaagaacctaattgcatgcagctataggcagaaagggaagtcatatctaggcattgtagatgattcacagggatcatgttctctgctcgatattcctttaacggattttgacagcattacattgggaaatcagtgcctttatgttgagggagcatcagcagttcttccaccatcagttgccagggtaacactggatcagcataagacgaaagcactcagttctgagattgtttggtcgtcgtcacccgatgttttgaagtacaaggcttacttcagcgtgccagagttgattgaatttccaacagaggttcctggtcagaacgcttatgcatacttttatcctccaaccaatccgctctacaatgctagcatggaagagaaacctccgttgttagtgaagagtcatggaggacctactgctgaatcacgtggatccttaaatctgaatatccaatactggacaagtcgaggttgggcatttgttgatgtcaattatggtggaagcacaggttatggtcgagagtatcgagagcggttgttaaggcagtggggaatagtcgacgttgatgactgttgtggctgtgctaaatacttggtatcttctggcaaggcagatgttaagcggctctgtatatctggcggttctgcaggaggttacacaactcttgcatcattggcgttcagggatgttttcaaagctggagcgtccttatacggagtggctgatttaaaaatgttgaaagaagaaggtcataaatttgaatcccgttatatcgacaatcttgttggagatgaaaaagatttctatgagagatcaccaatcaatttcgtcgataagttctcttgtcccatcatccttttccaaggactagaagacaaggttgtaactccagatcaatcacgtaaaatctatgaagcattaaagaaaaaaggtctgcctgttgctcttgtcgagtacgaaggagaacaacacggttttcgcaaggcggaaaacatcaaatacacacttgagcaacagatggtgttctttgcccgagtggttggagggttcaaagttgctgatgacatcactcctttgaaaattgacaacttcgacacttagaaaacgatgcttaaatagatatgtttggaaaagatttgctttttttttattatttagagaaaatacaggcttggactaacgttttcggataatttgttcatcaaaagtccaaaaccttct

SEQ ID NO: 44635 - protein, 723 aa, Arabidopsis thaliana
  peptide (1)..(723): Ceres Seq. ID no. 13509240
NHLVSFSLTRLPSSSAHNLFLSRSFSSSIRRFNRFSLKPLRSFASMSSSSPDAAQTPLTTAPYGSWKSPITADIVSGASKRLGGTAVDSHGRLVLLESRPNESGRGVLVLQGETSIDITPKDFAVRTLTQEYGGGAFQISSDDTLVFSNYKDQRLYKQDITDKDSSPKPITPDYGTPAVTYADGVFDSRFNRYVTVREDGRQDRSNPITTIVEVNLSGETLEDPEPKVLVSGNDFYAFPRLDPKCERLAWIEWSHPNMPWDKAELWVGYISEGGNIDKRVCVAGCDPKYVESPTEPKWSSRGELFFVTDRKNGCWNIHKWIESTNEVVSVYPLDGEFAKPLWIFGTNSYEIIECSEEKNLIACSYRQKGKSYLGIVDDSQGSCSLLDIPLTDFDSITLGNQCLYVEGASAVLPPSVARVTLDQHKTKALSSEIVWSSSPDVLKYKAYFSVPELIEFPTEVPGQNAYAYFYPPTNPLYNASMEEKPPLLVKSHGGPTAESRGSLNLNIQYWTSRGWAFVDVNYGGSTGYGREYRERLLRQWGIVDVDDCCGCAKYLVSSGKADVKRLCISGGSAGGYTTLASLAFRDVFKAGASLYGVADLKMLKEEGHKFESRYIDNLVGDEKDFYERSPINFVDKFSCPIILFQGLEDKVVTPDQSRKIYEALKKKGLPVALVEYEGEQHGFRKAENIKYTLEQQMVFFARVVGGFKVADDITPLKIDNFDT

SEQ ID NO: 44636 - protein, 678 aa, Arabidopsis thaliana
  peptide (1)..(678): Ceres Seq. ID no. 13509241
MSSSSPDAAQTPLTTAPYGSWKSPITADIVSGASKRLGGTAVDSHGRLVLLESRPNESGRGVLVLQGETSIDITPKDFAVRTLTQEYGGGAFQISSDDTLVFSNYKDQRLYKQDITDKDSSPKPITPDYGTPAVTYADGVFDSRFNRYVTVREDGRQDRSNPITTIVEVNLSGETLEDPEPKVLVSGNDFYAFPRLDPKCERLAWIEWSHPNMPWDKAELWVGYISEGGNIDKRVCVAGCDPKYVESPTEPKWSSRGELFFVTDRKNGCWNIHKWIESTNEVVSVYPLDGEFAKPLWIFGTNSYEIIECSEEKNLIACSYRQKGKSYLGIVDDSQGSCSLLDIPLTDFDSITLGNQCLYVEGASAVLPPSVARVTLDQHKTKALSSEIVWSSSPDVLKYKAYFSVPELIEFPTEVPGQNAYAYFYPPTNPLYNASMEEKPPLLVKSHGGPTAESRGSLNLNIQYWTSRGWAFVDVNYGGSTGYGREYRERLLRQWGIVDVDDCCGCAKYLVSSGKADVKRLCISGGSAGGYTTLASLAFRDVFKAGASLYGVADLKMLKEEGHKFESRYIDNLVGDEKDFYERSPINFVDKFSCPIILFQGLEDKVVTPDQSRKIYEALKKKGLPVALVEYEGEQHGFRKAENIKYTLEQQMVFFARVVGGFKVADDITPLKIDNFDT

SEQ ID NO: 44637 - protein, 466 aa, Arabidopsis thaliana
  peptide (1)..(466): Ceres Seq. ID no. 13509242
MPWDKAELWVGYISEGGNIDKRVCVAGCDPKYVESPTEPKWSSRGELFFVTDRKNGCWNIHKWIESTNEVVSVYPLDGEFAKPLWIFGTNSYEIIECSEEKNLIACSYRQKGKSYLGIVDDSQGSCSLLDIPLTDFDSITLGNQCLYVEGASAVLPPSVARVTLDQHKTKALSSEIVWSSSPDVLKYKAYFSVPELIEFPTEVPGQNAYAYFYPPTNPLYNASMEEKPPLLVKSHGGPTAESRGSLNLNIQYWTSRGWAFVDVNYGGSTGYGREYRERLLRQWGIVDVDDCCGCAKYLVSSGKADVKRLCISGGSAGGYTTLASLAFRDVFKAGASLYGVADLKMLKEEGHKFESRYIDNLVGDEKDFYERSPINFVDKFSCPIILFQGLEDKVVTPDQSRKIYEALKKKGLPVALVEYEGEQHGFRKAENIKYTLEQQMVFFARVVGGFKVADDITPLKIDNFDT

SEQ ID NO: 44638 - DNA, 1044 bp, Arabidopsis thaliana; identical to SEQ ID NO: 23575
  misc_feature (1)..(1044): Ceres Seq. ID no. 12488528
  misc_feature (1)..(1044): Ortholog of  Ceres SEQ ID NO 15174082 as cited in SEQ ID NO 61896
  misc_feature (1)..(1044): Ortholog of  Ceres SEQ ID NO 13655598 as cited in SEQ ID NO 64077
  misc_feature (1)..(1044): Ortholog of  Ceres SEQ ID NO 15179351 as cited in SEQ ID NO 0
  misc_feature (1)..(1044): Ortholog of  Ceres SEQ ID NO 15180408 as cited in SEQ ID NO 0

SEQ ID NO: 44639 - protein, 271 aa, Arabidopsis thaliana; identical to SEQ ID NO: 23576
  peptide (1)..(271): Ceres Seq. ID no. 12488529

SEQ ID NO: 44640 - protein, 230 aa, Arabidopsis thaliana; identical to SEQ ID NO: 23577
  peptide (1)..(230): Ceres Seq. ID no. 12488530

SEQ ID NO: 44641 - DNA, 650 bp, Arabidopsis thaliana
  misc_feature (1)..(650): Ceres Seq. ID no. 13503838
  misc_feature (1)..(650): Ortholog of  Ceres SEQ ID NO 15169763 as cited in SEQ ID NO 1284
  misc_feature (1)..(650): Ortholog of  Ceres SEQ ID NO 12610243 as cited in SEQ ID NO 56206
  misc_feature (1)..(650): Ortholog of  Ceres SEQ ID NO 13661089 as cited in SEQ ID NO 61053
  misc_feature (1)..(650): Ortholog of  Ceres SEQ ID NO 12586495 as cited in SEQ ID NO 64946
taagagacagagagatcttaacacaaaacaaagcaaacaccaaaaaaaacagagatgggtttggttacagatgaagtgagagctagggcagagaaatacacaggagatgagatatgccgtgagaagacaaaggagtttctcaaggaagtttctatgcctaatggtttattgccattgaaggacattgaagaagttggttacgacagagagacaggtattgtctggctgaagcagaagaagagcatcacccacaagtttgaagccattggtaaacttgtctcttacgccaccgaggtcattgcacaggtggaggtcggaaagatcaagaagcttaccggtgttaaggccaaggagcttcttatttgggtcactctcaatgagcttgtcttggagcagccgacaagttcagggaagatcaatttcaggacaccaactggtctgtccaggactttcccagtgtctgctttcgttgttcctgaagttgagaagcctgcaacggagaagaacaatggaaccactgaggtcaaagaagctgttgcagtcacagatgcttagtctctctaatcttattaatcttatccttccaatcatgaattactttctgctatttgctgcttaatttccttttatcaataagatgatacaatttc

SEQ ID NO: 44642 - protein, 166 aa, Arabidopsis thaliana; identical to SEQ ID NO: 27010
  peptide (1)..(166): Ceres Seq. ID no. 13503839

SEQ ID NO: 44643 - protein, 133 aa, Arabidopsis thaliana; identical to SEQ ID NO: 27011
  peptide (1)..(133): Ceres Seq. ID no. 13503840

SEQ ID NO: 44644 - DNA, 1749 bp, Arabidopsis thaliana; identical to SEQ ID NO: 24981
  misc_feature (1)..(1749): Ceres Seq. ID no. 12326633
  misc_feature (1)..(1749): Ortholog of  Ceres SEQ ID NO 15178246 as cited in SEQ ID NO 52038

SEQ ID NO: 44645 - protein, 379 aa, Arabidopsis thaliana; identical to SEQ ID NO: 24982
  peptide (1)..(379): Ceres Seq. ID no. 12326634

SEQ ID NO: 44646 - protein, 367 aa, Arabidopsis thaliana; identical to SEQ ID NO: 24983
  peptide (1)..(367): Ceres Seq. ID no. 12326635

SEQ ID NO: 44647 - protein, 298 aa, Arabidopsis thaliana; identical to SEQ ID NO: 24984
  peptide (1)..(298): Ceres Seq. ID no. 12326636

SEQ ID NO: 44648 - DNA, 2070 bp, Arabidopsis thaliana
  misc_feature (1)..(2070): Ceres Seq. ID no. 12455389
  misc_feature (1)..(2070): Ortholog of  Ceres SEQ ID NO 15179739 as cited in SEQ ID NO 62016
ctcttcaaccatttcccggcttccgcgtttttgctttgtagcgccggaccggagaagataaaacccttgctccgccccactcacaggaagttctacatcgacctgagttctcgtacttcgtcgtatcactcgttcttcctacgatgaactgtgcaatttcaggagaagttcccgtggagccagtggtttcgacgaagtcaggattactcttcgagagacgactaatcgaaagacatatatcggattatgggaagtgcccggttactggcgaaccacttaccattgatgacattgttcccatcaaaactggggagatcataaagccgaaaacattgcatacagctagtatccctggattgctcggaacgttccagaatgaatgggacggtttgatgctatcaaattttgcactggagcaacaactacatactgcaaggcaagagctaagtcatgccttgtatcagcatgattctgcttgtcgtgtgattgctagacttaaaaaagaaagagacgaagcacgccaattactggccgaggttgagagacatatacctgcggcccctgaagctgtgacagctaatgctgctctgagtaatggtaaacgagctgccgttgacgaggaactgggtcctgatgcaaagaaattgtgtcctggaatttcagctgaaattattacggaattgactgattgtaatgctgctctttcccagaagcgaaaaaagcgacagattcctcaaacattggcgtcaatagatactttggagaggttcactcagctatcaagccacccacttcacaagaccaacaaaccaggcatttgttcgatggacattctacattctaaggatgtcattgctactggaggagttgatgcaactgctgttctctttgatcgcccttctggacaaatcttgtcaacactgactggtcactcgaagaaggttacaagcgtaaaatttgtaggcgactctgatcttgttttgactgcttctgctgacaagacagtccgtatctggcggaatcctggggatgggaattatgcttgtgggtatacattgaatgatcattctgcggaggtgcgagctgtaactgtgcatcccacaaataaatactttgtctcggcatctcttgatggtacatggtgcttctacgatctgtcctctggctcatgccttgcacaggtatcagatgattcaaagaatgtagattacacggctgctgcttttcatcccgatggtctcattctcggaaccggtacttctcaatctgttgttaagatttgggacgttaaaagtcaggcaaatgtggctaagtttgatggacacactggggaagttacagctatatctttctctgaaaatggttacttcctcgcgacagctgcagaggatggtgttaggttgtgggatctgcgcaagttaaggaacttcaaatcatttttatctgcagatgcgaactctgtggagtttgatcctagcggatcttatctcggtattgctgcatcagatatcaaagtataccagacggcaagtgtgaaagctgaatggaaccttatcaagacactcccagatctctccggcactggtaaagctacgtgtgtgaagtttggttcagatgcacagtacgttgcagtcggttcgatggaccgtaacctacggatatttggtcttcctggtgatgaaaaagccaacgtcgatgatgactctgcgcaagactcgtgaacaatccgtaaaaaactcagacagaacattccaaatgtccatctccagtgttatctcgctcaaatttctcaagttctgttgtatcttacagtatttgcagcaatgggggagaatttcataggtgcgggtcatgagtgagtggtgattgtgatcatcctcgctacctcttggaattcaaacaatgacactcacaaaccctcgagttttcttataggctcttttaatcgctttgtaccttcaatatatgtaccaaaaaatgtgttctttctgttgccaaatgaattcagacactaatgaagatcccaaaccgatggtgctaaaccgcatttggtattatttaatctgttct

SEQ ID NO: 44649 - protein, 525 aa, Arabidopsis thaliana
  peptide (1)..(525): Ceres Seq. ID no. 12455390
MNCAISGEVPVEPVVSTKSGLLFERRLIERHISDYGKCPVTGEPLTIDDIVPIKTGEIIKPKTLHTASIPGLLGTFQNEWDGLMLSNFALEQQLHTARQELSHALYQHDSACRVIARLKKERDEARQLLAEVERHIPAAPEAVTANAALSNGKRAAVDEELGPDAKKLCPGISAEIITELTDCNAALSQKRKKRQIPQTLASIDTLERFTQLSSHPLHKTNKPGICSMDILHSKDVIATGGVDATAVLFDRPSGQILSTLTGHSKKVTSVKFVGDSDLVLTASADKTVRIWRNPGDGNYACGYTLNDHSAEVRAVTVHPTNKYFVSASLDGTWCFYDLSSGSCLAQVSDDSKNVDYTAAAFHPDGLILGTGTSQSVVKIWDVKSQANVAKFDGHTGEVTAISFSENGYFLATAAEDGVRLWDLRKLRNFKSFLSADANSVEFDPSGSYLGIAASDIKVYQTASVKAEWNLIKTLPDLSGTGKATCVKFGSDAQYVAVGSMDRNLRIFGLPGDEKANVDDDSAQDS

SEQ ID NO: 44650 - protein, 442 aa, Arabidopsis thaliana
  peptide (1)..(442): Ceres Seq. ID no. 12455391
MLSNFALEQQLHTARQELSHALYQHDSACRVIARLKKERDEARQLLAEVERHIPAAPEAVTANAALSNGKRAAVDEELGPDAKKLCPGISAEIITELTDCNAALSQKRKKRQIPQTLASIDTLERFTQLSSHPLHKTNKPGICSMDILHSKDVIATGGVDATAVLFDRPSGQILSTLTGHSKKVTSVKFVGDSDLVLTASADKTVRIWRNPGDGNYACGYTLNDHSAEVRAVTVHPTNKYFVSASLDGTWCFYDLSSGSCLAQVSDDSKNVDYTAAAFHPDGLILGTGTSQSVVKIWDVKSQANVAKFDGHTGEVTAISFSENGYFLATAAEDGVRLWDLRKLRNFKSFLSADANSVEFDPSGSYLGIAASDIKVYQTASVKAEWNLIKTLPDLSGTGKATCVKFGSDAQYVAVGSMDRNLRIFGLPGDEKANVDDDSAQDS

SEQ ID NO: 44651 - protein, 298 aa, Arabidopsis thaliana
  peptide (1)..(298): Ceres Seq. ID no. 12455392
MDILHSKDVIATGGVDATAVLFDRPSGQILSTLTGHSKKVTSVKFVGDSDLVLTASADKTVRIWRNPGDGNYACGYTLNDHSAEVRAVTVHPTNKYFVSASLDGTWCFYDLSSGSCLAQVSDDSKNVDYTAAAFHPDGLILGTGTSQSVVKIWDVKSQANVAKFDGHTGEVTAISFSENGYFLATAAEDGVRLWDLRKLRNFKSFLSADANSVEFDPSGSYLGIAASDIKVYQTASVKAEWNLIKTLPDLSGTGKATCVKFGSDAQYVAVGSMDRNLRIFGLPGDEKANVDDDSAQDS

SEQ ID NO: 44652 - DNA, 1245 bp, Arabidopsis thaliana
  misc_feature (1)..(1245): Ceres Seq. ID no. 13503062
  misc_feature (1)..(1245): Ortholog of  Ceres SEQ ID NO 13655988 as cited in SEQ ID NO 65557
cttaattgcctgtgttcatgtcttcatatctctaaccataagataaaactcaagatttctgaagaggacagctctggaattcatatacgttttgcctctccatctgattctcagcttatggaattggagcaaatctgcattttgaaacccgatgatgaggaanaaatggagtcaccatcaccatcgaaaacagaggaaaatttaggcgtggttcctctgtcttgcgcgtttacgagacaagaacattgcgtttccgagacgaaagaacgcgaagaatcgactagaagactaagcagccttatttttctttacctcatcgttatgtccgtacagattgtgggaggttttaaggcgaatagtcttgcggttatgacagatgctgcgcatttgttgtcggatgtggcgggtttgtgtgtctctttgttggcgatcaaggtctcgagctgggaagctaatccgcgaaactcgttcgggtttaaacggcttgaagttttagcggcgttcttgtctgttcagctcatatggcttgtctctggagtgataatccatgaagccattcaaagactacttagcagaagcagagaggttaatggagaaatcatgtttgggatttcggctttcgggtttttcatgaacttggttatggtcctttggttaggacataaccatagccaccaccaccacgaccatcatcaccatcatcataatcataaacatcaacatcaacatcatcacaaggaggtggtggcagaagaggaggaggaggaaatgaatcctttaaaaggtgagaaatcgtcttcaaaggagatgaacattaacatacaaggagcttatcttcacgcaatggctgatatgattcagtcactaggtgttatgattggtggaggtatcatttgggtaaaaccaaaatgggttttggttgatttgatttgcactcttgttttctctgcttttgctcttgctgctactctaccaattctcaagaacatatttggaatactgatggaacgcgtaccgcgtgatatggacatagagaagctcgaaagaggacttaagcgaatcgatggagttaagattgtttatgatctccatgtatgggagataacagtagggagaatcgtattgtcctgtcatatcttaccagagcctggagctagtcctaaagagatcattactggtgttagaaatttctgtaggaagtcttatgggatttatcatgcaactgttcaggttgaatcagagtag

SEQ ID NO: 44653 - protein, 414 aa, Arabidopsis thaliana
  peptide (1)..(414): Ceres Seq. ID no. 13503063
  misc_feature (55)..(55): Xaa is any aa, unknown or other
LNCLCSCLHISNHKIKLKISEEDSSGIHIRFASPSDSQLMELEQICILKPDDEEXMESPSPSKTEENLGVVPLSCAFTRQEHCVSETKEREESTRRLSSLIFLYLIVMSVQIVGGFKANSLAVMTDAAHLLSDVAGLCVSLLAIKVSSWEANPRNSFGFKRLEVLAAFLSVQLIWLVSGVIIHEAIQRLLSRSREVNGEIMFGISAFGFFMNLVMVLWLGHNHSHHHHDHHHHHHNHKHQHQHHHKEVVAEEEEEEMNPLKGEKSSSKEMNINIQGAYLHAMADMIQSLGVMIGGGIIWVKPKWVLVDLICTLVFSAFALAATLPILKNIFGILMERVPRDMDIEKLERGLKRIDGVKIVYDLHVWEITVGRIVLSCHILPEPGASPKEIITGVRNFCRKSYGIYHATVQVESE

SEQ ID NO: 44654 - protein, 375 aa, Arabidopsis thaliana
  peptide (1)..(375): Ceres Seq. ID no. 13503064
  misc_feature (16)..(16): Xaa is any aa, unknown or other
MELEQICILKPDDEEXMESPSPSKTEENLGVVPLSCAFTRQEHCVSETKEREESTRRLSSLIFLYLIVMSVQIVGGFKANSLAVMTDAAHLLSDVAGLCVSLLAIKVSSWEANPRNSFGFKRLEVLAAFLSVQLIWLVSGVIIHEAIQRLLSRSREVNGEIMFGISAFGFFMNLVMVLWLGHNHSHHHHDHHHHHHNHKHQHQHHHKEVVAEEEEEEMNPLKGEKSSSKEMNINIQGAYLHAMADMIQSLGVMIGGGIIWVKPKWVLVDLICTLVFSAFALAATLPILKNIFGILMERVPRDMDIEKLERGLKRIDGVKIVYDLHVWEITVGRIVLSCHILPEPGASPKEIITGVRNFCRKSYGIYHATVQVESE

SEQ ID NO: 44655 - protein, 359 aa, Arabidopsis thaliana
  peptide (1)..(359): Ceres Seq. ID no. 13503065
MESPSPSKTEENLGVVPLSCAFTRQEHCVSETKEREESTRRLSSLIFLYLIVMSVQIVGGFKANSLAVMTDAAHLLSDVAGLCVSLLAIKVSSWEANPRNSFGFKRLEVLAAFLSVQLIWLVSGVIIHEAIQRLLSRSREVNGEIMFGISAFGFFMNLVMVLWLGHNHSHHHHDHHHHHHNHKHQHQHHHKEVVAEEEEEEMNPLKGEKSSSKEMNINIQGAYLHAMADMIQSLGVMIGGGIIWVKPKWVLVDLICTLVFSAFALAATLPILKNIFGILMERVPRDMDIEKLERGLKRIDGVKIVYDLHVWEITVGRIVLSCHILPEPGASPKEIITGVRNFCRKSYGIYHATVQVESE

SEQ ID NO: 44656 - DNA, 750 bp, Arabidopsis thaliana
  misc_feature (1)..(750): Ceres Seq. ID no. 13509009
  misc_feature (1)..(750): Ortholog of  Ceres SEQ ID NO 12627129 as cited in SEQ ID NO 68657
  misc_feature (1)..(750): Ortholog of  Ceres SEQ ID NO 15179538 as cited in SEQ ID NO 0
aatttattaatcagatcttgcccaattcttcaatttcttcaaccctaattcttctctctttctcagatctaccaaacttgatctccaatggcttcctcagcaccaccagtcctcccaatctccaatccccaaaccgttccatccgccgctccttcctccgtcgaatctcaaccaccgatcgctactccagctttccgcaatttcatcaatcagatcaccgaaaccgttaaaaacggtctctctaagcgtcgtccttgggctgagctcgcggatcgttccgcattatccaaacctgagtcgatctccgacgctgctgttcgtatccgcaagaattactcgtatttcaaggttaattacctcaccgtcgctacagcgatcgtcggattctctctcgtcactcatcctttctctctcgtcttcctcctctgtctcctcgcgtcgtggctcttcctctacttgttccgtcccacggatcagccgatcgttctattcggtcgtacattctccgatcgtgagacgttagggtgtttgattttgttcagtatctttgtgatcttcctcaccgatgttggatctgttctggtttcggctatgatgattggtgttgcgttgatctgtgctcatggtgcttttagagctccggaagatcttttccttgatgagcaagagcctgctgctaccggattcctctctttcctcggtggtgccgcctcttcagccgcgcctgctgttatcgccgctcgcgtgtaa

SEQ ID NO: 44657 - protein, 220 aa, Arabidopsis thaliana
  peptide (1)..(220): Ceres Seq. ID no. 13509010
MASSAPPVLPISNPQTVPSAAPSSVESQPPIATPAFRNFINQITETVKNGLSKRRPWAELADRSALSKPESISDAAVRIRKNYSYFKVNYLTVATAIVGFSLVTHPFSLVFLLCLLASWLFLYLFRPTDQPIVLFGRTFSDRETLGCLILFSIFVIFLTDVGSVLVSAMMIGVALICAHGAFRAPEDLFLDEQEPAATGFLSFLGGAASSAAPAVIAARV

SEQ ID NO: 44658 - DNA, 2162 bp, Arabidopsis thaliana
  misc_feature (1)..(2162): Ceres Seq. ID no. 12455379
  misc_feature (1)..(2162): Ortholog of  Ceres SEQ ID NO 13654290 as cited in SEQ ID NO 62197
  misc_feature (1)..(2162): Ortholog of  Ceres SEQ ID NO 14301924 as cited in SEQ ID NO 67731
aaagaaaaaaatgagaatcttcaaataaaaaaaaaagaagagactacggagagtcaaaaacagtgagagctttctttcatcttcagccagatcggagcaatcttctccatagattccgtgaaacgatgggaatagccaataagctccggctaagttcatcatctctcagccgaatcctccaccggagaatactttactcatccgctgtcagatctttcaccacatcggaaggtcaccgtcccaccatcgttcataaacaaggtctcgatatcctccatgatccttggttcaacaaggggactgcgtttacgatgacggagagaaatcgtttagatcttagaggtcttcttcctcctaatgttatggactctgagcaacagatttttcgttttatgactgacctgaagagattagaggagcaagctagagatggaccttctgatcctaatgctttggctaaatggcggattcttaatcggttacatgaccgaaatgagactatgtactataaggttttgattaacaatattgaggagtatgcgccgatagtgtatactcctacggtaggtcttgtctgccagaactacagtgggttgtttaggaggccaaggggaatgtattttagtgctgaagatcgtggtgaaatgatgtccatggtttacaactggccagctgagcaggttgatatgattgttgttaccgatggaagccggattttgggtcttggagatctaggtgttcatggaattggaattgctgtagggaagcttgatttatatgttgccgcagctggaataaatcctcaacgggtactacctgtcatgattgatgttggaacaaacaatgaaaaactacgcaacgaccccatgtacttgggtctgcaacaacgtcgtttagaggatgacgactatatagatgttattgatgaatttatggaggcagtgtatactcggtggccacatgttattgtgcagtttgaggatttccagagcaagtgggctttcaaattattgcagaggtatagatgcacctaccgaatgttcaatgatgatgtccaggggacagcaggggttgctatcgctggtcttcttggagcagttagagcacaggggcgacctatgattgatttcccaaagatgaagatcgttgttgctggcgcgggaagtgcgggaattggtgttctaaatgctgcgaggaagacaatggcacgaatgttgggaaatactgaaactgcgtttgatagtgcacaaagtcaattttgggtggttgatgcgcagggtcttatcaccgaaggccgggaaaatattgacccagaggctcagccttttgctaggaagactaaagaaatggagcgtcagggattaaaagaaggagcaactcttgtggaagtggttcgtgaagttaaacctgatgtgcttcttggtttatcagcagttggagggttattctcaaaagaggttttagaagcaatgaaaggttcaacctcgacaaggcctgctatatttgcaatgtcaaaccccacaaaaaatgctgaatgcacgcctcaagatgcattttcgatattaggcgaaaatatgatttttgcgagtggaagcccattcaagaatgtggaatttggaaatggtcatgtaggacattgcaaccagggaaacaacatgtatctatttccaggtattggacttggcactcttttatctggtgctcccattgtctccgacgggatgcttcaggccgcatccgagtgcctagcagcatacatgagcgaagaagaagtgctagaggggattatataccctccaatatcaaggatacgagacataacaaaaagaatagcagctgcggtgattaaggaagcgattgaggaggatttggttgaaggatatagagaaatggacgctcgagagatccaaaagctggatgaggaggggctgatggagtatgtggaaaacaacatgtggaatccagagtacccgactttggtctacaaggatgactaagtttggttcccaaaatgaataagtctactttctcttatttatatgtaaaaatttataattggggttgctttatacccaatcaaattcatagctactgctttctcttgttcttatgtaaaaaaaaaaaaaatatataattgggttgtttgttatccaatcagattc

SEQ ID NO: 44659 - protein, 623 aa, Arabidopsis thaliana
  peptide (1)..(623): Ceres Seq. ID no. 12455380
MGIANKLRLSSSSLSRILHRRILYSSAVRSFTTSEGHRPTIVHKQGLDILHDPWFNKGTAFTMTERNRLDLRGLLPPNVMDSEQQIFRFMTDLKRLEEQARDGPSDPNALAKWRILNRLHDRNETMYYKVLINNIEEYAPIVYTPTVGLVCQNYSGLFRRPRGMYFSAEDRGEMMSMVYNWPAEQVDMIVVTDGSRILGLGDLGVHGIGIAVGKLDLYVAAAGINPQRVLPVMIDVGTNNEKLRNDPMYLGLQQRRLEDDDYIDVIDEFMEAVYTRWPHVIVQFEDFQSKWAFKLLQRYRCTYRMFNDDVQGTAGVAIAGLLGAVRAQGRPMIDFPKMKIVVAGAGSAGIGVLNAARKTMARMLGNTETAFDSAQSQFWVVDAQGLITEGRENIDPEAQPFARKTKEMERQGLKEGATLVEVVREVKPDVLLGLSAVGGLFSKEVLEAMKGSTSTRPAIFAMSNPTKNAECTPQDAFSILGENMIFASGSPFKNVEFGNGHVGHCNQGNNMYLFPGIGLGTLLSGAPIVSDGMLQAASECLAAYMSEEEVLEGIIYPPISRIRDITKRIAAAVIKEAIEEDLVEGYREMDAREIQKLDEEGLMEYVENNMWNPEYPTLVYKDD

SEQ ID NO: 44660 - protein, 561 aa, Arabidopsis thaliana
  peptide (1)..(561): Ceres Seq. ID no. 12455381
MTERNRLDLRGLLPPNVMDSEQQIFRFMTDLKRLEEQARDGPSDPNALAKWRILNRLHDRNETMYYKVLINNIEEYAPIVYTPTVGLVCQNYSGLFRRPRGMYFSAEDRGEMMSMVYNWPAEQVDMIVVTDGSRILGLGDLGVHGIGIAVGKLDLYVAAAGINPQRVLPVMIDVGTNNEKLRNDPMYLGLQQRRLEDDDYIDVIDEFMEAVYTRWPHVIVQFEDFQSKWAFKLLQRYRCTYRMFNDDVQGTAGVAIAGLLGAVRAQGRPMIDFPKMKIVVAGAGSAGIGVLNAARKTMARMLGNTETAFDSAQSQFWVVDAQGLITEGRENIDPEAQPFARKTKEMERQGLKEGATLVEVVREVKPDVLLGLSAVGGLFSKEVLEAMKGSTSTRPAIFAMSNPTKNAECTPQDAFSILGENMIFASGSPFKNVEFGNGHVGHCNQGNNMYLFPGIGLGTLLSGAPIVSDGMLQAASECLAAYMSEEEVLEGIIYPPISRIRDITKRIAAAVIKEAIEEDLVEGYREMDAREIQKLDEEGLMEYVENNMWNPEYPTLVYKDD

SEQ ID NO: 44661 - protein, 544 aa, Arabidopsis thaliana
  peptide (1)..(544): Ceres Seq. ID no. 12455382
MDSEQQIFRFMTDLKRLEEQARDGPSDPNALAKWRILNRLHDRNETMYYKVLINNIEEYAPIVYTPTVGLVCQNYSGLFRRPRGMYFSAEDRGEMMSMVYNWPAEQVDMIVVTDGSRILGLGDLGVHGIGIAVGKLDLYVAAAGINPQRVLPVMIDVGTNNEKLRNDPMYLGLQQRRLEDDDYIDVIDEFMEAVYTRWPHVIVQFEDFQSKWAFKLLQRYRCTYRMFNDDVQGTAGVAIAGLLGAVRAQGRPMIDFPKMKIVVAGAGSAGIGVLNAARKTMARMLGNTETAFDSAQSQFWVVDAQGLITEGRENIDPEAQPFARKTKEMERQGLKEGATLVEVVREVKPDVLLGLSAVGGLFSKEVLEAMKGSTSTRPAIFAMSNPTKNAECTPQDAFSILGENMIFASGSPFKNVEFGNGHVGHCNQGNNMYLFPGIGLGTLLSGAPIVSDGMLQAASECLAAYMSEEEVLEGIIYPPISRIRDITKRIAAAVIKEAIEEDLVEGYREMDAREIQKLDEEGLMEYVENNMWNPEYPTLVYKDD

SEQ ID NO: 44662 - DNA, 1010 bp, Arabidopsis thaliana
  misc_feature (1)..(1010): Ceres Seq. ID no. 12462224
  misc_feature (1)..(1010): Ortholog of  Ceres SEQ ID NO 15172948 as cited in SEQ ID NO 51777
  misc_feature (1)..(1010): Ortholog of  Ceres SEQ ID NO 12784416 as cited in SEQ ID NO 61324
acgcgctttactgttttctcatcatcgtcacttttctttctccacactttccgcaagattgttctgttcttcaaacgattctaagatgaatggagaagaagtgaaaacgagtcaacctcagaagaagcttcagaaccctactccacgtttaaacgagaggattctctcatctttgtctaagagatcggttgctgcacatccatggcatgatcttgaaatcggacctggagctccagtgattttcaatgtggttattgagatctcaaaggggagcaaagtcaaatatgaacttgacaaaaaaacaggtctcatcaaggttgataggattctttattcttcggttgtgtatcctcacaactacgggtttgtcccacgcacactatgtgaagacaatgaccctatagatgttttagttatcatgcaggagcctgtgcttccgggttgttttcttcgcgcccgagctattggtttaatgcctatgattgaccagggtgaaaaagatgacaagatcattgcagtttgtgttgatgatcctgagtataagcacatcactaacatcaatgaacttcctcctcatcgtctttctgaaatccgtcgattctttgaagactacaagaagaatgagaacaaggaagttgcagtgaatgattttctacaacctggtcctgctattgaagccattcagtactcaatggatctttacgctgagtacattcttcacaccctgaggagatagatgaaaagaagacttcttcaagaacattcctgccaatttttgggtctgcaatctcagattctgttgcagtgaatatgcaaaagaacaagaatttgtcttatatttggattttttttgaataagcacgtgtctcatatttggctttgacgctttcctttttgttgttgttgttgttgttgtcttctggggatgttttgtctgaacattaagagtttgtatttgtaacactgcctttggatctttttttaataatttcaagcttcgatttggttcc

SEQ ID NO: 44663 - protein, 244 aa, Arabidopsis thaliana
  peptide (1)..(244): Ceres Seq. ID no. 12462225
RALLFSHHRHFSFSTLSARLFCSSNDSKMNGEEVKTSQPQKKLQNPTPRLNERILSSLSKRSVAAHPWHDLEIGPGAPVIFNVVIEISKGSKVKYELDKKTGLIKVDRILYSSVVYPHNYGFVPRTLCEDNDPIDVLVIMQEPVLPGCFLRARAIGLMPMIDQGEKDDKIIAVCVDDPEYKHITNINELPPHRLSEIRRFFEDYKKNENKEVAVNDFLQPGPAIEAIQYSMDLYAEYILHTLRR

SEQ ID NO: 44664 - protein, 216 aa, Arabidopsis thaliana
  peptide (1)..(216): Ceres Seq. ID no. 12462226
MNGEEVKTSQPQKKLQNPTPRLNERILSSLSKRSVAAHPWHDLEIGPGAPVIFNVVIEISKGSKVKYELDKKTGLIKVDRILYSSVVYPHNYGFVPRTLCEDNDPIDVLVIMQEPVLPGCFLRARAIGLMPMIDQGEKDDKIIAVCVDDPEYKHITNINELPPHRLSEIRRFFEDYKKNENKEVAVNDFLQPGPAIEAIQYSMDLYAEYILHTLRR

SEQ ID NO: 44665 - DNA, 1420 bp, Arabidopsis thaliana; identical to SEQ ID NO: 44132
  misc_feature (1)..(1420): Ceres Seq. ID no. 13503804
  misc_feature (1)..(1420): Ortholog of  Ceres SEQ ID NO 14312844 as cited in SEQ ID NO 55601
  misc_feature (1)..(1420): Ortholog of  Ceres SEQ ID NO 13597376 as cited in SEQ ID NO 64002
  misc_feature (1)..(1420): Ortholog of  Ceres SEQ ID NO 13503573 as cited in SEQ ID NO 65402
  misc_feature (1)..(1420): Ortholog of  Ceres SEQ ID NO 13659615 as cited in SEQ ID NO 67248

SEQ ID NO: 44666 - protein, 351 aa, Arabidopsis thaliana; identical to SEQ ID NO: 44133
  peptide (1)..(351): Ceres Seq. ID no. 13503805

SEQ ID NO: 44667 - protein, 231 aa, Arabidopsis thaliana; identical to SEQ ID NO: 44134
  peptide (1)..(231): Ceres Seq. ID no. 13503806

SEQ ID NO: 44668 - protein, 224 aa, Arabidopsis thaliana; identical to SEQ ID NO: 44135
  peptide (1)..(224): Ceres Seq. ID no. 13503807

SEQ ID NO: 44669 - DNA, 895 bp, Arabidopsis thaliana
  misc_feature (1)..(895): Ceres Seq. ID no. 12466214
  misc_feature (1)..(895): Ortholog of  Ceres SEQ ID NO 13504447 as cited in SEQ ID NO 57609
aggaatattccggtgatggctgaagatttttcggtggttgtgttggcttctgatctaggaattgacgctagacccttcttgacgagaagcgatgacgttgatgaacaagaaaactggcatgattgtccccaatacttaggagatgaagatttctctgatctcgatcttctccagttctttactctccagggcttggataggtccggtaaccggattttccgcatcgtcggaaagtatttccctgctcgtgtagtgagtgcggagcggctgaagaagtatatatcccagaagataagcaaccaatgtcctgagggacctttgtgcttggtttacatgcatagcacagtccaaaaggacgacaattcaccgggaattaccatcttacggtggatttacgaggaccttccttcagatatcaaagacaggcttcaacttgtttatttcatccaccctggtcttcgttcaagacttgtcattgccactcttggccgccttcttttaagtggaggactgtactggaagattaagtacgtgagcaggttgcagtacctttgggaggacataaagaaaggcgaggtggaaattcccgactttgtgaagaaccatgacaatgtgctcgagcatagaccattaacggactatggaatcgaaccggatcctttccagttaagcgaggttcaatcttcatcgttctctctcaaccgctacgagaacagatgggtctcatagtacaattgctctttgttgagctagaacctctatatgtttgtgtctgttgtatagagtaatctaatgtattaaacactcgtgtatcatcaatctggtttttgattgattttggaccgaaccagtaccagtattagatttgttttcgaaagcgggtcgaattttactc

SEQ ID NO: 44670 - protein, 242 aa, Arabidopsis thaliana
  peptide (1)..(242): Ceres Seq. ID no. 12466215
RNIPVMAEDFSVVVLASDLGIDARPFLTRSDDVDEQENWHDCPQYLGDEDFSDLDLLQFFTLQGLDRSGNRIFRIVGKYFPARVVSAERLKKYISQKISNQCPEGPLCLVYMHSTVQKDDNSPGITILRWIYEDLPSDIKDRLQLVYFIHPGLRSRLVIATLGRLLLSGGLYWKIKYVSRLQYLWEDIKKGEVEIPDFVKNHDNVLEHRPLTDYGIEPDPFQLSEVQSSSFSLNRYENRWVS

SEQ ID NO: 44671 - protein, 237 aa, Arabidopsis thaliana
  peptide (1)..(237): Ceres Seq. ID no. 12466216
MAEDFSVVVLASDLGIDARPFLTRSDDVDEQENWHDCPQYLGDEDFSDLDLLQFFTLQGLDRSGNRIFRIVGKYFPARVVSAERLKKYISQKISNQCPEGPLCLVYMHSTVQKDDNSPGITILRWIYEDLPSDIKDRLQLVYFIHPGLRSRLVIATLGRLLLSGGLYWKIKYVSRLQYLWEDIKKGEVEIPDFVKNHDNVLEHRPLTDYGIEPDPFQLSEVQSSSFSLNRYENRWVS

SEQ ID NO: 44672 - protein, 131 aa, Arabidopsis thaliana
  peptide (1)..(131): Ceres Seq. ID no. 12466217
MHSTVQKDDNSPGITILRWIYEDLPSDIKDRLQLVYFIHPGLRSRLVIATLGRLLLSGGLYWKIKYVSRLQYLWEDIKKGEVEIPDFVKNHDNVLEHRPLTDYGIEPDPFQLSEVQSSSFSLNRYENRWVS

SEQ ID NO: 44673 - DNA, 1842 bp, Arabidopsis thaliana; identical to SEQ ID NO: 37427
  misc_feature (1)..(1842): Ceres Seq. ID no. 13509651
  misc_feature (1)..(1842): Ortholog of  Ceres SEQ ID NO 15226493 as cited in SEQ ID NO 59078

SEQ ID NO: 44674 - protein, 497 aa, Arabidopsis thaliana; identical to SEQ ID NO: 37428
  peptide (1)..(497): Ceres Seq. ID no. 13509652

SEQ ID NO: 44675 - protein, 495 aa, Arabidopsis thaliana; identical to SEQ ID NO: 37429
  peptide (1)..(495): Ceres Seq. ID no. 13509653

SEQ ID NO: 44676 - protein, 492 aa, Arabidopsis thaliana; identical to SEQ ID NO: 37430
  peptide (1)..(492): Ceres Seq. ID no. 13509654

SEQ ID NO: 44677 - DNA, 920 bp, Arabidopsis thaliana; identical to SEQ ID NO: 34726
  misc_feature (1)..(920): Ceres Seq. ID no. 13504388
  misc_feature (1)..(920): Ortholog of  Ceres SEQ ID NO 12780822 as cited in SEQ ID NO 67471

SEQ ID NO: 44678 - protein, 252 aa, Arabidopsis thaliana; identical to SEQ ID NO: 34727
  peptide (1)..(252): Ceres Seq. ID no. 13504389

SEQ ID NO: 44679 - protein, 231 aa, Arabidopsis thaliana; identical to SEQ ID NO: 34728
  peptide (1)..(231): Ceres Seq. ID no. 13504390

SEQ ID NO: 44680 - protein, 155 aa, Arabidopsis thaliana; identical to SEQ ID NO: 34729
  peptide (1)..(155): Ceres Seq. ID no. 13504391

SEQ ID NO: 44681 - DNA, 790 bp, Arabidopsis thaliana
  misc_feature (1)..(790): Ceres Seq. ID no. 13503835
  misc_feature (1)..(790): Ortholog of  Ceres SEQ ID NO 12610286 as cited in SEQ ID NO 55827
aaaaattaaaccagaacttgggaattggaaattggagaaaaatctcagccatggcgattgcttcaacagccaccgttcttttctgctgcgccaaacccaatttccggcgaattcattctgagagccgtccagcttcttctctcaccacctctaacgaacctgtaattcggatccgaagccgcagtttaattcatgacccggttgcgctgtcgggtcttatcggaaccagtttggttgcggctgctttcatcacggcgggaccagatgctactgctttggcggcggtggtggattctcttcagctaagcgaaccgtccaatgcgttgtctttacccacttgggccgttcatgtttccagcgttgtcgaatggattacggcgatggcattggtatggaagtatggagaaagaaagggttatgagtcttggaaaggtctctcatggggaatggtacctttgcttggtggagctctctgtgcatgcacatggcatttcttctacaacgatgaatctcttgaggtgttggtcgctcttcaggcagcactaacggtgtttggtaatatcactctctgcattgctgcctttcggatcaacaagttgtcatccaaaattgaagtctctgaaaagccatgatggctaaaccgatcaatatgagcaaagtataattgaattattaattggaggatcactaagattcttttcccctttgaaaagttctatgagattctatgtcaacgatttaagtatattatatagtctttatatgaggaagatccatgtgcattcaacct

SEQ ID NO: 44682 - protein, 209 aa, Arabidopsis thaliana
  peptide (1)..(209): Ceres Seq. ID no. 13503836
KLNQNLGIGNWRKISAMAIASTATVLFCCAKPNFRRIHSESRPASSLTTSNEPVIRIRSRSLIHDPVALSGLIGTSLVAAAFITAGPDATALAAVVDSLQLSEPSNALSLPTWAVHVSSVVEWITAMALVWKYGERKGYESWKGLSWGMVPLLGGALCACTWHFFYNDESLEVLVALQAALTVFGNITLCIAAFRINKLSSKIEVSEKP

SEQ ID NO: 44683 - protein, 193 aa, Arabidopsis thaliana
  peptide (1)..(193): Ceres Seq. ID no. 13503837
MAIASTATVLFCCAKPNFRRIHSESRPASSLTTSNEPVIRIRSRSLIHDPVALSGLIGTSLVAAAFITAGPDATALAAVVDSLQLSEPSNALSLPTWAVHVSSVVEWITAMALVWKYGERKGYESWKGLSWGMVPLLGGALCACTWHFFYNDESLEVLVALQAALTVFGNITLCIAAFRINKLSSKIEVSEKP

SEQ ID NO: 44684 - DNA, 1434 bp, Arabidopsis thaliana
  misc_feature (1)..(1434): Ceres Seq. ID no. 13509599
  misc_feature (1)..(1434): Ortholog of  Ceres SEQ ID NO 13648575 as cited in SEQ ID NO 20407
aaaattagaaccaacagtcatcttcgtcattagtgagctaagttgttcaatctctcacctgaaaaccctaaccttcttcttcaatctccaatggcgcgtaaatcttccctcctcaaacgagcagcaatcgccgtcgtctccgtcatcgccatctatgtaattctcaacgcctccgttagtcgctctctcccttcctcatccgatctccctcgccagctaatccgtgaagatgatgatgatgaaggacgtgctccgattcagcctagggttagggtttacatgtacaatctccccaagagattcacttacggtttaatcgagcagcactcaatcgctcgcggcggaatcaagaagcccgtcggtgacgtcaccacgcttaagtatccgggtcatcaacatatgcacgagtggtatcttttctcggatcttaatcaacccgaagttgatcgatccgggtctccgattgtccgtgtctcggatcctgccgacgctgatctcttctacgtccctgtgttctcttcactcagcttaattgtaaatgcgggtcgacccgttgaagctggatccggttacagcgatgagaagatgcaggaagggttggtggagtggcttgaaggtcaagagtggtggaggaggaatgctgggagagatcacgtgatacccgcaggcgatccgaatgcgttgtatcggatcttggatcgggtcaaaaacgcagttctgctggtttcggatttcgggcggttgaggcctgatcaaggatcgttcgtcaaggatgttgtaataccttactcccatagagtcaatctcttcaatggagaaattggagttgaggatcgcaacacattactcttcttcatgggaaatcgatatcgcaaagatggtggaaaagttcgtgatttgctgttccaagtacttgaaaaggaagatgatgtaacaataaaacatggaactcagtccagagagaatcgacgagctgctacgaaaggaatgcatacttcgaagttttgtttaaatcctgcgggtgacactccatccgcctgcagactctttgactccattgtcagtttgtgtgtgcccctgattgttagcgatagtatcgagttacctttcgaagatgttatagattatagaaagttttccatttttgttgaggccaatgcagctctgcagcctggatttctggttcagatgctgaggaaaataaaaaccaagaagatcctcgagtatcagagagaaatgaaatcggtaagacggtattttgactatgacaacccaaatggagcagtgaaggaaatctggcgtcaagtctcccacaagttaccactcatcaaactaatgagtaaccgtgacaggcgcctcgtcctaagaaatttgaccgaaccaaactgctcatgtctatgcacaaaccaaaccggtcttatcacttccatttaa

SEQ ID NO: 44685 - protein, 447 aa, Arabidopsis thaliana
  peptide (1)..(447): Ceres Seq. ID no. 13509600
MARKSSLLKRAAIAVVSVIAIYVILNASVSRSLPSSSDLPRQLIREDDDDEGRAPIQPRVRVYMYNLPKRFTYGLIEQHSIARGGIKKPVGDVTTLKYPGHQHMHEWYLFSDLNQPEVDRSGSPIVRVSDPADADLFYVPVFSSLSLIVNAGRPVEAGSGYSDEKMQEGLVEWLEGQEWWRRNAGRDHVIPAGDPNALYRILDRVKNAVLLVSDFGRLRPDQGSFVKDVVIPYSHRVNLFNGEIGVEDRNTLLFFMGNRYRKDGGKVRDLLFQVLEKEDDVTIKHGTQSRENRRAATKGMHTSKFCLNPAGDTPSACRLFDSIVSLCVPLIVSDSIELPFEDVIDYRKFSIFVEANAALQPGFLVQMLRKIKTKKILEYQREMKSVRRYFDYDNPNGAVKEIWRQVSHKLPLIKLMSNRDRRLVLRNLTEPNCSCLCTNQTGLITSI

SEQ ID NO: 44686 - protein, 384 aa, Arabidopsis thaliana
  peptide (1)..(384): Ceres Seq. ID no. 13509601
MYNLPKRFTYGLIEQHSIARGGIKKPVGDVTTLKYPGHQHMHEWYLFSDLNQPEVDRSGSPIVRVSDPADADLFYVPVFSSLSLIVNAGRPVEAGSGYSDEKMQEGLVEWLEGQEWWRRNAGRDHVIPAGDPNALYRILDRVKNAVLLVSDFGRLRPDQGSFVKDVVIPYSHRVNLFNGEIGVEDRNTLLFFMGNRYRKDGGKVRDLLFQVLEKEDDVTIKHGTQSRENRRAATKGMHTSKFCLNPAGDTPSACRLFDSIVSLCVPLIVSDSIELPFEDVIDYRKFSIFVEANAALQPGFLVQMLRKIKTKKILEYQREMKSVRRYFDYDNPNGAVKEIWRQVSHKLPLIKLMSNRDRRLVLRNLTEPNCSCLCTNQTGLITSI

SEQ ID NO: 44687 - protein, 344 aa, Arabidopsis thaliana
  peptide (1)..(344): Ceres Seq. ID no. 13509602
MHEWYLFSDLNQPEVDRSGSPIVRVSDPADADLFYVPVFSSLSLIVNAGRPVEAGSGYSDEKMQEGLVEWLEGQEWWRRNAGRDHVIPAGDPNALYRILDRVKNAVLLVSDFGRLRPDQGSFVKDVVIPYSHRVNLFNGEIGVEDRNTLLFFMGNRYRKDGGKVRDLLFQVLEKEDDVTIKHGTQSRENRRAATKGMHTSKFCLNPAGDTPSACRLFDSIVSLCVPLIVSDSIELPFEDVIDYRKFSIFVEANAALQPGFLVQMLRKIKTKKILEYQREMKSVRRYFDYDNPNGAVKEIWRQVSHKLPLIKLMSNRDRRLVLRNLTEPNCSCLCTNQTGLITSI

SEQ ID NO: 44688 - DNA, 638 bp, Arabidopsis thaliana; identical to SEQ ID NO: 29645
  misc_feature (1)..(638): Ceres Seq. ID no. 13489850
  misc_feature (1)..(638): Ortholog of  Ceres SEQ ID NO 13504026 as cited in SEQ ID NO 58279
  misc_feature (1)..(638): Ortholog of  Ceres SEQ ID NO 15226827 as cited in SEQ ID NO 69141

SEQ ID NO: 44689 - protein, 122 aa, Arabidopsis thaliana; identical to SEQ ID NO: 29646
  peptide (1)..(122): Ceres Seq. ID no. 13489851

SEQ ID NO: 44690 - protein, 65 aa, Arabidopsis thaliana; identical to SEQ ID NO: 29647
  peptide (1)..(65): Ceres Seq. ID no. 13489852

SEQ ID NO: 44691 - DNA, 932 bp, Arabidopsis thaliana; identical to SEQ ID NO: 28492
  misc_feature (1)..(932): Ceres Seq. ID no. 12574162
  misc_feature (1)..(932): Ortholog of  Ceres SEQ ID NO 14302000 as cited in SEQ ID NO 52175
  misc_feature (1)..(932): Ortholog of  Ceres SEQ ID NO 14316371 as cited in SEQ ID NO 60113

SEQ ID NO: 44692 - protein, 238 aa, Arabidopsis thaliana; identical to SEQ ID NO: 28493
  peptide (1)..(238): Ceres Seq. ID no. 12574163

SEQ ID NO: 44693 - protein, 212 aa, Arabidopsis thaliana; identical to SEQ ID NO: 28494
  peptide (1)..(212): Ceres Seq. ID no. 12574164

SEQ ID NO: 44694 - protein, 198 aa, Arabidopsis thaliana; identical to SEQ ID NO: 28495
  peptide (1)..(198): Ceres Seq. ID no. 12574165

SEQ ID NO: 44695 - DNA, 847 bp, Arabidopsis thaliana; identical to SEQ ID NO: 42547
  misc_feature (1)..(847): Ceres Seq. ID no. 12488557
  misc_feature (1)..(847): Ortholog of  Ceres SEQ ID NO 13646254 as cited in SEQ ID NO 20314
  misc_feature (1)..(847): Ortholog of  Ceres SEQ ID NO 13639196 as cited in SEQ ID NO 56195
  misc_feature (1)..(847): Ortholog of  Ceres SEQ ID NO 15179459 as cited in SEQ ID NO 0

SEQ ID NO: 44696 - protein, 172 aa, Arabidopsis thaliana; identical to SEQ ID NO: 42548
  peptide (1)..(172): Ceres Seq. ID no. 12488558

SEQ ID NO: 44697 - DNA, 836 bp, Arabidopsis thaliana
  misc_feature (1)..(836): Ceres Seq. ID no. 12466196
  misc_feature (1)..(836): Ortholog of  Ceres SEQ ID NO 13595187 as cited in SEQ ID NO 56052
  misc_feature (1)..(836): Ortholog of  Ceres SEQ ID NO 14312239 as cited in SEQ ID NO 59176
  misc_feature (1)..(836): Ortholog of  Ceres SEQ ID NO 14313718 as cited in SEQ ID NO 59559
  misc_feature (1)..(836): Ortholog of  Ceres SEQ ID NO 15169505 as cited in SEQ ID NO 61011
  misc_feature (1)..(836): Ortholog of  Ceres SEQ ID NO 13662053 as cited in SEQ ID NO 61547
  misc_feature (1)..(836): Ortholog of  Ceres SEQ ID NO 13624283 as cited in SEQ ID NO 0
acgatagcctctcatcttcttttttcctctccatcatcttctcttatcaactttagactcacaagcctcctctcatcttcaccataaccgaaaaaccaaacaaaaaatccttagataatcagatcttgatattatggatcatatcatcggctttatgggcacaacaaacatgtcacataacacaaaccttatgatcgctgccgcagccactaccactacgacctcttcgtcttcctcttcttcctccggaggctcggggactaaccagctaagcaggtacgagaatcagaagagaagagattggaacactttcggacagtatctacgcaatcaccgtccaccactttctctctcccgttgcagtggtgctcatgttcttgaattcctcaggtacctcgaccaattcggcaagactaaggttcacacacacctatgtccgttcttcggacacccaaacccaccagcaccatgtgcctgtccactccgacaagcgtggggtagtctggacgcactcattggccgtcttagagctgcttttgaagagaacggtggttcaccagagacgaacccttttggtgcacgagccgttcgactctacctaagggaagtacgtgactcgcaggctaaagcacgtgggatcagctatgaaaaaaagaagcgcaagcgacctcctccgccactaccaccggctcagccggcgatttcaagtagccctaattaacattaagtcatgagtaagatgtttcaatgaactacgtttgtttacaaatttttatcaatgacgaacatgcacgagttcttttaaagtcacatgccctttcctaaacttttatttg

SEQ ID NO: 44698 - protein, 195 aa, Arabidopsis thaliana; identical to SEQ ID NO: 22865
  peptide (1)..(195): Ceres Seq. ID no. 12466197

SEQ ID NO: 44699 - protein, 188 aa, Arabidopsis thaliana; identical to SEQ ID NO: 22866
  peptide (1)..(188): Ceres Seq. ID no. 12466198

SEQ ID NO: 44700 - protein, 183 aa, Arabidopsis thaliana; identical to SEQ ID NO: 22867
  peptide (1)..(183): Ceres Seq. ID no. 12466199

SEQ ID NO: 44701 - DNA, 1569 bp, Arabidopsis thaliana
  misc_feature (1)..(1569): Ceres Seq. ID no. 13509244
  misc_feature (1)..(1569): Ortholog of  Ceres SEQ ID NO 13600220 as cited in SEQ ID NO 0
gattttggccttctttctgatatttatttatctccgaaacttttgcttcttaagtctgtctctctcttctatcagattccacactaatcggaaaaaatggcacagaagcttaacttgcttaatctcgccgtccctccggtcacccaccgctctaacttcccttccaccttcaccttcggcgtcgccacttccgcttaccagattgaaggaggttggaatgaaggtaaaaagggaccaagtatatgggataagttcactcatatcgaagggaagattcttgatggaagtaacggcgatgttgctgtggatcattaccatagatacaaggaagatgttgatcttataggacaattaggattcggtgcttacagattttctatatcttggtctcgaattttccctgatggcctgggaactgaagtcaatgaagaaggcattgctttctacaacgatcttattaatacacttcttgaaaaaggtattcagccgtatgtaactctgtaccattgggatctcccatcacatctccaggaagcaatcggaggttggacaaataggaaaattgtcgattattttggcctctatgcagatgcttgttttgccaattttggtgatagagtgaagcactggatcacattaaatgaacctcttcagacctcggtgaatggacactgtattggtatatttgcacctggaagaaatgagaagcccttgatcgaaccatatttggtctcacatcatcaggttctggcccatgcaactgctgtatccatatatagaagcaagtacaaggaaagtcaaggtggacaaatcggtttgtcagttgattgtgaatgggcagagccaaactctgagaaaccagaagacaaggttgctgcggataggcgaattgactttcaacttggatggttcttggatcctttgttttttggagactatcctgcaagtatgcgccagaaacttggagacaatcttcctagatttactccggaagaaaaggagtttatgcttcaaaactcatgggacttccttggcctgaaccactatacgtcgaggttgatttctcatgtctcaaacaaagaagctgagagtaacttttaccaagcacaagaattggagaggattgttgaactggaaaatggagatttgataggcgaaagggctgcttcggattggctttatgctgtgccttggggaatccgaaagacattgaattacatgagcaaaaaatataaccaccctccaatatttatcactgaaaatggtatggatgatgaagatgatggatcggcctctattcatgatatgcttgacgataaacgtagagttgactatttcaagagttaccttgccaacgtctcccaggctattgaagacggagtggacataaagggatactttgcgtggtcgctgctggacaacttcgagtgggcgcaagggtacaccaagagatttggtttggtatatgtagactacaagaacggtttaacccgtcacccaaaatcatctgcttactggttcatgaaatttctgaaaggtgatgaagaaaacaaaggtaagaaggaatga

SEQ ID NO: 44702 - protein, 490 aa, Arabidopsis thaliana
  peptide (1)..(490): Ceres Seq. ID no. 13509245
MAQKLNLLNLAVPPVTHRSNFPSTFTFGVATSAYQIEGGWNEGKKGPSIWDKFTHIEGKILDGSNGDVAVDHYHRYKEDVDLIGQLGFGAYRFSISWSRIFPDGLGTEVNEEGIAFYNDLINTLLEKGIQPYVTLYHWDLPSHLQEAIGGWTNRKIVDYFGLYADACFANFGDRVKHWITLNEPLQTSVNGHCIGIFAPGRNEKPLIEPYLVSHHQVLAHATAVSIYRSKYKESQGGQIGLSVDCEWAEPNSEKPEDKVAADRRIDFQLGWFLDPLFFGDYPASMRQKLGDNLPRFTPEEKEFMLQNSWDFLGLNHYTSRLISHVSNKEAESNFYQAQELERIVELENGDLIGERAASDWLYAVPWGIRKTLNYMSKKYNHPPIFITENGMDDEDDGSASIHDMLDDKRRVDYFKSYLANVSQAIEDGVDIKGYFAWSLLDNFEWAQGYTKRFGLVYVDYKNGLTRHPKSSAYWFMKFLKGDEENKGKKE

SEQ ID NO: 44703 - DNA, 1837 bp, Arabidopsis thaliana
  misc_feature (1)..(1837): Ceres Seq. ID no. 13509647
  misc_feature (1)..(1837): Ortholog of  Ceres SEQ ID NO 15227091 as cited in SEQ ID NO 60294
  misc_feature (1)..(1837): Ortholog of  Ceres SEQ ID NO 14316039 as cited in SEQ ID NO 62062
  misc_feature (1)..(1837): Ortholog of  Ceres SEQ ID NO 14308041 as cited in SEQ ID NO 62601
  misc_feature (1)..(1837): Ortholog of  Ceres SEQ ID NO 15176783 as cited in SEQ ID NO 65590
  misc_feature (1)..(1837): Ortholog of  Ceres SEQ ID NO 15176091 as cited in SEQ ID NO 65733
  misc_feature (1)..(1837): Ortholog of  Ceres SEQ ID NO 14308019 as cited in SEQ ID NO 65849
  misc_feature (1)..(1837): Ortholog of  Ceres SEQ ID NO 15169599 as cited in SEQ ID NO 66096
  misc_feature (1)..(1837): Ortholog of  Ceres SEQ ID NO 13502874 as cited in SEQ ID NO 66298
  misc_feature (1)..(1837): Ortholog of  Ceres SEQ ID NO 14307944 as cited in SEQ ID NO 66503
  misc_feature (1)..(1837): Ortholog of  Ceres SEQ ID NO 12614124 as cited in SEQ ID NO 68392
  misc_feature (1)..(1837): Ortholog of  Ceres SEQ ID NO 14307980 as cited in SEQ ID NO 69214
accattcaaacccaacactatggcaactctatttctcacaatcctcctagccactgtcctcttcctcatcctccgtatcttctctcaccgtcgcaaccgcagccacaacaaccgtcttccaccggggccaaacccatggcccatcatcggaaacctccctcacatgggcactaagcctcatcgaaccctttccgccatggttactacttacggccctatcctccacctccgactagggttcgtagacgtcgtggtcgccgcttctaaatccgtggccgagcagttcttgaaaatacacgacgccaatttcgctagccgaccaccaaactcaggagctaaacacatggcatataactatcaagatcttgtctttgcaccttacggacaccgatggagactgttgagaaagattagttctgttcatctattttcagctaaagctctcgaagatttcaaacatgttcgacaggaagaggttggaacgctaacgcgggagctagtgcgtgttggcacgaaacccgtgaatttaggccagttggtgaacatgtgtgtagtcaacgctctaggacgagagatgatcggacggcgattgttcggcgccgacgccgatcataaagctgacgagtttcgatcaatggtgacggaaatgatggctctcgccggagtattcaacatcggagacttcgtgccgtcacttgattggttagatttacaaggcgtcgctggtaaaatgaaacggcttcacaagagattcgacgcttttctatcgtcgattttgaaagagcacgaaatgaacggtcaagatcaaaagcatacagatatgcttagcactttaatctcccttaaaggaactgatcttgacggtgacggaggaagcttaacggatactgagattaaagccttgctattgaacatgttcacagctggaactgacacgtcagcaagtacggtggactgggctatagctgaacttatccgtcacccggatataatggttaaagcccaagaagaacttgatattgttgtgggccgtgacaggcctgttaatgaatcagacatcgctcagcttccttaccttcaggcggttatcaaagagaatttcaggcttcatccaccaacaccactctcgttaccacacatcgcgtcagagagctgtgagatcaacggctaccatatcccgaaaggatcgactctattgacgaacatatgggccatagcccgtgacccggatcaatggtccgacccgttagcatttaaacccgagagattcttacccggtggtgaaaaatccggcgttgatgtgaaaggaagcgatttcgagctaataccgttcggagctgggaggagaatctgtgccggtttaagtttagggttacgtacgattcagtttcttacggcgacgttggttcaaggatttgattgggaattagctggaggagttacgccggagaagctgaatatggaggagagttatgggcttacactgcaaagagcggttcctttggtggtacatcctaagccaaggttggctccgaacgtttatggactcgggtcgggttaaaatttaactttgcttcttggacaaggtatatggcttgcacgaaaataaagttttaaaacagcgtagtttgatccggagttagctttatgtaagaacgtgtaacgccaaatcaagtcattattaaatattgtgagttgtttgtaacctatatataaatcttgaagaggaagatttcagaaatcttgaatatgttttaggaaaaacatttttttttttacagtagcgcaagttgaattaaaacctattccttacagtaccaaatgcattaaaaattct

SEQ ID NO: 44704 - protein, 519 aa, Arabidopsis thaliana
  peptide (1)..(519): Ceres Seq. ID no. 13509648
PFKPNTMATLFLTILLATVLFLILRIFSHRRNRSHNNRLPPGPNPWPIIGNLPHMGTKPHRTLSAMVTTYGPILHLRLGFVDVVVAASKSVAEQFLKIHDANFASRPPNSGAKHMAYNYQDLVFAPYGHRWRLLRKISSVHLFSAKALEDFKHVRQEEVGTLTRELVRVGTKPVNLGQLVNMCVVNALGREMIGRRLFGADADHKADEFRSMVTEMMALAGVFNIGDFVPSLDWLDLQGVAGKMKRLHKRFDAFLSSILKEHEMNGQDQKHTDMLSTLISLKGTDLDGDGGSLTDTEIKALLLNMFTAGTDTSASTVDWAIAELIRHPDIMVKAQEELDIVVGRDRPVNESDIAQLPYLQAVIKENFRLHPPTPLSLPHIASESCEINGYHIPKGSTLLTNIWAIARDPDQWSDPLAFKPERFLPGGEKSGVDVKGSDFELIPFGAGRRICAGLSLGLRTIQFLTATLVQGFDWELAGGVTPEKLNMEESYGLTLQRAVPLVVHPKPRLAPNVYGLGSG

SEQ ID NO: 44705 - protein, 513 aa, Arabidopsis thaliana
  peptide (1)..(513): Ceres Seq. ID no. 13509649
MATLFLTILLATVLFLILRIFSHRRNRSHNNRLPPGPNPWPIIGNLPHMGTKPHRTLSAMVTTYGPILHLRLGFVDVVVAASKSVAEQFLKIHDANFASRPPNSGAKHMAYNYQDLVFAPYGHRWRLLRKISSVHLFSAKALEDFKHVRQEEVGTLTRELVRVGTKPVNLGQLVNMCVVNALGREMIGRRLFGADADHKADEFRSMVTEMMALAGVFNIGDFVPSLDWLDLQGVAGKMKRLHKRFDAFLSSILKEHEMNGQDQKHTDMLSTLISLKGTDLDGDGGSLTDTEIKALLLNMFTAGTDTSASTVDWAIAELIRHPDIMVKAQEELDIVVGRDRPVNESDIAQLPYLQAVIKENFRLHPPTPLSLPHIASESCEINGYHIPKGSTLLTNIWAIARDPDQWSDPLAFKPERFLPGGEKSGVDVKGSDFELIPFGAGRRICAGLSLGLRTIQFLTATLVQGFDWELAGGVTPEKLNMEESYGLTLQRAVPLVVHPKPRLAPNVYGLGSG

SEQ ID NO: 44706 - protein, 465 aa, Arabidopsis thaliana
  peptide (1)..(465): Ceres Seq. ID no. 13509650
MGTKPHRTLSAMVTTYGPILHLRLGFVDVVVAASKSVAEQFLKIHDANFASRPPNSGAKHMAYNYQDLVFAPYGHRWRLLRKISSVHLFSAKALEDFKHVRQEEVGTLTRELVRVGTKPVNLGQLVNMCVVNALGREMIGRRLFGADADHKADEFRSMVTEMMALAGVFNIGDFVPSLDWLDLQGVAGKMKRLHKRFDAFLSSILKEHEMNGQDQKHTDMLSTLISLKGTDLDGDGGSLTDTEIKALLLNMFTAGTDTSASTVDWAIAELIRHPDIMVKAQEELDIVVGRDRPVNESDIAQLPYLQAVIKENFRLHPPTPLSLPHIASESCEINGYHIPKGSTLLTNIWAIARDPDQWSDPLAFKPERFLPGGEKSGVDVKGSDFELIPFGAGRRICAGLSLGLRTIQFLTATLVQGFDWELAGGVTPEKLNMEESYGLTLQRAVPLVVHPKPRLAPNVYGLGSG

SEQ ID NO: 44707 - DNA, 2011 bp, Arabidopsis thaliana
  misc_feature (1)..(2011): Ceres Seq. ID no. 13509603
  misc_feature (1)..(2011): Ortholog of  Ceres SEQ ID NO 15176298 as cited in SEQ ID NO 58961
gatctcgtttcagtgactcctgcaaaccgtccactccatgtggattgcacaaaaagttctataaagaaaatatagcttttagactttggtcctagattcaactaatctctttttctatttcttctgtgttcttctctgaagcttccattgtgtaggacttatgctcttttctcctacttagggaaagtgcattaattcgtatctatctaggcacagagattgttgataacttatcgtactttaaatggaaaattctatgaacaacagaggacatggacacaatcaagaacatgcagacaacttgccagaatcaaagagacagaagcttcctgctttggcaagtgtcatagtggaagctgtcaaggtagatagtctgcagaggctatgctcgtctttggaaccattatttcgaagaattgtcagtgaagaggtggaacgtgccatatcaaggttggagaactcgaaatctacttcaagatctacagaaccgaataagattcaaggcctcgatggaagaaatctgcaacttcggttcagaacacgaatgcctcctcatttattcacaggtgggaaagtcgagggagagcaaggctcagccattcacgtggttcttatagatgcaaacaccggaaatgtaatccaaacaggagaagaatcaatgacaaagctgaatattgtcgtgttagatggagacttcaatgatgaagacgacaaagattggacgagagaacattttgagagctttgaagtgaaggaacgcgaaggaaaacgtcccatcttgactggtgacagacatgtgataattaaagaaggtgtaggaactcttggaaaacttactttcactgacaattcgagctggattaggagcagaaagtttagacttggtgttaagcctgcaacgggatttcacatccgtgaagctaaaacagaaccatttgctgttaaagatcacagaggagaactatacaagaaacattatccaccggttttacatgatgaagtctggagattggataaaatagcgaaagatggagcgctacacaagaagctactaaaatctaacattgtgactgttgaagacttcctacagatactcatgaaggatccgcagaaactaagaagcttacttgggagtggaatgtcaaatagaatgtgggataacacggtagagcacgcaaagacttgtgtcttaggtgggaaactttacgcctattacacagatcaaacacaccagacagctgttgtctttaatcatatatatgaatttcaaggcctaattgccaatggccacttcttgtcttcggaatctcttaaccatgaccaaaagatttctgcagacactttggtgaagactgcttacgagaactggcataaagtggttgagtatggcggtaagctcttgaattgcttaccagttgctaagaagggaataaaaagcttgccagagccaaaaatggctcagaaccatcaaacgcagcagaaggctctgcaatgccaacagactgtgaatggctactcatcagatcctcagcatctgatagagtatccttttgtccaacaaccttgctatcagttacgagactacacatcgatggagagttcttcagtttcaggctcatataatggaggccttgaagatattttcacggaggaaattcgagcgaggagttctgagatgctcgagacggataacatgcagagattgctcaagacatttgggatatcaggcgggtttggtaacagggatgagtccatttacggtttcagtgatcagtacgaagctcagatagacaagggttatatgagagaaggaggtagaggcgcagggaaagctgtagtgggatggcttaagctcaaagctgcattgagatggggtatctttatacgcaagaaagctgcagagaggaggcctcaaattgtggagatcgactaagaaagtactacaaaaaaattccgagagcttttcttttgtataaataaacttgaagcaattacttttttaaagagaatc

SEQ ID NO: 44708 - protein, 562 aa, Arabidopsis thaliana
  peptide (1)..(562): Ceres Seq. ID no. 13509604
MENSMNNRGHGHNQEHADNLPESKRQKLPALASVIVEAVKVDSLQRLCSSLEPLFRRIVSEEVERAISRLENSKSTSRSTEPNKIQGLDGRNLQLRFRTRMPPHLFTGGKVEGEQGSAIHVVLIDANTGNVIQTGEESMTKLNIVVLDGDFNDEDDKDWTREHFESFEVKEREGKRPILTGDRHVIIKEGVGTLGKLTFTDNSSWIRSRKFRLGVKPATGFHIREAKTEPFAVKDHRGELYKKHYPPVLHDEVWRLDKIAKDGALHKKLLKSNIVTVEDFLQILMKDPQKLRSLLGSGMSNRMWDNTVEHAKTCVLGGKLYAYYTDQTHQTAVVFNHIYEFQGLIANGHFLSSESLNHDQKISADTLVKTAYENWHKVVEYGGKLLNCLPVAKKGIKSLPEPKMAQNHQTQQKALQCQQTVNGYSSDPQHLIEYPFVQQPCYQLRDYTSMESSSVSGSYNGGLEDIFTEEIRARSSEMLETDNMQRLLKTFGISGGFGNRDESIYGFSDQYEAQIDKGYMREGGRGAGKAVVGWLKLKAALRWGIFIRKKAAERRPQIVEID

SEQ ID NO: 44709 - protein, 558 aa, Arabidopsis thaliana
  peptide (1)..(558): Ceres Seq. ID no. 13509605
MNNRGHGHNQEHADNLPESKRQKLPALASVIVEAVKVDSLQRLCSSLEPLFRRIVSEEVERAISRLENSKSTSRSTEPNKIQGLDGRNLQLRFRTRMPPHLFTGGKVEGEQGSAIHVVLIDANTGNVIQTGEESMTKLNIVVLDGDFNDEDDKDWTREHFESFEVKEREGKRPILTGDRHVIIKEGVGTLGKLTFTDNSSWIRSRKFRLGVKPATGFHIREAKTEPFAVKDHRGELYKKHYPPVLHDEVWRLDKIAKDGALHKKLLKSNIVTVEDFLQILMKDPQKLRSLLGSGMSNRMWDNTVEHAKTCVLGGKLYAYYTDQTHQTAVVFNHIYEFQGLIANGHFLSSESLNHDQKISADTLVKTAYENWHKVVEYGGKLLNCLPVAKKGIKSLPEPKMAQNHQTQQKALQCQQTVNGYSSDPQHLIEYPFVQQPCYQLRDYTSMESSSVSGSYNGGLEDIFTEEIRARSSEMLETDNMQRLLKTFGISGGFGNRDESIYGFSDQYEAQIDKGYMREGGRGAGKAVVGWLKLKAALRWGIFIRKKAAERRPQIVEID

SEQ ID NO: 44710 - protein, 462 aa, Arabidopsis thaliana
  peptide (1)..(462): Ceres Seq. ID no. 13509606
MPPHLFTGGKVEGEQGSAIHVVLIDANTGNVIQTGEESMTKLNIVVLDGDFNDEDDKDWTREHFESFEVKEREGKRPILTGDRHVIIKEGVGTLGKLTFTDNSSWIRSRKFRLGVKPATGFHIREAKTEPFAVKDHRGELYKKHYPPVLHDEVWRLDKIAKDGALHKKLLKSNIVTVEDFLQILMKDPQKLRSLLGSGMSNRMWDNTVEHAKTCVLGGKLYAYYTDQTHQTAVVFNHIYEFQGLIANGHFLSSESLNHDQKISADTLVKTAYENWHKVVEYGGKLLNCLPVAKKGIKSLPEPKMAQNHQTQQKALQCQQTVNGYSSDPQHLIEYPFVQQPCYQLRDYTSMESSSVSGSYNGGLEDIFTEEIRARSSEMLETDNMQRLLKTFGISGGFGNRDESIYGFSDQYEAQIDKGYMREGGRGAGKAVVGWLKLKAALRWGIFIRKKAAERRPQIVEID

SEQ ID NO: 44711 - DNA, 763 bp, Arabidopsis thaliana
  misc_feature (1)..(763): Ceres Seq. ID no. 13646298
  misc_feature (1)..(763): Ortholog of  Ceres SEQ ID NO 12609041 as cited in SEQ ID NO 51310
  misc_feature (1)..(763): Ortholog of  Ceres SEQ ID NO 14312140 as cited in SEQ ID NO 57002
  misc_feature (1)..(763): Ortholog of  Ceres SEQ ID NO 14312224 as cited in SEQ ID NO 57255
  misc_feature (1)..(763): Ortholog of  Ceres SEQ ID NO 13599144 as cited in SEQ ID NO 0
atagacagacacacccaaaccctagatctaaccccagccgtcagatcagattgatcgggcaatcgcttctagaccgttggaatcaagcaatggtagagcagcggtacgaggatggctctcgtctcgtcgccgggtgtattccgtttaggtatgtaaattctgacaaagatggtaattctgaatctgggaaagtgattcaagtgttgatgatcagctcgtctagtggaccgggacttttgtttcccaagggaggatgggagaatgatgagacagtcagggaggctgcagcgagggaagcagtggaagaagcaggagtccgtgggattcttatggattttttggggaattatgagttcaagagcaaatcacaccaagatgagtttagcccagaaggtttatgtaaagcggcaatgtacgcgttgtatgtgaaagaagagctagcgacgtggccggaacatgagacgagaacacggaaatggctgacaattgaagaagcggtagagagttgcagtcacccttggatgaaggacgcattggtggaaggattctgtaaatggcataaggagaagatggttaaaggagaggagataactggtgaacattgaagcaaatgtgcataaacctctgagcgttggtttcattcctttcgattttgtttttacctttttgtttttgtttttgaagtcttatgcatggataatctcttgtgactgcgaaacgtaatagtttcgaagatttaaagttcaattattgccctattttc

SEQ ID NO: 44712 - protein, 200 aa, Arabidopsis thaliana
  peptide (1)..(200): Ceres Seq. ID no. 13646299
RQTHPNPRSNPSRQIRLIGQSLLDRWNQAMVEQRYEDGSRLVAGCIPFRYVNSDKDGNSESGKVIQVLMISSSSGPGLLFPKGGWENDETVREAAAREAVEEAGVRGILMDFLGNYEFKSKSHQDEFSPEGLCKAAMYALYVKEELATWPEHETRTRKWLTIEEAVESCSHPWMKDALVEGFCKWHKEKMVKGEEITGEH

SEQ ID NO: 44713 - protein, 171 aa, Arabidopsis thaliana
  peptide (1)..(171): Ceres Seq. ID no. 13646300
MVEQRYEDGSRLVAGCIPFRYVNSDKDGNSESGKVIQVLMISSSSGPGLLFPKGGWENDETVREAAAREAVEEAGVRGILMDFLGNYEFKSKSHQDEFSPEGLCKAAMYALYVKEELATWPEHETRTRKWLTIEEAVESCSHPWMKDALVEGFCKWHKEKMVKGEEITGEH

SEQ ID NO: 44714 - protein, 132 aa, Arabidopsis thaliana
  peptide (1)..(132): Ceres Seq. ID no. 13646301
MISSSSGPGLLFPKGGWENDETVREAAAREAVEEAGVRGILMDFLGNYEFKSKSHQDEFSPEGLCKAAMYALYVKEELATWPEHETRTRKWLTIEEAVESCSHPWMKDALVEGFCKWHKEKMVKGEEITGEH

SEQ ID NO: 44715 - DNA, 1606 bp, Arabidopsis thaliana
  misc_feature (1)..(1606): Ceres Seq. ID no. 12488577
  misc_feature (1)..(1606): Ortholog of  Ceres SEQ ID NO 12609146 as cited in SEQ ID NO 52118
  misc_feature (1)..(1606): Ortholog of  Ceres SEQ ID NO 13638136 as cited in SEQ ID NO 58644
  misc_feature (1)..(1606): Ortholog of  Ceres SEQ ID NO 13596868 as cited in SEQ ID NO 62806
  misc_feature (1)..(1606): Ortholog of  Ceres SEQ ID NO 14302836 as cited in SEQ ID NO 65013
  misc_feature (1)..(1606): Ortholog of  Ceres SEQ ID NO 13595885 as cited in SEQ ID NO 69265
attgcatttcctaacgctcaacaaaatctctctctactaatatctctctctctctctctctattgttgaagaagactcataatcggagattgtttgtttttggtttgctctgtaaattggagaagttttgttagagatcaaatggctgggatttgttgcggtgttgttggagagactgaaccggcggcaccggttgattcaacttctcgagcttctcttagacggaggttagatctacttccgtcgatcaaaattgttgctgactccgccgttgctcctccgcttgaaaactgccgtaaacggcagaagcgtgagacagtagtgctctcgacgttaccgggaaatctagatctggattcgaatgtgaggagtgagaataagaaggctagatcagcggttacgaattcaaattctgttacggaagcagagagtttcttttccgatgtacctaagatcggtacgacgtcggtttgtggtagaagacgagacatggaagacgctgtctcgattcatccttcgtttcttcaacggaactctgagaatcatcatttctacggtgtctttgacggccatggctgctctcatgttgcggagaagtgcagagaacggttgcatgatatagtgaagaaggaagttgaagttatggcttccgacgagtggacagagacgatggttaagagttttcaaaaaatggataaagaagttagccaacgagagtgtaacttagttgttaatggtgctactcggagtatgaaaaattcttgtagatgtgaattgcagtctcctcagtgtgacgccgtcggatccaccgctgttgtatcggttgtcacgccggagaagatcattgtttctaattgcggtgattcacgggctgtgctttgtcgtaacggtgtagccattcctctctccgtagatcacaagccggatcgacccgatgaattgattcggatccaacaagctggtgggcgagttatatattgggatggagctagggttcttggagttcttgccatgtctagagcaattggtgataattacttgaaaccgtatgtgattccggatccggaggtaacagtgacggatcgaactgatgaggatgagtgtttgatcttggcgagtgatggactatgggatgttgtaccaaacgagacggcgtgtggcgtggctcgcatgtgccttcgaggtgctggtgcgggtgacgactcagatgcggcgcacaatgcgtgctccgatgcggcgttgctcttaacaaagttggctctagcaagacagagctccgataacgtgagcgtcgttgtggttgacttgaggaagaggaggaataatcaagcgtcgtcttaataattagtgttataattagtagtagtattagaataattgttacatagcctaattgtaattgtattctttttatttttctattttagtttttctcattttaaggtgttttttcttttctattttagttagctcttaattcaggctggggaagaaaaagagctgattaaatagtttgagtatttttcttatttttctattcaggtaatattatacatgtattcttttagtatgctcgttggaaatgtaataatctaattcagagggt

SEQ ID NO: 44716 - protein, 399 aa, Arabidopsis thaliana
  peptide (1)..(399): Ceres Seq. ID no. 12488578
MAGICCGVVGETEPAAPVDSTSRASLRRRLDLLPSIKIVADSAVAPPLENCRKRQKRETVVLSTLPGNLDLDSNVRSENKKARSAVTNSNSVTEAESFFSDVPKIGTTSVCGRRRDMEDAVSIHPSFLQRNSENHHFYGVFDGHGCSHVAEKCRERLHDIVKKEVEVMASDEWTETMVKSFQKMDKEVSQRECNLVVNGATRSMKNSCRCELQSPQCDAVGSTAVVSVVTPEKIIVSNCGDSRAVLCRNGVAIPLSVDHKPDRPDELIRIQQAGGRVIYWDGARVLGVLAMSRAIGDNYLKPYVIPDPEVTVTDRTDEDECLILASDGLWDVVPNETACGVARMCLRGAGAGDDSDAAHNACSDAALLLTKLALARQSSDNVSVVVVDLRKRRNNQASS

SEQ ID NO: 44717 - protein, 283 aa, Arabidopsis thaliana
  peptide (1)..(283): Ceres Seq. ID no. 12488579
MEDAVSIHPSFLQRNSENHHFYGVFDGHGCSHVAEKCRERLHDIVKKEVEVMASDEWTETMVKSFQKMDKEVSQRECNLVVNGATRSMKNSCRCELQSPQCDAVGSTAVVSVVTPEKIIVSNCGDSRAVLCRNGVAIPLSVDHKPDRPDELIRIQQAGGRVIYWDGARVLGVLAMSRAIGDNYLKPYVIPDPEVTVTDRTDEDECLILASDGLWDVVPNETACGVARMCLRGAGAGDDSDAAHNACSDAALLLTKLALARQSSDNVSVVVVDLRKRRNNQASS

SEQ ID NO: 44718 - protein, 232 aa, Arabidopsis thaliana
  peptide (1)..(232): Ceres Seq. ID no. 12488580
MASDEWTETMVKSFQKMDKEVSQRECNLVVNGATRSMKNSCRCELQSPQCDAVGSTAVVSVVTPEKIIVSNCGDSRAVLCRNGVAIPLSVDHKPDRPDELIRIQQAGGRVIYWDGARVLGVLAMSRAIGDNYLKPYVIPDPEVTVTDRTDEDECLILASDGLWDVVPNETACGVARMCLRGAGAGDDSDAAHNACSDAALLLTKLALARQSSDNVSVVVVDLRKRRNNQASS

SEQ ID NO: 44719 - DNA, 1034 bp, Arabidopsis thaliana
  misc_feature (1)..(1034): Ceres Seq. ID no. 15178402
  misc_feature (1)..(1034): Ortholog of  Ceres SEQ ID NO 15169849 as cited in SEQ ID NO 53636
  misc_feature (1)..(1034): Ortholog of  Ceres SEQ ID NO 14307300 as cited in SEQ ID NO 54107
aaatgaaaagccagtgaattagggctttctctcacttgttgaagccgcttcttcttcttcctcactgtagctcgtcgtcgctacaccatctagaagacccttaaccatggctgtcgggaagaacaagaggatttcaaagggtaggaaaggaggaaagaagaaggctgttgatcccttctccaagaaggattggtatgacgtgaaggctcctggttctttcacgaacaggaatgttgggaagactcttgtttccaggactcagggtaccaagattgcctctgagggactgaaacacagggtgtttgaggtttctcttgctgatctacaaaatgatgaggataatgcctacaggaagatccgtcttagagctgaagatgttcagggaaggaatgtgttgacccagttctggggtatggatttcacaaccgacaagctaaggtcattggtgaagaagtggcagactttgattgaagcccatgtcgatgtgaaaaccacagacggctacaccttgaggatgttctgcatcgccttcacaaagagacgtgctaaccaagtgaagcgtacctgttacgctcaatccagccaaatccgtcagatccgcagaaagatgagtgagattatggtgaaggaggcttcatcttgtgacctcaaggagctagtggccaagttcatcccagaggccattggaagaaagattgagaaggcaacacagggcatctacccgttgcagaatgtgttcatccgtaaagtgaagatcctaaaggctcccaagtttgaccttggaaagctcatggaggtgcatggagattacacagcagaggatgttggtgtgaaggtagacaggccagctgatgagacaatggttgaggagccaacagaaatcatcggagcttaggggattatagatttgtttgttttttcgctggcaaaaaaaaaaaaaagaacctaatgttatgtcgccattggtgtgactggttttggactcgtttttgatggatgatctttattgtttatcatgttttaccttttttatt

SEQ ID NO: 44720 - protein, 262 aa, Arabidopsis thaliana
  peptide (1)..(262): Ceres Seq. ID no. 15178403
MAVGKNKRISKGRKGGKKKAVDPFSKKDWYDVKAPGSFTNRNVGKTLVSRTQGTKIASEGLKHRVFEVSLADLQNDEDNAYRKIRLRAEDVQGRNVLTQFWGMDFTTDKLRSLVKKWQTLIEAHVDVKTTDGYTLRMFCIAFTKRRANQVKRTCYAQSSQIRQIRRKMSEIMVKEASSCDLKELVAKFIPEAIGRKIEKATQGIYPLQNVFIRKVKILKAPKFDLGKLMEVHGDYTAEDVGVKVDRPADETMVEEPTEIIGA

SEQ ID NO: 44721 - protein, 160 aa, Arabidopsis thaliana
  peptide (1)..(160): Ceres Seq. ID no. 15178404
MDFTTDKLRSLVKKWQTLIEAHVDVKTTDGYTLRMFCIAFTKRRANQVKRTCYAQSSQIRQIRRKMSEIMVKEASSCDLKELVAKFIPEAIGRKIEKATQGIYPLQNVFIRKVKILKAPKFDLGKLMEVHGDYTAEDVGVKVDRPADETMVEEPTEIIGA

SEQ ID NO: 44722 - DNA, 893 bp, Arabidopsis thaliana; identical to SEQ ID NO: 20800
  misc_feature (1)..(893): Ceres Seq. ID no. 12489296
  misc_feature (1)..(893): Ortholog of  Ceres SEQ ID NO 13595433 as cited in SEQ ID NO 56659

SEQ ID NO: 44723 - protein, 163 aa, Arabidopsis thaliana; identical to SEQ ID NO: 20801
  peptide (1)..(163): Ceres Seq. ID no. 12489297

SEQ ID NO: 44724 - protein, 161 aa, Arabidopsis thaliana; identical to SEQ ID NO: 20802
  peptide (1)..(161): Ceres Seq. ID no. 12489298

SEQ ID NO: 44725 - protein, 85 aa, Arabidopsis thaliana; identical to SEQ ID NO: 20803
  peptide (1)..(85): Ceres Seq. ID no. 12489299

SEQ ID NO: 44726 - DNA, 2363 bp, Arabidopsis thaliana
  misc_feature (1)..(2363): Ceres Seq. ID no. 12455369
  misc_feature (1)..(2363): Ortholog of  Ceres SEQ ID NO 14303027 as cited in SEQ ID NO 61275
  misc_feature (1)..(2363): Ortholog of  Ceres SEQ ID NO 13656177 as cited in SEQ ID NO 64997
agggttactaatttgggaattttactgtccaaaacgaatcaaaaaaaaaatctaagctttttgttccttttgcggcttttcgtcgtcttccttgcactatcttccttctgtagcatcaattcgtttccaaggttacgtagtagaatttacgcgagagagcgagagatcaaaaaccataaccatcttaagttacaatgagctcgtatgatcgtagatttgctgatccaaattcgtatcgccaacgctctggcgccccagttggttcgtctcagccgatggatccttccgccgcaccatacaacccacggtacactggtggtggtggaggatatggaccatctccggtaatggccggtgataattccggctataatcggtacccatctttccagccacctagtggcggtttctctgttggccgcggtggtggaagaggtggatatggtcaatacggcgatagaaacggcggagggaattggggaggaggaggaggacgtggcggatcgagtaaaagagagctagatagtgtttctcttccgaagcagaattttgggaatcttgtacattttgagaagaatttctatgtggagagtcccactgtgcaagctatgacagagcaggatgttgcaatgtacagaaccgagagggatatatccgttgaaggtcgtgatgttcctaagccgatgaagatgttccaagatgctaactttccagataacattcttgaagcaattgctaaattgggatttactgagccaacacctatacaagctcagggatggccgatggcgttgaagggtagggatttgattggtattgctgagactggctctggtaagacattggcttacttgttaccagcattggttcacgttagtgcacaacctcgattaggtcaggatgatggccccattgtgttaatattagctcccacaagagaactagctgttcagattcaagaggaatcaaggaaattcgggttgaggtctggtgttagaagtacttgtatctatggtggtgctcctaaaggacctcagattcgtgatcttagaagaggtgttgagattgtaattgctacacctggtcgtttgattgatatgttggaatgtcaacacactaatttgaagagagtgacttaccttgtactggatgaggctgacagaatgttagacatgggatttgaaccccaaattagaaagattgtatctcagatccgacctgatagacaaacacttctttggagtgcaacatggccacgagaggttgaaactcttgccaggcagtttctacgagatccatataaggccattattggatcaacagatctaaaagctaaccagtctattaaccaagtaatcgagattgtaccgacgccagagaaatacaacaggctccttacactacttaaacagttaatggatgggagtaaaatcctaatttttgtggagacaaagagagggtgtgatcaagtgactagacaattgagaatggacggatggccagctcttgccatacatggtgacaagacccaatcggaaagagaccgagtcttggcagaatttaagagtggacgaagcccgataatgactgccactgatgtagcagcaaggggacttgtttcctctggtattagggaaaaaagcacatagaaagaaaaaaggagcttctttgaagaatttgtttcctgcatccatctcccgggcatggagctgattggtttttgagcagcctgggcgactgacacctgcatgcattaatagtgttataacgccgtcccaaacactccttatccctgcaagttaagatgtgaaggacattaaatgtgtggttaattatgatttcccaaatacattggaggattacatccataggattggtcgaaccgggcgtgcaggagctaaaggaatggcctttacattcttcacacatgacaatgctaagtttgcgagagagcttgtcaagatccttcaagaagctggtcaagttgtacctcctactctctccgcactagtccgatcatctggttctggttatggaggttcaggtggtggaagaaacttcaggccaagaggaggaggacgtggtggtgggtttggagataaacggtcaagatcgacttcaaactttgtacctcacggtggaaagaggacttggtaaagagaatcccatcattttgattctatgagaaaacctttaattatgatgatgatgatcagcgtttggtttcgactagaagttctttgtcgtagagaacaaacatttactatataactatttagctgatttcgctgcttcttcttcttcttcttcatgatatttctaaacattttgcctttttcttaattctatcaactaaatacact

SEQ ID NO: 44727 - protein, 484 aa, Arabidopsis thaliana
  peptide (1)..(484): Ceres Seq. ID no. 12455370
MSSYDRRFADPNSYRQRSGAPVGSSQPMDPSAAPYNPRYTGGGGGYGPSPVMAGDNSGYNRYPSFQPPSGGFSVGRGGGRGGYGQYGDRNGGGNWGGGGGRGGSSKRELDSVSLPKQNFGNLVHFEKNFYVESPTVQAMTEQDVAMYRTERDISVEGRDVPKPMKMFQDANFPDNILEAIAKLGFTEPTPIQAQGWPMALKGRDLIGIAETGSGKTLAYLLPALVHVSAQPRLGQDDGPIVLILAPTRELAVQIQEESRKFGLRSGVRSTCIYGGAPKGPQIRDLRRGVEIVIATPGRLIDMLECQHTNLKRVTYLVLDEADRMLDMGFEPQIRKIVSQIRPDRQTLLWSATWPREVETLARQFLRDPYKAIIGSTDLKANQSINQVIEIVPTPEKYNRLLTLLKQLMDGSKILIFVETKRGCDQVTRQLRMDGWPALAIHGDKTQSERDRVLAEFKSGRSPIMTATDVAARGLVSSGIREKST

SEQ ID NO: 44728 - protein, 457 aa, Arabidopsis thaliana
  peptide (1)..(457): Ceres Seq. ID no. 12455371
MDPSAAPYNPRYTGGGGGYGPSPVMAGDNSGYNRYPSFQPPSGGFSVGRGGGRGGYGQYGDRNGGGNWGGGGGRGGSSKRELDSVSLPKQNFGNLVHFEKNFYVESPTVQAMTEQDVAMYRTERDISVEGRDVPKPMKMFQDANFPDNILEAIAKLGFTEPTPIQAQGWPMALKGRDLIGIAETGSGKTLAYLLPALVHVSAQPRLGQDDGPIVLILAPTRELAVQIQEESRKFGLRSGVRSTCIYGGAPKGPQIRDLRRGVEIVIATPGRLIDMLECQHTNLKRVTYLVLDEADRMLDMGFEPQIRKIVSQIRPDRQTLLWSATWPREVETLARQFLRDPYKAIIGSTDLKANQSINQVIEIVPTPEKYNRLLTLLKQLMDGSKILIFVETKRGCDQVTRQLRMDGWPALAIHGDKTQSERDRVLAEFKSGRSPIMTATDVAARGLVSSGIREKST

SEQ ID NO: 44729 - protein, 433 aa, Arabidopsis thaliana
  peptide (1)..(433): Ceres Seq. ID no. 12455372
MAGDNSGYNRYPSFQPPSGGFSVGRGGGRGGYGQYGDRNGGGNWGGGGGRGGSSKRELDSVSLPKQNFGNLVHFEKNFYVESPTVQAMTEQDVAMYRTERDISVEGRDVPKPMKMFQDANFPDNILEAIAKLGFTEPTPIQAQGWPMALKGRDLIGIAETGSGKTLAYLLPALVHVSAQPRLGQDDGPIVLILAPTRELAVQIQEESRKFGLRSGVRSTCIYGGAPKGPQIRDLRRGVEIVIATPGRLIDMLECQHTNLKRVTYLVLDEADRMLDMGFEPQIRKIVSQIRPDRQTLLWSATWPREVETLARQFLRDPYKAIIGSTDLKANQSINQVIEIVPTPEKYNRLLTLLKQLMDGSKILIFVETKRGCDQVTRQLRMDGWPALAIHGDKTQSERDRVLAEFKSGRSPIMTATDVAARGLVSSGIREKST

SEQ ID NO: 44730 - DNA, 1352 bp, Arabidopsis thaliana
  misc_feature (1)..(1352): Ceres Seq. ID no. 13494664
  misc_feature (1)..(1352): Ortholog of  Ceres SEQ ID NO 13654285 as cited in SEQ ID NO 68661
ctcaatcattagcttcttctcttctcttctctcacagagagagtaatcacaatccaagtgagaaaaagaaaacactaaacccagatcgaaaaccatgtctattaacaacaacaacaacaacaacaacaataacaacgatggtcttatgatctcatcaaacggagctttaatcgaacaacaaccatcagtcgttgtgaagaaaccaccggcgaaagatcgacatagcaaagtcgatggaagagggagaagaatccgtatgccgattatatgtgctgctcgtgtttttcagctaacgagagagcttggtcataagtcagatggccaaacaattgaatggttacttcgtcaagcagagccttctattatagctgcaacaggaactggtacaactccagcgagtttctcaactgcttctgtctctatccgtggagccaccaattctacttctttagatcataaacccacttctttacttggtggtacgtcaccgtttatacttgggaaacgtgttagagctgatgaggatagtaataatagtcataatcatagttctgttggtaaagatgagacctttacgacaacaccagctgggttttgggctgttccggcgaggccggattttggacaagtttggagttttgctggagctccacaagagatgtttttacaacaacaacatcatcatcagcaaccattgtttgttcatcagcaacagcaacaacaagctgcaatgggtgaagcttctgctgctagagttgggaattatcttccgggtcatcttaatttgcttgcttctttatccggtggatctcccgggtcggatcgaagagaggaagatccacgttaatggtttaagcccttttaggtttgagggcaaaatttggtatatatatttattatcttctcttctctattgttgtcattgtttctctatgtgtgtgttttagtgttgttagagattgatttggtttcagaatctctgcaagtgatttgagagttttcgttagctttaagtaagttaaagacggttgtttttgattagggttaaattagggtttaagaatctgttgtttttttggagggagatcgatttcttatcggatccaagattacttttaggaaaaaagggaaaatttcagaaaccacggtggtttcttttcctcttttttttttgtgtctgttttttttttccggtgaaacagagccgtcgattaaaatttcagatatatatttaaatgttttaatatggtttgttgttgttgttgctaattgtgtaatgtgttacaacaattgtggtgaagcatttgcgtaagctgttaaccacgtttatttctaataaatgtttcgaatac

SEQ ID NO: 44731 - protein, 250 aa, Arabidopsis thaliana
  peptide (1)..(250): Ceres Seq. ID no. 13494665
MSINNNNNNNNNNNDGLMISSNGALIEQQPSVVVKKPPAKDRHSKVDGRGRRIRMPIICAARVFQLTRELGHKSDGQTIEWLLRQAEPSIIAATGTGTTPASFSTASVSIRGATNSTSLDHKPTSLLGGTSPFILGKRVRADEDSNNSHNHSSVGKDETFTTTPAGFWAVPARPDFGQVWSFAGAPQEMFLQQQHHHQQPLFVHQQQQQQAAMGEASAARVGNYLPGHLNLLASLSGGSPGSDRREEDPR

SEQ ID NO: 44732 - protein, 233 aa, Arabidopsis thaliana
  peptide (1)..(233): Ceres Seq. ID no. 13494666
MISSNGALIEQQPSVVVKKPPAKDRHSKVDGRGRRIRMPIICAARVFQLTRELGHKSDGQTIEWLLRQAEPSIIAATGTGTTPASFSTASVSIRGATNSTSLDHKPTSLLGGTSPFILGKRVRADEDSNNSHNHSSVGKDETFTTTPAGFWAVPARPDFGQVWSFAGAPQEMFLQQQHHHQQPLFVHQQQQQQAAMGEASAARVGNYLPGHLNLLASLSGGSPGSDRREEDPR

SEQ ID NO: 44733 - protein, 196 aa, Arabidopsis thaliana
  peptide (1)..(196): Ceres Seq. ID no. 13494667
MPIICAARVFQLTRELGHKSDGQTIEWLLRQAEPSIIAATGTGTTPASFSTASVSIRGATNSTSLDHKPTSLLGGTSPFILGKRVRADEDSNNSHNHSSVGKDETFTTTPAGFWAVPARPDFGQVWSFAGAPQEMFLQQQHHHQQPLFVHQQQQQQAAMGEASAARVGNYLPGHLNLLASLSGGSPGSDRREEDPR

SEQ ID NO: 44734 - DNA, 1581 bp, Arabidopsis thaliana
  misc_feature (1)..(1581): Ceres Seq. ID no. 12455365
  misc_feature (1)..(1581): Ortholog of  Ceres SEQ ID NO 13660260 as cited in SEQ ID NO 67494
aattgaaccaatcgtgattcaactacaaaattcctctttgaaccaaaaagacaaatccgaaacatgcgtgtggatacgaaagatctctagattcctccactcctcaatttctcatcttttgcttcgtcgtgactcttcttgatntcatcaataatgggttctgttatgagtttgagctgttccaagaggaaagcaacgagtcaggacgttgagtgttcaagcgaatctcgtaaaagacgaaagatatcttcagagaacgatgaagaagagtgttgtagattgattccaagtcttcctgatgagttatctatacagattcttgctaggcttcctagaatttgttactcgagtgttcggttggtttctcggaggtggagatcggctgtttcgacttctgaggtgtatagtttgaggaaagaacttgggaggactgaggagtggctctatgtgttgactaaaggtcatgaggataagcttttgtggtatgctttagatcctgtgtctactaaatggcagagattgcctccaatgccggttgttgtttatgaagaagagtctagaaagagtttatctggtttgtggaatatgattacaccgagctttaatgttggtgcgattgtgaggagctttctaggtaggagggactcctctgagcaaatgccgttttgtgggtgcgctattggtgctgttgatgggggtctttatgttattggtggactttctaggtctaaaacagtgagctgtgtttggcggtttgatccgattttgaactcttggagtgaagttagttctatgttggcgagtcgggcttattccaaaacaggtgtattgaataagaaactatatgttgttggaggggttgatcggggacggggaggtttatctcctcttcagtcagctgaggtttatgatccaagcacggatgcttggtcagaggttccgagcatgcctttctcaaaggcgcaagtgttgccaaatgcgtttttggctgacttactaaagcctattgccacaggaatgacttgctacaacggtaggttatgtgttcctcagagtttatactcttggcctttctttgttgatgttggaggagaggtttatgatcccgagacaaatctctgggttgaaatgccgtctggtatgggtgaaggttggcctgcgaggcaagcaggtacaaaactgagtgttgtggtggatggtgagttatacgcttttgatccttcttcttcgatggagaacggaaagattaaagtgtatgatcaaaaggaagatacttggaaggttgttattggggaagtccctgtgtatgacttaacagattcagaatctccttatttgcttgctgggtttcatggcaagcttcatttcattactagagaccctaatcataacgttacagtcttacgagctgatgtccccaacatcccagtctcctcatcatcatctagctccagttctgtttcaatcccacacttaaagaccaatgcacctaacaagtcagacactgttacatggaaactcattgcaaccaaggactttggtgctgctgaacttgttagctgccaagttatagatatataa

SEQ ID NO: 44735 - protein, 475 aa, Arabidopsis thaliana
  peptide (1)..(475): Ceres Seq. ID no. 12455366
MGSVMSLSCSKRKATSQDVECSSESRKRRKISSENDEEECCRLIPSLPDELSIQILARLPRICYSSVRLVSRRWRSAVSTSEVYSLRKELGRTEEWLYVLTKGHEDKLLWYALDPVSTKWQRLPPMPVVVYEEESRKSLSGLWNMITPSFNVGAIVRSFLGRRDSSEQMPFCGCAIGAVDGGLYVIGGLSRSKTVSCVWRFDPILNSWSEVSSMLASRAYSKTGVLNKKLYVVGGVDRGRGGLSPLQSAEVYDPSTDAWSEVPSMPFSKAQVLPNAFLADLLKPIATGMTCYNGRLCVPQSLYSWPFFVDVGGEVYDPETNLWVEMPSGMGEGWPARQAGTKLSVVVDGELYAFDPSSSMENGKIKVYDQKEDTWKVVIGEVPVYDLTDSESPYLLAGFHGKLHFITRDPNHNVTVLRADVPNIPVSSSSSSSSSVSIPHLKTNAPNKSDTVTWKLIATKDFGAAELVSCQVIDI

SEQ ID NO: 44736 - protein, 471 aa, Arabidopsis thaliana
  peptide (1)..(471): Ceres Seq. ID no. 12455367
MSLSCSKRKATSQDVECSSESRKRRKISSENDEEECCRLIPSLPDELSIQILARLPRICYSSVRLVSRRWRSAVSTSEVYSLRKELGRTEEWLYVLTKGHEDKLLWYALDPVSTKWQRLPPMPVVVYEEESRKSLSGLWNMITPSFNVGAIVRSFLGRRDSSEQMPFCGCAIGAVDGGLYVIGGLSRSKTVSCVWRFDPILNSWSEVSSMLASRAYSKTGVLNKKLYVVGGVDRGRGGLSPLQSAEVYDPSTDAWSEVPSMPFSKAQVLPNAFLADLLKPIATGMTCYNGRLCVPQSLYSWPFFVDVGGEVYDPETNLWVEMPSGMGEGWPARQAGTKLSVVVDGELYAFDPSSSMENGKIKVYDQKEDTWKVVIGEVPVYDLTDSESPYLLAGFHGKLHFITRDPNHNVTVLRADVPNIPVSSSSSSSSSVSIPHLKTNAPNKSDTVTWKLIATKDFGAAELVSCQVIDI

SEQ ID NO: 44737 - protein, 350 aa, Arabidopsis thaliana
  peptide (1)..(350): Ceres Seq. ID no. 12455368
MPVVVYEEESRKSLSGLWNMITPSFNVGAIVRSFLGRRDSSEQMPFCGCAIGAVDGGLYVIGGLSRSKTVSCVWRFDPILNSWSEVSSMLASRAYSKTGVLNKKLYVVGGVDRGRGGLSPLQSAEVYDPSTDAWSEVPSMPFSKAQVLPNAFLADLLKPIATGMTCYNGRLCVPQSLYSWPFFVDVGGEVYDPETNLWVEMPSGMGEGWPARQAGTKLSVVVDGELYAFDPSSSMENGKIKVYDQKEDTWKVVIGEVPVYDLTDSESPYLLAGFHGKLHFITRDPNHNVTVLRADVPNIPVSSSSSSSSSVSIPHLKTNAPNKSDTVTWKLIATKDFGAAELVSCQVIDI

SEQ ID NO: 44738 - DNA, 687 bp, Arabidopsis thaliana; identical to SEQ ID NO: 30473
  misc_feature (1)..(687): Ceres Seq. ID no. 12580320
  misc_feature (1)..(687): Ortholog of  Ceres SEQ ID NO 13661089 as cited in SEQ ID NO 61053

SEQ ID NO: 44739 - protein, 95 aa, Arabidopsis thaliana; identical to SEQ ID NO: 30474
  peptide (1)..(95): Ceres Seq. ID no. 12580321

SEQ ID NO: 44740 - protein, 87 aa, Arabidopsis thaliana; identical to SEQ ID NO: 30475
  peptide (1)..(87): Ceres Seq. ID no. 12580322

SEQ ID NO: 44741 - protein, 82 aa, Arabidopsis thaliana; identical to SEQ ID NO: 30476
  peptide (1)..(82): Ceres Seq. ID no. 12580323

SEQ ID NO: 44742 - DNA, 1194 bp, Arabidopsis thaliana
  misc_feature (1)..(1194): Ceres Seq. ID no. 13509620
  misc_feature (1)..(1194): Ortholog of  Ceres SEQ ID NO 13587423 as cited in SEQ ID NO 437
  misc_feature (1)..(1194): Ortholog of  Ceres SEQ ID NO 15171096 as cited in SEQ ID NO 59411
atggctgtgactctgagattaacgaattctttagcattttccagtcatcctctaacgtcgtccgtactgttccgaggaagcaaatcgatcggtactattactaagatagcatcaacaatcaggacggtaaaaatggcggcttttgctgggtctgactcagaaacaacgtcgtctacctcgagagttatcgattctcatctccacatttgggcttctcctcaagaggccgagacatatccttattttcctggccaagaacctactttgactggtgatgtcaatttcttgcttaagaacatggaagaggcaagagtagatggagctctcattgtgcaacccataaatcacaagtttgaccattctttagtaacaagtgttctgaagagatacccatcaaagtttgtcggttgttgccttgctaatcctgcagaagatggcagtggaattacgcaccttgagaatcttgttttagagagtaattatcgtgctgttcggtttaatccctacttgtggccatcgggtcagaagatgacaaatgctgttggtaaagccttgttctctaaagcaggggagctttgtgtgcctgttggcttcatgtgcatgaagggtctagatcttcacattgcagaaattgaggaactttgcacagaatttccaaagacaactgttttactagatcacgctggattctgcaaagtaccagaaagtggtgaggcaaagcttgcttattctcaactcatgaagctgtctagatttccacaggtatatgtgaaattcagtgctctattcaggatctcaagaaccggcttcccgtatcaggacctatcgcctctcctatctcaacttgtgtcccattttggggcaaatcgtgtcatgtggggcagtgacttcccatttgttgttcttgaatgtggatataaagaagctaaagaagctgtgactatcattgcaaaagaagcatccttgtcaagttctgagatggactggattctgggaaagactctgatgcagctcttccctggacaatgggttcttccttgagaggcttgtcagaagtaataggttgcatgcggatgagataatgaagcaagcaatggaagttgtatcattaaagatacttaactctagcctatatattaccaaacactagatgtataccaatttagtaaatcaacaaaaatnttatgtgttgat

SEQ ID NO: 44743 - protein, 346 aa, Arabidopsis thaliana
  peptide (1)..(346): Ceres Seq. ID no. 13509621
MAVTLRLTNSLAFSSHPLTSSVLFRGSKSIGTITKIASTIRTVKMAAFAGSDSETTSSTSRVIDSHLHIWASPQEAETYPYFPGQEPTLTGDVNFLLKNMEEARVDGALIVQPINHKFDHSLVTSVLKRYPSKFVGCCLANPAEDGSGITHLENLVLESNYRAVRFNPYLWPSGQKMTNAVGKALFSKAGELCVPVGFMCMKGLDLHIAEIEELCTEFPKTTVLLDHAGFCKVPESGEAKLAYSQLMKLSRFPQVYVKFSALFRISRTGFPYQDLSPLLSQLVSHFGANRVMWGSDFPFVVLECGYKEAKEAVTIIAKEASLSSSEMDWILGKTLMQLFPGQWVLP

SEQ ID NO: 44744 - protein, 302 aa, Arabidopsis thaliana
  peptide (1)..(302): Ceres Seq. ID no. 13509622
MAAFAGSDSETTSSTSRVIDSHLHIWASPQEAETYPYFPGQEPTLTGDVNFLLKNMEEARVDGALIVQPINHKFDHSLVTSVLKRYPSKFVGCCLANPAEDGSGITHLENLVLESNYRAVRFNPYLWPSGQKMTNAVGKALFSKAGELCVPVGFMCMKGLDLHIAEIEELCTEFPKTTVLLDHAGFCKVPESGEAKLAYSQLMKLSRFPQVYVKFSALFRISRTGFPYQDLSPLLSQLVSHFGANRVMWGSDFPFVVLECGYKEAKEAVTIIAKEASLSSSEMDWILGKTLMQLFPGQWVLP

SEQ ID NO: 44745 - protein, 247 aa, Arabidopsis thaliana
  peptide (1)..(247): Ceres Seq. ID no. 13509623
MEEARVDGALIVQPINHKFDHSLVTSVLKRYPSKFVGCCLANPAEDGSGITHLENLVLESNYRAVRFNPYLWPSGQKMTNAVGKALFSKAGELCVPVGFMCMKGLDLHIAEIEELCTEFPKTTVLLDHAGFCKVPESGEAKLAYSQLMKLSRFPQVYVKFSALFRISRTGFPYQDLSPLLSQLVSHFGANRVMWGSDFPFVVLECGYKEAKEAVTIIAKEASLSSSEMDWILGKTLMQLFPGQWVLP

SEQ ID NO: 44746 - DNA, 1476 bp, Arabidopsis thaliana
  misc_feature (1)..(1476): Ceres Seq. ID no. 12489029
  misc_feature (1)..(1476): Ortholog of  Ceres SEQ ID NO 13639663 as cited in SEQ ID NO 57850
  misc_feature (1)..(1476): Ortholog of  Ceres SEQ ID NO 15224330 as cited in SEQ ID NO 58808
aacggtggaaacagccttccctcttccctagtctcccacgcttctgtttcgcattttcccccattttctccggcgacggccaatcatcatcaaccgccggcgaaaacctcagattcgtgaatctgattcattcattccgtgattaagatgggtgtagattactacaatatactaaaggtgaatcacaacgcgacggaggatgatctcaagaaagcttacaagcgtctcgccatgatttggcatcccgataagaatccatcgacgcgtcgagacgaagctgaagccaaattcaaacggatctccgaagcttacgatgttctctctgatcctcagaaacgtcagatctacgatctttacggcgaggaaggtcttaaatctggcaaaatccctaattcttcttcatcggaggcttcttcttcttcttcttcttcctcctcgagatatcctcactttcatcagcacaggccgcagcatccgcctaacgcttcgtcgtttcgttttaaccctagagacgcggaggacatctatgctgagttctttggatctgaaaatggtggaggaagcaataatgctggtgggagaggaaacagagcgtttaggaatggtcatttcaacaccggtggtgccaatggttatagcggtgagatgaggaaagttccagctatggagaatccattgcctgtgagtttggaggatctgtataaaggtgtggtgaagaagatgcggataactagaaatgtctatgatgcttctgggagaatgatggtagaggcggagatattgcctatagaaataaaacctggttggaagaaaggaacaaagctgacatttcctaagaaaggcaatgaagagcctggaatcataccagcagatattgtattcgtggttgaagagaagccacatcctgtttacaagagagatgggaacgatcttttggtcagtcaggagataactctacttgaagctttaactggtaagactgtcaatctgatcacgcttgatggaaggactctcatgatcccattgacggagatcattaaacctgatcatgagattgttgttccaaacgaaggaatgcctatctctaaagaacctggaaaaaagggtaacttgaaactgaagcttagtgtgaaatacccgtcgaggctcacatcggatcagaaattcgagctaaagagagttcttggtggggtctcatgaggaagtcattgatgaatgtagatagcaaaagtagaggagatgatagattgtgaatggtaggagggattcttctaaggaggcttggatttgagagccgaagaaccaacacaagctttgcttctgtctttttacttctcttgtttgaaattagacctttttcccctttgtttaattatttcattgatttgatttgatttcgctgccttctaatgtttagagagtgtgtactccaaggtatgctttgttacctatttatcttatttgataaaaatttct

SEQ ID NO: 44747 - protein, 350 aa, Arabidopsis thaliana
  peptide (1)..(350): Ceres Seq. ID no. 12489030
MGVDYYNILKVNHNATEDDLKKAYKRLAMIWHPDKNPSTRRDEAEAKFKRISEAYDVLSDPQKRQIYDLYGEEGLKSGKIPNSSSSEASSSSSSSSSRYPHFHQHRPQHPPNASSFRFNPRDAEDIYAEFFGSENGGGSNNAGGRGNRAFRNGHFNTGGANGYSGEMRKVPAMENPLPVSLEDLYKGVVKKMRITRNVYDASGRMMVEAEILPIEIKPGWKKGTKLTFPKKGNEEPGIIPADIVFVVEEKPHPVYKRDGNDLLVSQEITLLEALTGKTVNLITLDGRTLMIPLTEIIKPDHEIVVPNEGMPISKEPGKKGNLKLKLSVKYPSRLTSDQKFELKRVLGGVS

SEQ ID NO: 44748 - protein, 322 aa, Arabidopsis thaliana
  peptide (1)..(322): Ceres Seq. ID no. 12489031
MIWHPDKNPSTRRDEAEAKFKRISEAYDVLSDPQKRQIYDLYGEEGLKSGKIPNSSSSEASSSSSSSSSRYPHFHQHRPQHPPNASSFRFNPRDAEDIYAEFFGSENGGGSNNAGGRGNRAFRNGHFNTGGANGYSGEMRKVPAMENPLPVSLEDLYKGVVKKMRITRNVYDASGRMMVEAEILPIEIKPGWKKGTKLTFPKKGNEEPGIIPADIVFVVEEKPHPVYKRDGNDLLVSQEITLLEALTGKTVNLITLDGRTLMIPLTEIIKPDHEIVVPNEGMPISKEPGKKGNLKLKLSVKYPSRLTSDQKFELKRVLGGVS

SEQ ID NO: 44749 - protein, 184 aa, Arabidopsis thaliana
  peptide (1)..(184): Ceres Seq. ID no. 12489032
MRKVPAMENPLPVSLEDLYKGVVKKMRITRNVYDASGRMMVEAEILPIEIKPGWKKGTKLTFPKKGNEEPGIIPADIVFVVEEKPHPVYKRDGNDLLVSQEITLLEALTGKTVNLITLDGRTLMIPLTEIIKPDHEIVVPNEGMPISKEPGKKGNLKLKLSVKYPSRLTSDQKFELKRVLGGVS

SEQ ID NO: 44750 - DNA, 1547 bp, Arabidopsis thaliana
  misc_feature (1)..(1547): Ceres Seq. ID no. 13509870
  misc_feature (1)..(1547): Ortholog of  Ceres SEQ ID NO 15178100 as cited in SEQ ID NO 52676
  misc_feature (1)..(1547): Ortholog of  Ceres SEQ ID NO 15224811 as cited in SEQ ID NO 0
  misc_feature (1)..(1547): Ortholog of  Ceres SEQ ID NO 15226156 as cited in SEQ ID NO 0
atgagctcgtcgtctaaaattgattcagagaagccagttatggtttccgagtcactattttctaccaagactcctatcaaaaccgttaaaaggcagatcttttcttcgtccccaaaacctgaatctgttataaaattgcccgaaaggttcgagattttggaggaatttttcaatggtttggatactgcaattaggctgcttaaattaaagggttcgtcaacgacatacgctaatatatgtcccaagatcgagtatcttactaatcggatcttctcgtatgatcatttggctcagatgaagcatatttatccggaagctattgaactaaagagagttttgaagtttgttgaagacacttgttgtatgaaacctaggcttcatattaaattaaataccgatgcaattgtagttgaggataccatttgtggaactaaatacatggaacttagaaaggtgtttcactcaaagcttgtagattttcgcaaagctcatcctaaggacgaaattccgaaagaactgcttcctgaaccattcaattctcctcaaagggatagttattcaggtatagtaagcgtaggcttaggagaacctaaacttgaagttggagggtttgatgttcatatggaggagatagagcaagaagaacaagatgttaacaaagtcattcctgattctactttgtcacacatagaatcaagaatagttgaaaccccagtcaaagatttatccactccctccaaagacttgtccacgccaatccggctcatgagtgctacaccgacgttgcagctatctaaaagatgtattgagttgactccagagggtggtgatgataactctcttagatcaacaaatagtctagcaaggggtccatctcgcagtctgaattttgatacttttgaggaagatgcaattgagaaagatgatattggtaacgaatctgatgataaaggaatcaactatgaagaagatggccttctccagtcagtaaaaggtccatctcgcagtttgaattttgacactcttgaggaagaaacaattgtgaaagatgacattagtaacgaatctggtgatgaaaaaagcaactatgaaggtgataatgcttctgatgatgatagcctccttcagtcaatgatagagagaccaaagactgaacccgagaagcacaatttgccacagcttgttaatttgattcatagagtgtttcactcaacaaatcggacagtcatcacgaaggaggagcttctttacaagattattgcaaaccaaatcaatataactgatagaagggaagtggaagaacaattaagtctgatgttgcaattggtcccggattggatatctgaaacaaaagcatcttctggggatcttcttgttcgcatcaataaaatgtcgactgccgaaacagtacgtgcaagacttgaagaagcaacttcacatgacatttcacttatctactgaaaaaccataaagctgaaacttttttttgtgtgttttcatcctcttcaccaattcaattatcattattcttcacaaatatcttcttt

SEQ ID NO: 44751 - protein, 486 aa, Arabidopsis thaliana
  peptide (1)..(486): Ceres Seq. ID no. 13509871
MSSSSKIDSEKPVMVSESLFSTKTPIKTVKRQIFSSSPKPESVIKLPERFEILEEFFNGLDTAIRLLKLKGSSTTYANICPKIEYLTNRIFSYDHLAQMKHIYPEAIELKRVLKFVEDTCCMKPRLHIKLNTDAIVVEDTICGTKYMELRKVFHSKLVDFRKAHPKDEIPKELLPEPFNSPQRDSYSGIVSVGLGEPKLEVGGFDVHMEEIEQEEQDVNKVIPDSTLSHIESRIVETPVKDLSTPSKDLSTPIRLMSATPTLQLSKRCIELTPEGGDDNSLRSTNSLARGPSRSLNFDTFEEDAIEKDDIGNESDDKGINYEEDGLLQSVKGPSRSLNFDTLEEETIVKDDISNESGDEKSNYEGDNASDDDSLLQSMIERPKTEPEKHNLPQLVNLIHRVFHSTNRTVITKEELLYKIIANQINITDRREVEEQLSLMLQLVPDWISETKASSGDLLVRINKMSTAETVRARLEEATSHDISLIY

SEQ ID NO: 44752 - protein, 473 aa, Arabidopsis thaliana
  peptide (1)..(473): Ceres Seq. ID no. 13509872
MVSESLFSTKTPIKTVKRQIFSSSPKPESVIKLPERFEILEEFFNGLDTAIRLLKLKGSSTTYANICPKIEYLTNRIFSYDHLAQMKHIYPEAIELKRVLKFVEDTCCMKPRLHIKLNTDAIVVEDTICGTKYMELRKVFHSKLVDFRKAHPKDEIPKELLPEPFNSPQRDSYSGIVSVGLGEPKLEVGGFDVHMEEIEQEEQDVNKVIPDSTLSHIESRIVETPVKDLSTPSKDLSTPIRLMSATPTLQLSKRCIELTPEGGDDNSLRSTNSLARGPSRSLNFDTFEEDAIEKDDIGNESDDKGINYEEDGLLQSVKGPSRSLNFDTLEEETIVKDDISNESGDEKSNYEGDNASDDDSLLQSMIERPKTEPEKHNLPQLVNLIHRVFHSTNRTVITKEELLYKIIANQINITDRREVEEQLSLMLQLVPDWISETKASSGDLLVRINKMSTAETVRARLEEATSHDISLIY

SEQ ID NO: 44753 - protein, 388 aa, Arabidopsis thaliana
  peptide (1)..(388): Ceres Seq. ID no. 13509873
MKHIYPEAIELKRVLKFVEDTCCMKPRLHIKLNTDAIVVEDTICGTKYMELRKVFHSKLVDFRKAHPKDEIPKELLPEPFNSPQRDSYSGIVSVGLGEPKLEVGGFDVHMEEIEQEEQDVNKVIPDSTLSHIESRIVETPVKDLSTPSKDLSTPIRLMSATPTLQLSKRCIELTPEGGDDNSLRSTNSLARGPSRSLNFDTFEEDAIEKDDIGNESDDKGINYEEDGLLQSVKGPSRSLNFDTLEEETIVKDDISNESGDEKSNYEGDNASDDDSLLQSMIERPKTEPEKHNLPQLVNLIHRVFHSTNRTVITKEELLYKIIANQINITDRREVEEQLSLMLQLVPDWISETKASSGDLLVRINKMSTAETVRARLEEATSHDISLIY

SEQ ID NO: 44754 - DNA, 2500 bp, Arabidopsis thaliana
  misc_feature (1)..(2500): Ceres Seq. ID no. 13503824
  misc_feature (1)..(2500): Ortholog of  Ceres SEQ ID NO 13597044 as cited in SEQ ID NO 63531
acagtcacggagatagatagtaagagagagctatggcggaggagcacttcgacgttctgactaaatccggtgagaagaccggtgtgtccaaacccaggggagaggttcacagagatggagattaccatcgtgctgttcatgtctggatttttgtggagactactcaacagctacttctccaacttcgatctgatgataaagattcttggcctggtcaatgggacatctctagtgctggccatatatcagctggtgatacatcgcttctatctgcacagcgggagcttgaggaagagcttggcgtaaaactcccaaaggatgcatttgaaaagatcttcgtttttctgcaggaatgtgtcacaaacgatggcaaattcataaataatgagttcaatgatgtgtatcttgttactattctgcatccaatcccattagaagcctttactcttcaaaaagaggaagtctctgctgtaaagtacgtaccttacgaagaatacagaaactttctgtctaaggaagatcctgcttatgtgccatatgatgttaatggagagtatggaaaactatttgacataatcagacagaggtgccaagtgaacactgaggcccgtagtttatctctgcagaagcaactccagagatattctccagtcaccctcgaagccaagttgacagaactttctgaagcagatcagaaagcgttgggtctaattgtgaaggctgcaaaaattatggacgatatattctatgagcaggtttggaacagcaatccagccctaagagattggctgaaggatcatgccaatgcatcaaaactggacaaactaaaatgggattacttcacgatcaacaaaagtccatggtcgtctcttgatgaaaatgaagcattcttgagtactgcggattcagctgtaaagttgcttcctggagcaacaaaagccatagctggctggaagggtcttgaatatagagcagcctttccagtgactaaaccacctggtgccaatttctatcctcccgatatggataaaatggagttcaccttatggctcaatggccttacggaagagcaaaagcatgctgcaacaggatttttcagtgttataaaaaggcgaagtgaagctaatttagatgcttctgatcatcttgccagcagcacaaagaagttaccagactctaattccgatctgtatagtattccttattcagagatatatcgacctttcctcaagaaagcttctgaattcttgcagaaagctggggacttggtcagttcgccaagtttgaagaagctactgcacagcaaagctgaagccttcctttcaaatgagtattatgagtcagacatcgcatggatggacttggattcaaagttagatattaccattggtccatatgagacgtacgaggatgaaatctttgggtataaggctacatttgaaaccttcatcggtattcgagatgataaagccacagctgatctgaaactctttggtgacaatctaaagctattggaagataatctcccgcttgagagtgtatacaaatcgacagatgtatctgctgctcctattcgggtcatccagttaatttacaattccggggatgtgaagggtcctcagactgttgcttacaatttgccaaacgatgaaaaaatcgtgaaggatagaggaacatcaatggttatgctcaagaacgtccaagaggcaaagtttgaacatattttaaagcctatagctgaaatcaccatcagcaaggaacagagaggattagttgattttgattctttcttcactcacaccatttgccatgaatgttgccatggcattggtccccataccataacccttcctggtggtcaaacctcaacagtgagaaaggaactacaagaagtccattctgcaatggaagaagcaaaggcagatatagttggtctttgggcactgaagtttctcatcactaaggggttgctttcaaagagtatggtggagagtatgtatgtttcgttcctagctggttgctttagatcgatccggtttggtctcacagaagctcatgggaaagggcaagccttgcaattcaactatttatatgaaaaaggagccttcgtgttccacgaggactctacattctcggttgatttcgctaagatcgaaggtgcagttgagagcctgagccatgagatactaactattcaaggaaaaggtgacaaaaacgcagcaacattgcttctaaataagtactgcactatcaccggaccattgaaaaccgctctggagaatctcgaacgcgttaaggtaccggtggatatatctccgacatttccattagcagaagcattgatgaactgaggaaagtttcagtttcagcaagactctggttttaacttttaataaataaataaaactcagatgatccatcatcataaaccaaatttgggatttaaaagagttatctgaatggtgttgtgttcttatcataataaagttgctacctttac

SEQ ID NO: 44755 - protein, 772 aa, Arabidopsis thaliana
  peptide (1)..(772): Ceres Seq. ID no. 13503825
MAEEHFDVLTKSGEKTGVSKPRGEVHRDGDYHRAVHVWIFVETTQQLLLQLRSDDKDSWPGQWDISSAGHISAGDTSLLSAQRELEEELGVKLPKDAFEKIFVFLQECVTNDGKFINNEFNDVYLVTILHPIPLEAFTLQKEEVSAVKYVPYEEYRNFLSKEDPAYVPYDVNGEYGKLFDIIRQRCQVNTEARSLSLQKQLQRYSPVTLEAKLTELSEADQKALGLIVKAAKIMDDIFYEQVWNSNPALRDWLKDHANASKLDKLKWDYFTINKSPWSSLDENEAFLSTADSAVKLLPGATKAIAGWKGLEYRAAFPVTKPPGANFYPPDMDKMEFTLWLNGLTEEQKHAATGFFSVIKRRSEANLDASDHLASSTKKLPDSNSDLYSIPYSEIYRPFLKKASEFLQKAGDLVSSPSLKKLLHSKAEAFLSNEYYESDIAWMDLDSKLDITIGPYETYEDEIFGYKATFETFIGIRDDKATADLKLFGDNLKLLEDNLPLESVYKSTDVSAAPIRVIQLIYNSGDVKGPQTVAYNLPNDEKIVKDRGTSMVMLKNVQEAKFEHILKPIAEITISKEQRGLVDFDSFFTHTICHECCHGIGPHTITLPGGQTSTVRKELQEVHSAMEEAKADIVGLWALKFLITKGLLSKSMVESMYVSFLAGCFRSIRFGLTEAHGKGQALQFNYLYEKGAFVFHEDSTFSVDFAKIEGAVESLSHEILTIQGKGDKNAATLLLNKYCTITGPLKTALENLERVKVPVDISPTFPLAEALMN

SEQ ID NO: 44756 - protein, 539 aa, Arabidopsis thaliana
  peptide (1)..(539): Ceres Seq. ID no. 13503826
MDDIFYEQVWNSNPALRDWLKDHANASKLDKLKWDYFTINKSPWSSLDENEAFLSTADSAVKLLPGATKAIAGWKGLEYRAAFPVTKPPGANFYPPDMDKMEFTLWLNGLTEEQKHAATGFFSVIKRRSEANLDASDHLASSTKKLPDSNSDLYSIPYSEIYRPFLKKASEFLQKAGDLVSSPSLKKLLHSKAEAFLSNEYYESDIAWMDLDSKLDITIGPYETYEDEIFGYKATFETFIGIRDDKATADLKLFGDNLKLLEDNLPLESVYKSTDVSAAPIRVIQLIYNSGDVKGPQTVAYNLPNDEKIVKDRGTSMVMLKNVQEAKFEHILKPIAEITISKEQRGLVDFDSFFTHTICHECCHGIGPHTITLPGGQTSTVRKELQEVHSAMEEAKADIVGLWALKFLITKGLLSKSMVESMYVSFLAGCFRSIRFGLTEAHGKGQALQFNYLYEKGAFVFHEDSTFSVDFAKIEGAVESLSHEILTIQGKGDKNAATLLLNKYCTITGPLKTALENLERVKVPVDISPTFPLAEALMN

SEQ ID NO: 44757 - protein, 442 aa, Arabidopsis thaliana
  peptide (1)..(442): Ceres Seq. ID no. 13503827
MDKMEFTLWLNGLTEEQKHAATGFFSVIKRRSEANLDASDHLASSTKKLPDSNSDLYSIPYSEIYRPFLKKASEFLQKAGDLVSSPSLKKLLHSKAEAFLSNEYYESDIAWMDLDSKLDITIGPYETYEDEIFGYKATFETFIGIRDDKATADLKLFGDNLKLLEDNLPLESVYKSTDVSAAPIRVIQLIYNSGDVKGPQTVAYNLPNDEKIVKDRGTSMVMLKNVQEAKFEHILKPIAEITISKEQRGLVDFDSFFTHTICHECCHGIGPHTITLPGGQTSTVRKELQEVHSAMEEAKADIVGLWALKFLITKGLLSKSMVESMYVSFLAGCFRSIRFGLTEAHGKGQALQFNYLYEKGAFVFHEDSTFSVDFAKIEGAVESLSHEILTIQGKGDKNAATLLLNKYCTITGPLKTALENLERVKVPVDISPTFPLAEALMN

SEQ ID NO: 44758 - DNA, 2045 bp, Arabidopsis thaliana
  misc_feature (1)..(2045): Ceres Seq. ID no. 13509768
  misc_feature (1)..(2045): Ortholog of  Ceres SEQ ID NO 14315275 as cited in SEQ ID NO 52556
  misc_feature (1)..(2045): Ortholog of  Ceres SEQ ID NO 13597260 as cited in SEQ ID NO 63885
ctctcattttcataattccattttcaggattgtctctcaatcttttattcttctcattcaccggtaatggcaaaagtctctgggaggagcaagaaaacaatcgttgacgatgaaatcagcgataaaacagcgtctgcgtctgagtctgcgtccattgccttaacatccaaacgcaaacgtaagtcgccgcctcgaaacgctcctcttcaacgcagctccccttacagaggcgtcacaaggcatagatggactgggagatacgaagcgcatttgtgggataagaacagctggaacgatacacagaccaagaaaggacgtcaagtttatctaggggcttacgacgaagaagaagcagcagcacgtgcctacgacttagcagcattgaagtactggggacgagacacactcttgaacttccctttgccgagttatgacgaagacgtcaaagaaatggaaggccaatccaagggagagtatattggatcattgagaagaaaaagtagtggattttctcgcggtgtatcaaaatacagaggcgttgcaaggcatcaccataatgggagatgggaagctagaattggaagggtgtttggtaataaatatctatatcttggaacatacggtatttcattccattatccttactttatagtaatatttttatgaaatgtgtaaattcatactttagtacaatccagttcctagcaaatccaaatcttgaaatttgggattagtataaaatgggagttattctctgttctcctgttaagtgggactctagtagacgatgacatggtatcatatcttatactacacatataaaatagaaatgatattaaaaatggtagggaacaaagaaggtcacgttatgcatgaatgtagtcaaacgaacaactctttaagttttttttttcttgacaacaactccaagaaaatttaagtcacacacatgatagatctcatagaaaattcaaaataatttgtactatttatcaataattatactatatgcttgatatatggacttattagtagtgtttatgaacctttaagagggtaatcaaatcttgttggttgggaactagatcaccaatcccatctacttactcaagctatttattactatattgttttcaactttttaagttactcatccaacttttattgacaaattcattccctttacatattatatctctcccaattattactatttttgtcttatgtatctcacacataaaattaaacacgttagcaaaattaaatccgaattattgatacgacgatgatattaatacaaattattaggtcatgtatcctgatctttgaaaaagattatacatgcaaagacaatgtttatttataaatagatcagatgacatgcatatttctgtattgatcacatgaacatgcaatatgcatactatattaggcaaatacgtgatagaaatccactttatacaaattgggaaagttgttctaagaaaaaggaaaaaaagaaaaatccatatttatacaaatgggatgaaagttctatgaaaatatggtatagtaccaaagtttttttgtttgtaacattttaaaccctgtgcacgtgcagccacgcaagaagaagcagcaatcgcctacgacatcgcggcaatagagtaccgtggacttaacgccgttaccaatttcgacgtcagccgttatctaaaccctaacgccgccgcggataaagccgattccgattctaagcccattcgaagccctagtcgcgagcccgaatcgtcggatgataacaaatctccgaaatcagaggaagtaatcgaaccatctacatcgccggaagtgattccaactcgccggagcttccccgacgatatccagacgtattttgggtgtcaagattccggcaagttagcgactgaggaagacgtaatattcgattgtttcaattcttatataaatcctggcttctataacgagtttgattatggaccttaatcgtattttctacaagttttgttttgattatctacacaatacatcaaatattatttctt

SEQ ID NO: 44759 - protein, 199 aa, Arabidopsis thaliana
  peptide (1)..(199): Ceres Seq. ID no. 13509769
MAKVSGRSKKTIVDDEISDKTASASESASIALTSKRKRKSPPRNAPLQRSSPYRGVTRHRWTGRYEAHLWDKNSWNDTQTKKGRQVYLGAYDEEEAAARAYDLAALKYWGRDTLLNFPLPSYDEDVKEMEGQSKGEYIGSLRRKSSGFSRGVSKYRGVARHHHNGRWEARIGRVFGNKYLYLGTYGISFHYPYFIVIFL

SEQ ID NO: 44760 - DNA, 1440 bp, Arabidopsis thaliana
  misc_feature (1)..(1440): Ceres Seq. ID no. 13509005
  misc_feature (1)..(1440): Ortholog of  Ceres SEQ ID NO 15226389 as cited in SEQ ID NO 52992
  misc_feature (1)..(1440): Ortholog of  Ceres SEQ ID NO 14312152 as cited in SEQ ID NO 57197
  misc_feature (1)..(1440): Ortholog of  Ceres SEQ ID NO 13662335 as cited in SEQ ID NO 68440
gctaacttattcaaaccaattcacatatctcctaaatctcaacgactgcactttgaagctttttgtttagattcgttcgtcgtttccattctttaagtctacttctttttttcatattttcgagcgggtcaaatggatcaagagatagagattccttccttcttcctttgtccaatctctctagatatcatgaaagatccggtgatagtttccaccggaataacctacgaccgagaaagcatcgagaagtggctcttttccggtaagaaaaactcatgtccagtcaccaaacaagtcataaccgaaactgatcttaccccaaaccacactcttcgccgtttgattcaatcttggtgtaccctcaacgcatcatatggtatagagaggatcccaactccaaaacctccgatctgtaaatcggagatcgaaaagcttatcaaagagtcgtcatcttcgcatctaaaccaagtcaaatgcctcaaacgacttcgtcaaatagtatctgagaatacaaccaacaaacggtgcttagaagccgcagaagttccggagtttttggcaaatatcgtaagcaactctgtagatacgtataactctccttcttcttcactttcttcttcgaatctcaacgacatgtgtcagtcaaacatgttggagaatcgatttgattcttcaagaagcttgatggacgaagccctaagcgtactctaccatcttgacacatcggagacagccctcaagagtcttttaaacaacaagaaaggaacaaatcttgtgaaaacgttgacgaagattatgcaacgtgggatctacgagtcaagagcctatgcggctttgcttctcaagaagctcctggaagttgcggatccaatgcagatcatattgttggaacgagaacttttcggtgaggtgattcaaatcttgcacgaccagatctctcacaaggcgacaagatcagcaatgcaaatcttggtgatcacatgtccatggggaaggaatagacacaaggcagtggaaggtggaacaatctcgatgataatcgagcttttaatggacgatactttctcatcagagagaaggaattcagagatggcgatggtggttcttgatatgttatgtcagtgcgcagaaggaagagctgagttcttgaatcacggtgccgctattgcggttgtgtctaagaagatattgagggtctcacaaataactagtgaaagggcagttagggttttgctttcggttgggaggttctgcgcgacaccctctttgttgcaggagatgttgcaattgggagttgtagcaaagctgtgtctggtacttcaagttagctgtggtaacaagactaaagaaaaggctaaagaattgcttaagcttcacgctagggtttggagggaatcaccttgtgtcccaagaaatttgtatgattcgtatcctgcttga

SEQ ID NO: 44761 - protein, 435 aa, Arabidopsis thaliana
  peptide (1)..(435): Ceres Seq. ID no. 13509006
MDQEIEIPSFFLCPISLDIMKDPVIVSTGITYDRESIEKWLFSGKKNSCPVTKQVITETDLTPNHTLRRLIQSWCTLNASYGIERIPTPKPPICKSEIEKLIKESSSSHLNQVKCLKRLRQIVSENTTNKRCLEAAEVPEFLANIVSNSVDTYNSPSSSLSSSNLNDMCQSNMLENRFDSSRSLMDEALSVLYHLDTSETALKSLLNNKKGTNLVKTLTKIMQRGIYESRAYAALLLKKLLEVADPMQIILLERELFGEVIQILHDQISHKATRSAMQILVITCPWGRNRHKAVEGGTISMIIELLMDDTFSSERRNSEMAMVVLDMLCQCAEGRAEFLNHGAAIAVVSKKILRVSQITSERAVRVLLSVGRFCATPSLLQEMLQLGVVAKLCLVLQVSCGNKTKEKAKELLKLHARVWRESPCVPRNLYDSYPA

SEQ ID NO: 44762 - protein, 416 aa, Arabidopsis thaliana
  peptide (1)..(416): Ceres Seq. ID no. 13509007
MKDPVIVSTGITYDRESIEKWLFSGKKNSCPVTKQVITETDLTPNHTLRRLIQSWCTLNASYGIERIPTPKPPICKSEIEKLIKESSSSHLNQVKCLKRLRQIVSENTTNKRCLEAAEVPEFLANIVSNSVDTYNSPSSSLSSSNLNDMCQSNMLENRFDSSRSLMDEALSVLYHLDTSETALKSLLNNKKGTNLVKTLTKIMQRGIYESRAYAALLLKKLLEVADPMQIILLERELFGEVIQILHDQISHKATRSAMQILVITCPWGRNRHKAVEGGTISMIIELLMDDTFSSERRNSEMAMVVLDMLCQCAEGRAEFLNHGAAIAVVSKKILRVSQITSERAVRVLLSVGRFCATPSLLQEMLQLGVVAKLCLVLQVSCGNKTKEKAKELLKLHARVWRESPCVPRNLYDSYPA

SEQ ID NO: 44763 - protein, 268 aa, Arabidopsis thaliana
  peptide (1)..(268): Ceres Seq. ID no. 13509008
MCQSNMLENRFDSSRSLMDEALSVLYHLDTSETALKSLLNNKKGTNLVKTLTKIMQRGIYESRAYAALLLKKLLEVADPMQIILLERELFGEVIQILHDQISHKATRSAMQILVITCPWGRNRHKAVEGGTISMIIELLMDDTFSSERRNSEMAMVVLDMLCQCAEGRAEFLNHGAAIAVVSKKILRVSQITSERAVRVLLSVGRFCATPSLLQEMLQLGVVAKLCLVLQVSCGNKTKEKAKELLKLHARVWRESPCVPRNLYDSYPA

SEQ ID NO: 44764 - DNA, 930 bp, Arabidopsis thaliana
  misc_feature (1)..(930): Ceres Seq. ID no. 13503816
  misc_feature (1)..(930): Ortholog of  Ceres SEQ ID NO 13661928 as cited in SEQ ID NO 61155
atcttcacggcataataagaccaagaagaaaaagaaaacattaatttcaaccaaagcaaaacagagagaaaaaaatagagagagtgaatcaatttcggtggagaaagagaagaatggagcagccgtacgtgtacgcatacccgcaaggtagtggcccctcgggagctccgactccacaagccggaggagtggtagtggatccaaagtactgcgctccttaccctatagatatggcgatcgtacggaagatgatgtcgttaacggacggcaatttcgtgataacggacgtcaacggaaacctgctgttcaaggtgaaggaaccggtgtttggtctccacgacaagagggtcttgctggatggttctggtactccggtcgtcactttgagagaaaagatggtgagcatgcatgacaggtggcaagtgtttagaggagggagtacggatcagcgtgatctgctgtacacggtgaaaagatcgtcgatgcttcagctaaagaccaaactcgatgtgtttttgggacacaacaaagatgagaagagatgtgatttcagagtcaaagggagttggctcgagcgttcttgtgttgtttacgccggcgaatctgacgccattgttgcccaaatgcacaggaagcacacggtgcagagcgtattcttgggaaaagacaacttctcggtgactgtttatccaaacgtcgattatgccttcatcgcctctctcgtcgtcattctcgatgacgtcaaccgcgaagaccgcgccgcctgagagaagaagatatcaccttctcttcttcttaattatccatccatcaataatgtgctattcatcaaccgttaaaactttgtgtgatcatctcagttgtaaaataatcaaatcattgtgcctgtccttgttgtttaatgactacatttataactgttttttcatt

SEQ ID NO: 44765 - protein, 217 aa, Arabidopsis thaliana
  peptide (1)..(217): Ceres Seq. ID no. 13503817
MEQPYVYAYPQGSGPSGAPTPQAGGVVVDPKYCAPYPIDMAIVRKMMSLTDGNFVITDVNGNLLFKVKEPVFGLHDKRVLLDGSGTPVVTLREKMVSMHDRWQVFRGGSTDQRDLLYTVKRSSMLQLKTKLDVFLGHNKDEKRCDFRVKGSWLERSCVVYAGESDAIVAQMHRKHTVQSVFLGKDNFSVTVYPNVDYAFIASLVVILDDVNREDRAA

SEQ ID NO: 44766 - protein, 178 aa, Arabidopsis thaliana
  peptide (1)..(178): Ceres Seq. ID no. 13503818
MAIVRKMMSLTDGNFVITDVNGNLLFKVKEPVFGLHDKRVLLDGSGTPVVTLREKMVSMHDRWQVFRGGSTDQRDLLYTVKRSSMLQLKTKLDVFLGHNKDEKRCDFRVKGSWLERSCVVYAGESDAIVAQMHRKHTVQSVFLGKDNFSVTVYPNVDYAFIASLVVILDDVNREDRAA

SEQ ID NO: 44767 - protein, 172 aa, Arabidopsis thaliana
  peptide (1)..(172): Ceres Seq. ID no. 13503819
MMSLTDGNFVITDVNGNLLFKVKEPVFGLHDKRVLLDGSGTPVVTLREKMVSMHDRWQVFRGGSTDQRDLLYTVKRSSMLQLKTKLDVFLGHNKDEKRCDFRVKGSWLERSCVVYAGESDAIVAQMHRKHTVQSVFLGKDNFSVTVYPNVDYAFIASLVVILDDVNREDRAA

SEQ ID NO: 44768 - DNA, 1000 bp, Arabidopsis thaliana
  misc_feature (1)..(1000): Ceres Seq. ID no. 13580579
  misc_feature (1)..(1000): Ortholog of  Ceres SEQ ID NO 13595158 as cited in SEQ ID NO 51008
  misc_feature (1)..(1000): Ortholog of  Ceres SEQ ID NO 13581682 as cited in SEQ ID NO 57913
  misc_feature (1)..(1000): Ortholog of  Ceres SEQ ID NO 14304144 as cited in SEQ ID NO 59152
  misc_feature (1)..(1000): Ortholog of  Ceres SEQ ID NO 13662050 as cited in SEQ ID NO 61580
  misc_feature (1)..(1000): Ortholog of  Ceres SEQ ID NO 14309388 as cited in SEQ ID NO 0
atttaaaacccttatttaaattatatagaaaaaaaaaaggtcaagtagtcttctattatttactagtataacctctagaaacatcatcaccacattcctggctaatatccttcatctagaacaattattaacgaatcaaaataccaaaaaacaaagcacctcattgactattaaattagtactaatacattaattaagttattattcctatatataaatctcacccattctccaccttatcatcacaatccaaaactctctctctctctctctctctgtctcttgtcttatcatttatctctctaacggcgaggcaatgggttttccggtgggatattctgagctacttctcccaaaaatctttttctacttgttatctttcttaggtttgatacgtaaactcatctccacaatgttcaagatcattggtctaccagatttcttagaacctgaaccggtttcaacctcatggcccgacccaccacccacgttgaccaaacctgactcagcagcaatactagccggagagatgttaccggttgttcgattctcggatataaaccgaccggaatccgagtgttgcgcagtgtgtctctacgatttcgagaacgacgacgagatccgacggctgacgaattgtcgacatatatttcatcggggatgtttggaccgttggatgatgggttataatcagatgacgtgtccactttgtcgtacacagtttatacctgatcatcttcaactggagtttaatcaaaggctctggtctcaatcttctgctgtttcttctcaacttcttgatgaatcatcatcttaggacgtattaaatctttgtccaaacaaaaaaaaaagacatattaaatcctttttttttggtactttcattgggaattgggtttggtgtgagatcgatgtaaatattaaacaaaaaaaaaaaaggtagtggttacaggttaatgaaaaaagaaagaagaagaaaatttgtacttatccatccctc

SEQ ID NO: 44769 - protein, 166 aa, Arabidopsis thaliana; identical to SEQ ID NO: 25098
  peptide (1)..(166): Ceres Seq. ID no. 13580580

SEQ ID NO: 44770 - protein, 134 aa, Arabidopsis thaliana; identical to SEQ ID NO: 25099
  peptide (1)..(134): Ceres Seq. ID no. 13580581

SEQ ID NO: 44771 - protein, 95 aa, Arabidopsis thaliana
  peptide (1)..(95): Ceres Seq. ID no. 13580582
MLPVVRFSDINRPESECCAVCLYDFENDDEIRRLTNCRHIFHRGCLDRWMMGYNQMTCPLCRTQFIPDHLQLEFNQRLWSQSSAVSSQLLDESSS

SEQ ID NO: 44772 - DNA, 805 bp, Arabidopsis thaliana
  misc_feature (1)..(805): Ceres Seq. ID no. 12489069
  misc_feature (1)..(805): Ortholog of  Ceres SEQ ID NO 13623012 as cited in SEQ ID NO 994
  misc_feature (1)..(805): Ortholog of  Ceres SEQ ID NO 15179471 as cited in SEQ ID NO 0
acacagcattatccaaaactcaaaattacagcgttgaaacagaaaccgatctcgtcgctgattctcttttcttcggatccttctagataatggctcgatctttctctcgttcactttctctatccaaaggccgtttcgccgccgcgtcatcctctctcctcccttcgtcgcaccttgtttcattccgatctcaatcttccgatcgtcggggagatctgtacgagattgatacctccgcggcttctcaatcgccgtcggatcctttaatacagaagctagaagacgccgttcaccggatttttgtgcgccgagctcagcctgattggctcccttttgttcctggtgcgtcttattgggtccctcctcctggatctggatctcagtctcatggaatcgctcagctcgttgtgaaactcgcgaatccgttaacacacgaagaatctttatctaccaattcttctcatggatggccttcctccgattatttccttaaaggtgttcaacctcaattgatggagaccaagaccgagacaacttcaaattccgagtctcactctgaggacgaggaagtgtaaaaatgacactgcttgtttgggctcttcaggatctcttgtcaagaccaagagctgccgaattcggacaaccaagagcaagtgaaaagacgtgaaatagaacgaccatatttctatacctgataccaaaatgtggaatatcgaataagactagtgttgtaggcttgtgtagcatgtcccgctgtttctcttttaaacagttgttgtatatatatatctctgtttccttgctc

SEQ ID NO: 44773 - protein, 161 aa, Arabidopsis thaliana
  peptide (1)..(161): Ceres Seq. ID no. 12489070
MARSFSRSLSLSKGRFAAASSSLLPSSHLVSFRSQSSDRRGDLYEIDTSAASQSPSDPLIQKLEDAVHRIFVRRAQPDWLPFVPGASYWVPPPGSGSQSHGIAQLVVKLANPLTHEESLSTNSSHGWPSSDYFLKGVQPQLMETKTETTSNSESHSEDEEV

SEQ ID NO: 44774 - DNA, 733 bp, Arabidopsis thaliana
  misc_feature (1)..(733): Ceres Seq. ID no. 13504686
  misc_feature (1)..(733): Ortholog of  Ceres SEQ ID NO 14303722 as cited in SEQ ID NO 63143
acaatcacagtaccaaaaaaaaatggcagccgccgcaccgccaccgccaccaacagcagcaccggaaccaaacatggtagcaccactaatttcaccaatcggccacccaatgttctcccggatccgtctggcaacaccgtccgatgtcccattcatccacaaactaattcaccaaatggcagtcttcgaacgtctcacgcatctcttctccgccaccgaatcaggtctcgcttcaacactcttcacctctcgtcctttccaatcattcacagtcttcctcttagaagtctctcgttctccatttccagcaaccatcacttcatcaccatctcccgatttcacaccgtttttcaaaacacataaccttgatctcccgattgatgatccggagagttacaatttctcgccggatatgttgaacgacgtcgttgtagctgggtttgttctgtttttcccgaattactctagctttttgtccaagcctggtttttacattgaggatatatttgtgagagagccttataggaggaaagggtttggtagcatgttgttgactgctgtggccaaacaagcggtgaagatgggttatggaagagtggaatgggttgttcttgattggaatgttaatgctatcaagttttatgagcagatgggtgctcagattctgcaggagtggagagtttgtagacttactggtgatgctcttgaagcttttgatcaggtcaacatctag

SEQ ID NO: 44775 - protein, 243 aa, Arabidopsis thaliana
  peptide (1)..(243): Ceres Seq. ID no. 13504687
QSQYQKKMAAAAPPPPPTAAPEPNMVAPLISPIGHPMFSRIRLATPSDVPFIHKLIHQMAVFERLTHLFSATESGLASTLFTSRPFQSFTVFLLEVSRSPFPATITSSPSPDFTPFFKTHNLDLPIDDPESYNFSPDMLNDVVVAGFVLFFPNYSSFLSKPGFYIEDIFVREPYRRKGFGSMLLTAVAKQAVKMGYGRVEWVVLDWNVNAIKFYEQMGAQILQEWRVCRLTGDALEAFDQVNI

SEQ ID NO: 44776 - protein, 236 aa, Arabidopsis thaliana
  peptide (1)..(236): Ceres Seq. ID no. 13504688
MAAAAPPPPPTAAPEPNMVAPLISPIGHPMFSRIRLATPSDVPFIHKLIHQMAVFERLTHLFSATESGLASTLFTSRPFQSFTVFLLEVSRSPFPATITSSPSPDFTPFFKTHNLDLPIDDPESYNFSPDMLNDVVVAGFVLFFPNYSSFLSKPGFYIEDIFVREPYRRKGFGSMLLTAVAKQAVKMGYGRVEWVVLDWNVNAIKFYEQMGAQILQEWRVCRLTGDALEAFDQVNI

SEQ ID NO: 44777 - protein, 219 aa, Arabidopsis thaliana
  peptide (1)..(219): Ceres Seq. ID no. 13504689
MVAPLISPIGHPMFSRIRLATPSDVPFIHKLIHQMAVFERLTHLFSATESGLASTLFTSRPFQSFTVFLLEVSRSPFPATITSSPSPDFTPFFKTHNLDLPIDDPESYNFSPDMLNDVVVAGFVLFFPNYSSFLSKPGFYIEDIFVREPYRRKGFGSMLLTAVAKQAVKMGYGRVEWVVLDWNVNAIKFYEQMGAQILQEWRVCRLTGDALEAFDQVNI

SEQ ID NO: 44778 - DNA, 2328 bp, Arabidopsis thaliana
  misc_feature (1)..(2328): Ceres Seq. ID no. 12455357
  misc_feature (1)..(2328): Ortholog of  Ceres SEQ ID NO 12616176 as cited in SEQ ID NO 63339
atcgctgttcttcagtctcgcttctttgtaaactgtaaaggatcaagcttttctattcagatcaaatccacttcactatacccttttttagtttcgttaacccagctcaaatccgagatgagatatcaacaatggcgattgatgcttcttcgaagctaccatcgttctcatcttccttatctatctccttgttctcaggtaacctccatttcatcgcgatctttctcttctttcattcaccctgggatcggagctttgcaacaaagtgaacaactttgtcccttacgatccccaatgacgagctctggcaacttagtgaaatcagtgggtcgaagcttctcgtccgagcctgcggttgaagagaaatcttctgctgaggctaccgtgattgatatttttagtagattgagtggtgaggatgagattaggaaggagttggaatcgagtggtgtagtgattagccaagatttagctttgaaggttttgagaaagctcgaatcaaaccctgatgttgccaaaagttttttccagtggattaaggaggcttctcctgaggaacttagctcgaagaactataacatgatgctgcggattctgggtggtaatggacttgttgatgagttttgggggttggttgatgtgatgaagaagaaagggcatggtttatcggctaatgttagagataaagtgggtgacaaatttcagaaagatgggctggagagtgatttgctgaggctgagaaagctttttacttcagattgtttagataattcggcggagaatgtttgcgatagggtgtgtaagattgtgatgaaggaagaatggggtgatgatgtagagaaacgggtaagagatttgaatgttgagtttaagagtgatttagtgaagatgattgtggaacgtcttgatgttgaacccaggaaagctttgttgttcttccggtggattgatgagtctgatctctttaagcatgatgagaaaacctataatgctatggctagggttttgggaaaagagaagtttcttgatagatttcagaacattgtagtagaaatgaggagtgctggttatgaagtggaaatagagacttatgttagagtttcaacgaggttctgccagactaaattgatcaaggaagctgttgacttgtttgagattgcaatggcaggtagtagtagtagtaacaaccccaccccacactgcttctgtttgttgctcaagaaaattgtcactgccaagattctagatatggatttgttttcaagagctgtgaaagtttataccaaaaatggtaatgctttgacggattccttgctgaaatctgtcttaaagtccttgagaagcgtggatagggttgaacagagcaatgagctgttgaaagaaatgaagagaggaggctatgttcctagtggtgatatgcagagcatgattgcatcaagtcttagtcgtaagggaaagaaggacgaagctgatgaatttgtagactttatggaatcatccggaaacaatctagatgacaaggcaatggcgtctcttgttgaagggtattgtgattccgggaatcttgatgaagctttagtgtgtttcgagaaaatggttggaaacacgggagtctcctatgctgattattcatttgagaagttggttcttgcttattgcaacaagaatcaagtaagagatgcatacaagcttttgagtgcacaagtaacgaaaaatcaactgaaacctcgtcatagcacatacaaaagcttggtgacgaatctgttgacgaagaagattgcaagggatggtgggtttgaagaagctttgagtcttctaccgataatgaaagatcacgggttccctcctttcattgaccctttcatgagttacttctcatcaactggaaaaagcactgaagctctcggttttttgaaggctatgacctcgaataactttccatatatatcagtggttctgcgtgtattcgaaactatgatgaagtctgcaagacacagtgaagcacaagatttactctctctgtgcccaaactatatccgtaataatccggatgttctagaactcttcaataccatgaaacccaacgaatctgctgtagaaaaacctttggctgcttctgcttagctccagttttagtttacattccttcaagtctttttggtttctgggcatttgattcaaataatttggccagaatatttcctgctgttcccttttgtttacatgtatcactcaccagtcaccagttaactttcttcatcaacctggtgcactggcaaaataattttaaggtactatgtttttttatattccacttgcttatcatct

SEQ ID NO: 44779 - protein, 707 aa, Arabidopsis thaliana
  peptide (1)..(707): Ceres Seq. ID no. 12455358
IAVLQSRFFVNCKGSSFSIQIKSTSLYPFLVSLTQLKSEMRYQQWRLMLLRSYHRSHLPYLSPCSQVTSISSRSFSSFIHPGIGALQQSEQLCPLRSPMTSSGNLVKSVGRSFSSEPAVEEKSSAEATVIDIFSRLSGEDEIRKELESSGVVISQDLALKVLRKLESNPDVAKSFFQWIKEASPEELSSKNYNMMLRILGGNGLVDEFWGLVDVMKKKGHGLSANVRDKVGDKFQKDGLESDLLRLRKLFTSDCLDNSAENVCDRVCKIVMKEEWGDDVEKRVRDLNVEFKSDLVKMIVERLDVEPRKALLFFRWIDESDLFKHDEKTYNAMARVLGKEKFLDRFQNIVVEMRSAGYEVEIETYVRVSTRFCQTKLIKEAVDLFEIAMAGSSSSNNPTPHCFCLLLKKIVTAKILDMDLFSRAVKVYTKNGNALTDSLLKSVLKSLRSVDRVEQSNELLKEMKRGGYVPSGDMQSMIASSLSRKGKKDEADEFVDFMESSGNNLDDKAMASLVEGYCDSGNLDEALVCFEKMVGNTGVSYADYSFEKLVLAYCNKNQVRDAYKLLSAQVTKNQLKPRHSTYKSLVTNLLTKKIARDGGFEEALSLLPIMKDHGFPPFIDPFMSYFSSTGKSTEALGFLKAMTSNNFPYISVVLRVFETMMKSARHSEAQDLLSLCPNYIRNNPDVLELFNTMKPNESAVEKPLAASA

SEQ ID NO: 44780 - protein, 668 aa, Arabidopsis thaliana
  peptide (1)..(668): Ceres Seq. ID no. 12455359
MRYQQWRLMLLRSYHRSHLPYLSPCSQVTSISSRSFSSFIHPGIGALQQSEQLCPLRSPMTSSGNLVKSVGRSFSSEPAVEEKSSAEATVIDIFSRLSGEDEIRKELESSGVVISQDLALKVLRKLESNPDVAKSFFQWIKEASPEELSSKNYNMMLRILGGNGLVDEFWGLVDVMKKKGHGLSANVRDKVGDKFQKDGLESDLLRLRKLFTSDCLDNSAENVCDRVCKIVMKEEWGDDVEKRVRDLNVEFKSDLVKMIVERLDVEPRKALLFFRWIDESDLFKHDEKTYNAMARVLGKEKFLDRFQNIVVEMRSAGYEVEIETYVRVSTRFCQTKLIKEAVDLFEIAMAGSSSSNNPTPHCFCLLLKKIVTAKILDMDLFSRAVKVYTKNGNALTDSLLKSVLKSLRSVDRVEQSNELLKEMKRGGYVPSGDMQSMIASSLSRKGKKDEADEFVDFMESSGNNLDDKAMASLVEGYCDSGNLDEALVCFEKMVGNTGVSYADYSFEKLVLAYCNKNQVRDAYKLLSAQVTKNQLKPRHSTYKSLVTNLLTKKIARDGGFEEALSLLPIMKDHGFPPFIDPFMSYFSSTGKSTEALGFLKAMTSNNFPYISVVLRVFETMMKSARHSEAQDLLSLCPNYIRNNPDVLELFNTMKPNESAVEKPLAASA

SEQ ID NO: 44781 - protein, 660 aa, Arabidopsis thaliana
  peptide (1)..(660): Ceres Seq. ID no. 12455360
MLLRSYHRSHLPYLSPCSQVTSISSRSFSSFIHPGIGALQQSEQLCPLRSPMTSSGNLVKSVGRSFSSEPAVEEKSSAEATVIDIFSRLSGEDEIRKELESSGVVISQDLALKVLRKLESNPDVAKSFFQWIKEASPEELSSKNYNMMLRILGGNGLVDEFWGLVDVMKKKGHGLSANVRDKVGDKFQKDGLESDLLRLRKLFTSDCLDNSAENVCDRVCKIVMKEEWGDDVEKRVRDLNVEFKSDLVKMIVERLDVEPRKALLFFRWIDESDLFKHDEKTYNAMARVLGKEKFLDRFQNIVVEMRSAGYEVEIETYVRVSTRFCQTKLIKEAVDLFEIAMAGSSSSNNPTPHCFCLLLKKIVTAKILDMDLFSRAVKVYTKNGNALTDSLLKSVLKSLRSVDRVEQSNELLKEMKRGGYVPSGDMQSMIASSLSRKGKKDEADEFVDFMESSGNNLDDKAMASLVEGYCDSGNLDEALVCFEKMVGNTGVSYADYSFEKLVLAYCNKNQVRDAYKLLSAQVTKNQLKPRHSTYKSLVTNLLTKKIARDGGFEEALSLLPIMKDHGFPPFIDPFMSYFSSTGKSTEALGFLKAMTSNNFPYISVVLRVFETMMKSARHSEAQDLLSLCPNYIRNNPDVLELFNTMKPNESAVEKPLAASA

SEQ ID NO: 44782 - DNA, 2204 bp, Arabidopsis thaliana
  misc_feature (1)..(2204): Ceres Seq. ID no. 12489344
  misc_feature (1)..(2204): Ortholog of  Ceres SEQ ID NO 15174879 as cited in SEQ ID NO 53786
  misc_feature (1)..(2204): Ortholog of  Ceres SEQ ID NO 14312351 as cited in SEQ ID NO 55278
  misc_feature (1)..(2204): Ortholog of  Ceres SEQ ID NO 13655640 as cited in SEQ ID NO 63844
  misc_feature (1)..(2204): Ortholog of  Ceres SEQ ID NO 13659840 as cited in SEQ ID NO 66970
  misc_feature (1)..(2204): Ortholog of  Ceres SEQ ID NO 13584744 as cited in SEQ ID NO 69137
atagattagagaaaaaaagcttcaagctttcatggaacatgtcagagttatcttcttctttgcttgtttcctaacgcttgctccatttcatgcctttgctcaggtagattcctatgagtttgatccagatttcaactgtgttgatcgtggcaacttcacggcgaacagcacttttgccgggaatctcaaccgccttgtctcctccctctcctcactcaaatcccaagcttatggcttctacaacctctcttctggagactcatctggagaaagagcttatgcaattggtctgtgtagaagagaagtcaaaagagatgattgtgtcagctgtattcagacagctgcaagaaacctcaccaagcagtgtccgctgacaaaacaagctgttgtatggtacacgcactgtatgtttcgttactcaaacaggacaatctacggaagaaaagaaacgaacccgactaaggcttttattgctggtgaagagatatcagcaaacagagatgactttgagcgtctgcagagaggactattggacagactcaaaggaattgcggctgctggtgggcctaataggaaatacgctcaaggaaacggttcagcttcggctgggtaccggagattctatggaactgtgcaatgtacgccagatttgtctgaacaggattgtaatgattgtttagtttttgggtttgagaatattccgagttgttgtgatgctgagattggtcttcggtggttttctcctagttgtaacttccggtttgagacgtggagattctacgagtttgatgccgacctagagccagatccacctgcaattcagcctgctgattcaccacaatcagctgcaagaactgagaggacaggaaagggcaaaggtggatctaaagtcattatcgcgatagtcatcccgatacttcttgttgcgttactcgcaatttgcctatgcttggtcttgaagtggaggaagaacaagtctggatataaaaacaaagttcttgggaaatcacctttgtcgggttcaattgccgaggatgagttctcgaacacagaatcactcttagttcattttgagactctaaagacagcaacagataacttttcttcagaaaacgaacttggacgtggtgggtttggttcagtttataagggtgtgttccctcaggggcaagaaatcgcggtgaagagattatcgggtaattctggacaaggagacaacgagttcaagaacgaaatattactacttgcaaagcttcaacataggaacttggtcaggcttataggtttctgcatacaaggagaagaaagactccttgtctatgagttcatcaagaacgctagtcttgaccaatttatcttcgatactgagaagcgtcaacttttggattgggtagtgcggtacaaaatgatcggaggaattgctagaggactcctttatcttcatgaagactctcgtttccggataattcatcgtgatcttaaagctagcaacattcttttggaccaagaaatgaatccgaaaatcgcagattttggattagctaaactctttgactcaggccaaaccatgacacatcgattcacaagcaggattgcaggaacttacggatatatggctccggaatacgcaatgcatggacaattctctgtgaaaacagatgttttcagcttcggtgtattagtcattgagatcattacaggtaaaagaaacaacaatggtggatcgaatggtgacgaagatgcagaagatcttcttagttgggtgtggagaagctggagagaagacactatactaagcgtgatcgatccgagtttaaccgcaggatcaagaaatgagatcttgagatgcatacacattggtcttttatgtgtgcaagaaagtgcagcgactagaccaacaatggctacggtttctctcatgctcaatagctattcttttaccctcccgacgcctttgaggcctgcgtttgtgttggagagtgtcgtcataccttcaaatgtttcttcttcaacggaagggttacaaatgtcgtcaaatgatgttactgtttctgagttttctcctcgttaatctgtaaatgttttgattcttctctgaaaacctttgaaatgggttttgtttgtgtgatttttcaggcagcctggcttgatcttgttgtgaataaaacatgaatgtgaagctgtgagatactttttcctttgtc

SEQ ID NO: 44783 - protein, 679 aa, Arabidopsis thaliana
  peptide (1)..(679): Ceres Seq. ID no. 12489345
MEHVRVIFFFACFLTLAPFHAFAQVDSYEFDPDFNCVDRGNFTANSTFAGNLNRLVSSLSSLKSQAYGFYNLSSGDSSGERAYAIGLCRREVKRDDCVSCIQTAARNLTKQCPLTKQAVVWYTHCMFRYSNRTIYGRKETNPTKAFIAGEEISANRDDFERLQRGLLDRLKGIAAAGGPNRKYAQGNGSASAGYRRFYGTVQCTPDLSEQDCNDCLVFGFENIPSCCDAEIGLRWFSPSCNFRFETWRFYEFDADLEPDPPAIQPADSPQSAARTERTGKGKGGSKVIIAIVIPILLVALLAICLCLVLKWRKNKSGYKNKVLGKSPLSGSIAEDEFSNTESLLVHFETLKTATDNFSSENELGRGGFGSVYKGVFPQGQEIAVKRLSGNSGQGDNEFKNEILLLAKLQHRNLVRLIGFCIQGEERLLVYEFIKNASLDQFIFDTEKRQLLDWVVRYKMIGGIARGLLYLHEDSRFRIIHRDLKASNILLDQEMNPKIADFGLAKLFDSGQTMTHRFTSRIAGTYGYMAPEYAMHGQFSVKTDVFSFGVLVIEIITGKRNNNGGSNGDEDAEDLLSWVWRSWREDTILSVIDPSLTAGSRNEILRCIHIGLLCVQESAATRPTMATVSLMLNSYSFTLPTPLRPAFVLESVVIPSNVSSSTEGLQMSSNDVTVSEFSPR

SEQ ID NO: 44784 - protein, 554 aa, Arabidopsis thaliana
  peptide (1)..(554): Ceres Seq. ID no. 12489346
MFRYSNRTIYGRKETNPTKAFIAGEEISANRDDFERLQRGLLDRLKGIAAAGGPNRKYAQGNGSASAGYRRFYGTVQCTPDLSEQDCNDCLVFGFENIPSCCDAEIGLRWFSPSCNFRFETWRFYEFDADLEPDPPAIQPADSPQSAARTERTGKGKGGSKVIIAIVIPILLVALLAICLCLVLKWRKNKSGYKNKVLGKSPLSGSIAEDEFSNTESLLVHFETLKTATDNFSSENELGRGGFGSVYKGVFPQGQEIAVKRLSGNSGQGDNEFKNEILLLAKLQHRNLVRLIGFCIQGEERLLVYEFIKNASLDQFIFDTEKRQLLDWVVRYKMIGGIARGLLYLHEDSRFRIIHRDLKASNILLDQEMNPKIADFGLAKLFDSGQTMTHRFTSRIAGTYGYMAPEYAMHGQFSVKTDVFSFGVLVIEIITGKRNNNGGSNGDEDAEDLLSWVWRSWREDTILSVIDPSLTAGSRNEILRCIHIGLLCVQESAATRPTMATVSLMLNSYSFTLPTPLRPAFVLESVVIPSNVSSSTEGLQMSSNDVTVSEFSPR

SEQ ID NO: 44785 - DNA, 1348 bp, Arabidopsis thaliana
  misc_feature (1)..(1348): Ceres Seq. ID no. 13502522
  misc_feature (1)..(1348): Ortholog of  Ceres SEQ ID NO 15224874 as cited in SEQ ID NO 55015
gttttcgattggtccgaaaccccagaagcaacagtcattactctgttttcatatgaacactcttcatcctcacaagcagcaacaagaacaagcacaacaacaagaagaagctagatacgaatgggatctttctctctccaccgtcgtatcttcctcctcctcctccgcctccgacgttatcggagctattgaattcgatcccactgataacatcgtcgctaccgccgggatttcaagaaagattcgtttttacggcctcccttctcttttacgtaacaacgctgtctccggtaccggagtttccttcgtcgatcaagccaccgcctgcgaatattacatctgtactccggcgaaacttagtagtctccggtggagacccgggtcgggcggtcgggttattgggtcgggagattacgacggcgtagtgatggagtacgatcttgagaagaggacgccggtattcgaaagggacgagcacggtggtcgtcgtgtatggagcgtagattacactcgtcacggcggcgcttcgacggtgggcgcgtcgggatcggatgacgggactatgcaagtatgggatccgaggtgtccgccggaagaatctgtcggtgttgtacgaccggcggggatttgccggagtgctgtttgttgcgtcgagttcgatccttccggtggaccagccgtggccgtcggatgcgctgatcggaaagggtacgtttacgatataaggaaactcgttgacccggcgttgactttacaaggtcatacgaaaacggtgtcgtatgtgaggttcctcgacggtgggacggtggtgacggcaggtacggacggttgtttgaagctgtggagcgtggaggatgggcgcgtgattcgcacgtacgaagggcatgtgaataatcggaacttcgtggggttatctgtgtggagaaacggcgcgttgtttggttgtggatcggaaaacaacagggtgtttgtgtacgataggagatgggggaagccggtttgggtagatgggtttgaaccagttggtatgaattctggttcggataagcggttcgtgagtagcgtctgttggaggcaatcaggtgtggaccagtgtaccctagtggctggaggatctgatggagtattacaggtttacgtgggcaaaagaaaaccatagtgttcttcttaatttatcattactatattttatgaattatgatgatgatgatgatgatgatgatgcttcttaatttcttttctttttttcaaatttaatttcctatttgagatgatttttgattgagttgtgagagcatacgatctgtttgtttttttttttaatttataaaggattttttacttgttc

SEQ ID NO: 44786 - protein, 385 aa, Arabidopsis thaliana
  peptide (1)..(385): Ceres Seq. ID no. 13502523
FSIGPKPQKQQSLLCFHMNTLHPHKQQQEQAQQQEEARYEWDLSLSTVVSSSSSSASDVIGAIEFDPTDNIVATAGISRKIRFYGLPSLLRNNAVSGTGVSFVDQATACEYYICTPAKLSSLRWRPGSGGRVIGSGDYDGVVMEYDLEKRTPVFERDEHGGRRVWSVDYTRHGGASTVGASGSDDGTMQVWDPRCPPEESVGVVRPAGICRSAVCCVEFDPSGGPAVAVGCADRKGYVYDIRKLVDPALTLQGHTKTVSYVRFLDGGTVVTAGTDGCLKLWSVEDGRVIRTYEGHVNNRNFVGLSVWRNGALFGCGSENNRVFVYDRRWGKPVWVDGFEPVGMNSGSDKRFVSSVCWRQSGVDQCTLVAGGSDGVLQVYVGKRKP

SEQ ID NO: 44787 - protein, 368 aa, Arabidopsis thaliana
  peptide (1)..(368): Ceres Seq. ID no. 13502524
MNTLHPHKQQQEQAQQQEEARYEWDLSLSTVVSSSSSSASDVIGAIEFDPTDNIVATAGISRKIRFYGLPSLLRNNAVSGTGVSFVDQATACEYYICTPAKLSSLRWRPGSGGRVIGSGDYDGVVMEYDLEKRTPVFERDEHGGRRVWSVDYTRHGGASTVGASGSDDGTMQVWDPRCPPEESVGVVRPAGICRSAVCCVEFDPSGGPAVAVGCADRKGYVYDIRKLVDPALTLQGHTKTVSYVRFLDGGTVVTAGTDGCLKLWSVEDGRVIRTYEGHVNNRNFVGLSVWRNGALFGCGSENNRVFVYDRRWGKPVWVDGFEPVGMNSGSDKRFVSSVCWRQSGVDQCTLVAGGSDGVLQVYVGKRKP

SEQ ID NO: 44788 - protein, 243 aa, Arabidopsis thaliana
  peptide (1)..(243): Ceres Seq. ID no. 13502525
MEYDLEKRTPVFERDEHGGRRVWSVDYTRHGGASTVGASGSDDGTMQVWDPRCPPEESVGVVRPAGICRSAVCCVEFDPSGGPAVAVGCADRKGYVYDIRKLVDPALTLQGHTKTVSYVRFLDGGTVVTAGTDGCLKLWSVEDGRVIRTYEGHVNNRNFVGLSVWRNGALFGCGSENNRVFVYDRRWGKPVWVDGFEPVGMNSGSDKRFVSSVCWRQSGVDQCTLVAGGSDGVLQVYVGKRKP

SEQ ID NO: 44789 - DNA, 1694 bp, Arabidopsis thaliana
  misc_feature (1)..(1694): Ceres Seq. ID no. 12455338
  misc_feature (1)..(1694): Ortholog of  Ceres SEQ ID NO 15177043 as cited in SEQ ID NO 57425
attgtgccgacacttctttcccctctctctctctctctccaccgccatggattcctcctatggcgccacaaagttccttctcctcctcttcctcaccacctccattgcgaccgcattacccgataacaaaccagtaccgggtcaaataaactcaaactcagtcctcgtagctctcctggactctcactacacagagctagcagaactagtcgaaaaagctctccttctccagaccctcgaagaagcagttggtaaacacaacatcacaatcttcgcaccacgcaacgatgccttggaacgaaacttagacccactcttcaaatctttcttgctcgaaccaagaaacctcaaatctttacaatctttattaatgttccacattcttcctaaacgaatcacttctcctcaatggccttctctttctcatcaccaccgtactctctccaacgaccatctccacctcaccgtcgacgtcaacactcttaaagtagattccgctgagattatccgacccgatgacgtcattagacccgatggtatcattcacggcatcgaacgtcttctcatccctcgctctgttcaagaagattttaaccgccgtcgtagtctccgttcaatctccgccgttataccagaaggagctcctgaggttgaccctagaactcaccgtctcaagaaaccatctcccgccgttcccgccggagctcctccggttcttccaatctacgacgctatgtcaccaggtccttccctagctcctgctccagctcccggacccggtggtccacgtggccatttcaacggcgatgctcaagttaaagatttcatccacactctcttgcattacggtggctacaacgagatggctgatatactcgtcaacttaacctctttagccactgagatgggtcgactcgtgtcagaaggctacgttttaaccgttcttgctcctaacgacgaagccatggctaagctcacaacggaccagcttagcgagccaggtgctcctgaacaaattatgtattaccacatcataccggagtatcaaacagaggagagtatgtacaacgctgttcggagattcggaaaagtgaagtatgattcattgagattcccacataaagtgttggctcaagaagctgatggatctgtcaaattcggacacggtgatggttcagcttacttgtttgatcctgatatctacacggacggtcggatttcagttcagggtattgatggagtcttgttcccgaaggaggaaacgccggcgacggagattaaaccagctgctccggtcgttaagaaagtttctaaatcaagaagaggtaaattgatggaggtagcttgtagaatgatggggtcacggtttattccgtgtcagtgatttcacacgttatcaaaaaaaaattccaagcttccaaattcttaattctgtaaacatgtggaaaaaaaaaagaaagagttgaatatgtaaatgatgtgatttttgggttcgttgttatttgcatgttctatttgtaatttttttattatcataaatatatatatatatatacgtagattttgattaagtttgttatttgggggtgagtaaaaaagttctaggagtttagagaaatcaaatatgtaatacaagttatacaatctgtatggaaataataaaggaaggatccatttgtgtgcctattctattc

SEQ ID NO: 44790 - protein, 460 aa, Arabidopsis thaliana
  peptide (1)..(460): Ceres Seq. ID no. 12455339
LCRHFFPLSLSLSTAMDSSYGATKFLLLLFLTTSIATALPDNKPVPGQINSNSVLVALLDSHYTELAELVEKALLLQTLEEAVGKHNITIFAPRNDALERNLDPLFKSFLLEPRNLKSLQSLLMFHILPKRITSPQWPSLSHHHRTLSNDHLHLTVDVNTLKVDSAEIIRPDDVIRPDGIIHGIERLLIPRSVQEDFNRRRSLRSISAVIPEGAPEVDPRTHRLKKPSPAVPAGAPPVLPIYDAMSPGPSLAPAPAPGPGGPRGHFNGDAQVKDFIHTLLHYGGYNEMADILVNLTSLATEMGRLVSEGYVLTVLAPNDEAMAKLTTDQLSEPGAPEQIMYYHIIPEYQTEESMYNAVRRFGKVKYDSLRFPHKVLAQEADGSVKFGHGDGSAYLFDPDIYTDGRISVQGIDGVLFPKEETPATEIKPAAPVVKKVSKSRRGKLMEVACRMMGSRFIPCQ

SEQ ID NO: 44791 - protein, 445 aa, Arabidopsis thaliana
  peptide (1)..(445): Ceres Seq. ID no. 12455340
MDSSYGATKFLLLLFLTTSIATALPDNKPVPGQINSNSVLVALLDSHYTELAELVEKALLLQTLEEAVGKHNITIFAPRNDALERNLDPLFKSFLLEPRNLKSLQSLLMFHILPKRITSPQWPSLSHHHRTLSNDHLHLTVDVNTLKVDSAEIIRPDDVIRPDGIIHGIERLLIPRSVQEDFNRRRSLRSISAVIPEGAPEVDPRTHRLKKPSPAVPAGAPPVLPIYDAMSPGPSLAPAPAPGPGGPRGHFNGDAQVKDFIHTLLHYGGYNEMADILVNLTSLATEMGRLVSEGYVLTVLAPNDEAMAKLTTDQLSEPGAPEQIMYYHIIPEYQTEESMYNAVRRFGKVKYDSLRFPHKVLAQEADGSVKFGHGDGSAYLFDPDIYTDGRISVQGIDGVLFPKEETPATEIKPAAPVVKKVSKSRRGKLMEVACRMMGSRFIPCQ

SEQ ID NO: 44792 - protein, 337 aa, Arabidopsis thaliana
  peptide (1)..(337): Ceres Seq. ID no. 12455341
MFHILPKRITSPQWPSLSHHHRTLSNDHLHLTVDVNTLKVDSAEIIRPDDVIRPDGIIHGIERLLIPRSVQEDFNRRRSLRSISAVIPEGAPEVDPRTHRLKKPSPAVPAGAPPVLPIYDAMSPGPSLAPAPAPGPGGPRGHFNGDAQVKDFIHTLLHYGGYNEMADILVNLTSLATEMGRLVSEGYVLTVLAPNDEAMAKLTTDQLSEPGAPEQIMYYHIIPEYQTEESMYNAVRRFGKVKYDSLRFPHKVLAQEADGSVKFGHGDGSAYLFDPDIYTDGRISVQGIDGVLFPKEETPATEIKPAAPVVKKVSKSRRGKLMEVACRMMGSRFIPCQ

SEQ ID NO: 44793 - DNA, 2322 bp, Arabidopsis thaliana
  misc_feature (1)..(2322): Ceres Seq. ID no. 12489113
  misc_feature (1)..(2322): Ortholog of  Ceres SEQ ID NO 14312594 as cited in SEQ ID NO 58686
  misc_feature (1)..(2322): Ortholog of  Ceres SEQ ID NO 13597706 as cited in SEQ ID NO 65326
acagagacttttattaaccttcaaaacattatttattattccaatcttcaaagagagacactcacactccttatcttcttcattcctccatcctatttttcttcttcgccaaagtgttattcctcaactttatatattacacaaatgtctttagccgcggataatgtgttgttggtggaagaaggaaggccagccacagcggaacatccatcggccggaccggtttatcgatgtaaatacgctaaagatggcctcctcgatctccctaccgatattgattctccttggcagttctttagtgaggctgtgaagaaatatccgaatgagcaaatgttgggccaacgcgtaacgactgattctaaggtcggtccatacacgtggatcacatataaggaagcgcacgacgctgcaattcggattggatcagcaatcagaagccgaggcgttgatccgggacactgttgtggtatttacggagctaattgtccagaatggattattgcaatggaggcctgcatgagccaagggatcacctacgtgcctctatacgattctttaggcgtaaacgcagttgaattcatcatcaaccacgccgaggtttcgctagtatttgttcaagagaagacagtttcatcgatcttatcgtgccaaaagggatgttcttcgaatttgaagactattgtgagcttcggggaagtctcgagtacacaaaaggaagaagctaagaaccaatgtgtttctttattttcatggaatgagttctcactaatgggaaacttagatgaggcaaatctacctcgtaagcgaaagacagacatctgcacaataatgtacacaagcgggacgactggagaacccaaaggtgtaatcttaaacaacgcagcaatttcggtccaggttttatccatagacaaaatgcttgaagtcactgatcgatcgtgtgacacgagcgatgtgttcttctcgtacttgccattagcacattgctatgatcaagtcatggagatttactttttatctagaggctcctctgttggatactggcgtggcgacattcggtacctgatggatgatgttcaagctcttaaacctactgtgttttgcggtgttccacgagtttacgacaaactatatgccggtataatgcaaaaaatatcagctagtggcttgatacgcaagaaactgtttgattttgcttataactacaaattgggaaatatgagaaaaggattctctcaagaagaagcttctcctcgtctagacagacttatgttcgataagataaaagaagcattaggaggaagagctcatatgttgttatcaggagcagcgcctctacctcgtcatgtagaggagttcttgagaatcattcctgcctctaatctctctcaaggttatggattgactgagagttgtgggggaagcttcacgaccttagccggagtattttctatggtggggacagtgggtgtgccaatgcccacggtggaggcaaggctagtgtccgtaccagagatgggttacgacgccttttccgctgacgtgccgagaggagagatttgtcttagaggaaattcaatgttttctggttaccataaaagacaagatctaactgatcaagtcctaatcgatggatggttccacacaggagatattggagaatggcaagaagatggatcaatgaagatcatcgataggaagaagaacatcttcaagttgtctcaaggtgaatatgttgctgttgaaaacctcgaaaacacttactcaagatgtcccctcattgctcagatatgggtctatggcaacagcttcgagtcatttttggtaggtgtggttgtacctgatagaaaagctattgaagattgggctaaactcaattaccaatctcccaatgatttcgaatctctatgtcaaaatctcaaagctcaaaaatacttcttggatgagcttaactctaccgcaaagcaatatcaacttaaaggatttgaaatgttaaaagctattcatttagaaccaaacccttttgatattgaaagagatcttattactccaactttcaagctgaaaaggccacagctcctccaacattacaagggcatagttgatcaactttattcagaagcaaagaggtccatggcatagataattagataccgatcggctattcattttctgatgctatttgggtttgtatgatatgttacaaaattgtgttcggatcctctcatcatgtgattcttgttacactaaatttatagtttggaaactatatatatactattaagcaacgtttactaaagatttcttgatacattttgattt

SEQ ID NO: 44794 - protein, 713 aa, Arabidopsis thaliana
  peptide (1)..(713): Ceres Seq. ID no. 12489114
TETFINLQNIIYYSNLQRETLTLLIFFIPPSYFSSSPKCYSSTLYITQMSLAADNVLLVEEGRPATAEHPSAGPVYRCKYAKDGLLDLPTDIDSPWQFFSEAVKKYPNEQMLGQRVTTDSKVGPYTWITYKEAHDAAIRIGSAIRSRGVDPGHCCGIYGANCPEWIIAMEACMSQGITYVPLYDSLGVNAVEFIINHAEVSLVFVQEKTVSSILSCQKGCSSNLKTIVSFGEVSSTQKEEAKNQCVSLFSWNEFSLMGNLDEANLPRKRKTDICTIMYTSGTTGEPKGVILNNAAISVQVLSIDKMLEVTDRSCDTSDVFFSYLPLAHCYDQVMEIYFLSRGSSVGYWRGDIRYLMDDVQALKPTVFCGVPRVYDKLYAGIMQKISASGLIRKKLFDFAYNYKLGNMRKGFSQEEASPRLDRLMFDKIKEALGGRAHMLLSGAAPLPRHVEEFLRIIPASNLSQGYGLTESCGGSFTTLAGVFSMVGTVGVPMPTVEARLVSVPEMGYDAFSADVPRGEICLRGNSMFSGYHKRQDLTDQVLIDGWFHTGDIGEWQEDGSMKIIDRKKNIFKLSQGEYVAVENLENTYSRCPLIAQIWVYGNSFESFLVGVVVPDRKAIEDWAKLNYQSPNDFESLCQNLKAQKYFLDELNSTAKQYQLKGFEMLKAIHLEPNPFDIERDLITPTFKLKRPQLLQHYKGIVDQLYSEAKRSMA

SEQ ID NO: 44795 - protein, 665 aa, Arabidopsis thaliana
  peptide (1)..(665): Ceres Seq. ID no. 12489115
MSLAADNVLLVEEGRPATAEHPSAGPVYRCKYAKDGLLDLPTDIDSPWQFFSEAVKKYPNEQMLGQRVTTDSKVGPYTWITYKEAHDAAIRIGSAIRSRGVDPGHCCGIYGANCPEWIIAMEACMSQGITYVPLYDSLGVNAVEFIINHAEVSLVFVQEKTVSSILSCQKGCSSNLKTIVSFGEVSSTQKEEAKNQCVSLFSWNEFSLMGNLDEANLPRKRKTDICTIMYTSGTTGEPKGVILNNAAISVQVLSIDKMLEVTDRSCDTSDVFFSYLPLAHCYDQVMEIYFLSRGSSVGYWRGDIRYLMDDVQALKPTVFCGVPRVYDKLYAGIMQKISASGLIRKKLFDFAYNYKLGNMRKGFSQEEASPRLDRLMFDKIKEALGGRAHMLLSGAAPLPRHVEEFLRIIPASNLSQGYGLTESCGGSFTTLAGVFSMVGTVGVPMPTVEARLVSVPEMGYDAFSADVPRGEICLRGNSMFSGYHKRQDLTDQVLIDGWFHTGDIGEWQEDGSMKIIDRKKNIFKLSQGEYVAVENLENTYSRCPLIAQIWVYGNSFESFLVGVVVPDRKAIEDWAKLNYQSPNDFESLCQNLKAQKYFLDELNSTAKQYQLKGFEMLKAIHLEPNPFDIERDLITPTFKLKRPQLLQHYKGIVDQLYSEAKRSMA

SEQ ID NO: 44796 - protein, 603 aa, Arabidopsis thaliana
  peptide (1)..(603): Ceres Seq. ID no. 12489116
MLGQRVTTDSKVGPYTWITYKEAHDAAIRIGSAIRSRGVDPGHCCGIYGANCPEWIIAMEACMSQGITYVPLYDSLGVNAVEFIINHAEVSLVFVQEKTVSSILSCQKGCSSNLKTIVSFGEVSSTQKEEAKNQCVSLFSWNEFSLMGNLDEANLPRKRKTDICTIMYTSGTTGEPKGVILNNAAISVQVLSIDKMLEVTDRSCDTSDVFFSYLPLAHCYDQVMEIYFLSRGSSVGYWRGDIRYLMDDVQALKPTVFCGVPRVYDKLYAGIMQKISASGLIRKKLFDFAYNYKLGNMRKGFSQEEASPRLDRLMFDKIKEALGGRAHMLLSGAAPLPRHVEEFLRIIPASNLSQGYGLTESCGGSFTTLAGVFSMVGTVGVPMPTVEARLVSVPEMGYDAFSADVPRGEICLRGNSMFSGYHKRQDLTDQVLIDGWFHTGDIGEWQEDGSMKIIDRKKNIFKLSQGEYVAVENLENTYSRCPLIAQIWVYGNSFESFLVGVVVPDRKAIEDWAKLNYQSPNDFESLCQNLKAQKYFLDELNSTAKQYQLKGFEMLKAIHLEPNPFDIERDLITPTFKLKRPQLLQHYKGIVDQLYSEAKRSMA

SEQ ID NO: 44797 - DNA, 1498 bp, Arabidopsis thaliana; identical to SEQ ID NO: 41695
  misc_feature (1)..(1498): Ceres Seq. ID no. 13646293
  misc_feature (1)..(1498): Ortholog of  Ceres SEQ ID NO 13593831 as cited in SEQ ID NO 53828

SEQ ID NO: 44798 - protein, 287 aa, Arabidopsis thaliana; identical to SEQ ID NO: 29005
  peptide (1)..(287): Ceres Seq. ID no. 13646294

SEQ ID NO: 44799 - protein, 214 aa, Arabidopsis thaliana; identical to SEQ ID NO: 29006
  peptide (1)..(214): Ceres Seq. ID no. 13646295

SEQ ID NO: 44800 - protein, 206 aa, Arabidopsis thaliana; identical to SEQ ID NO: 29007
  peptide (1)..(206): Ceres Seq. ID no. 13646296

SEQ ID NO: 44801 - DNA, 1778 bp, Arabidopsis thaliana
  misc_feature (1)..(1778): Ceres Seq. ID no. 13646378
  misc_feature (1)..(1778): Ortholog of  Ceres SEQ ID NO 13594037 as cited in SEQ ID NO 55666
  misc_feature (1)..(1778): Ortholog of  Ceres SEQ ID NO 13657707 as cited in SEQ ID NO 66407
taaaaacatagcagtctcttctctacttgctccaagccttcaacattttcttctcaaatggcgctctcctctttcaatctctcttctctattattcctcctcttcttcactccttccgttttctcgtattcgtatcaaccttctctaaaccctcatgaaacttctgctacaagtttctgcaaaaacacaccatatccagatgcatgttttacctccttaaaactatccatctccatcaacataagccccaacattctctctttcctcctccaaaccctccaaacagctctttccgaggctgggaaactcaccgatctcctttctggcgctggggtctccaacaacctagttgagggacaacgtggctctcttcaagactgcaaagatcttcaccacatcacttcttctttcttgaaacgatcaatctccaagatccaagacggtgttaacgattcacggaaactagccgacgctagagcgtacctaagcgccgctctcaccaacaagatcacatgcttggaaggtcttgaatcagcctcaggtccactcaagccaaagctcgtgacctccttcacgaccacttacaaacacataagcaactccctctctgctcttccaaaacagagaagaaccacaaatccaaaaaccggcggaaacactaagaaccgccggttacttgggttatttcctgactgggtctataagaaagatcaccggtttttagaagattctagcgacgggtatgatgagtatgacccgagtgagagcctcgtggtcgctgccgatggaacagggaatttttcgactattaacgaggccataagctttgctcctaatatgagtaacgacagggtgctgatatatgtaaaggaaggtgtgtatgacgagaacattgatattccgatctacaagactaatattgttttgataggagatggatccgatgttacatttattaccggaaaccgaagtgtcggagatggatggaccactttccgatctgctactcttgcggtttccggcgaaggattcttggcgagggatataatgataacaaacacagcaggacccgagaagcaccaagcggttgcactacgagtgaacgcggattttgtggccttataccgatgtgtcattgatggttaccaggacacactttacacccactcattccgacaattctaccgtgaatgcgatatttatggaaccattgattatatctttggaaacgcagccgttgtcttccaaggctgtaacatcgtttcaaagttgcctatgccaggacaattcacggtaattactgctcagtcacgagacactcaggacgaagataccgggatctcgatgcaaaactgctccatccttgcgtcggaggatttatttaatagctcaaataaagtgaagagctacttgggacgtccgtggagagaattttcaagaacagttgtaatggaatcttatattgatgagtttattgacggttcgggttggagcaaatggaacggtggggaagcacttgataccctttactatggcgagtataacaataacggtccgggttctgaaacggttaaacgggttaactggccgggttttcacattatgggttacgaagatgcctttaacttcacggcaacagagtttatcactggtgatggttggttgggaagtacttcgttcccttatgataatggaatttaacatttttttttgctagaaatgtatagggtttgtcttcatataaaaatctaattacaataattaataaataaaaatct

SEQ ID NO: 44802 - protein, 547 aa, Arabidopsis thaliana
  peptide (1)..(547): Ceres Seq. ID no. 13646379
MALSSFNLSSLLFLLFFTPSVFSYSYQPSLNPHETSATSFCKNTPYPDACFTSLKLSISINISPNILSFLLQTLQTALSEAGKLTDLLSGAGVSNNLVEGQRGSLQDCKDLHHITSSFLKRSISKIQDGVNDSRKLADARAYLSAALTNKITCLEGLESASGPLKPKLVTSFTTTYKHISNSLSALPKQRRTTNPKTGGNTKNRRLLGLFPDWVYKKDHRFLEDSSDGYDEYDPSESLVVAADGTGNFSTINEAISFAPNMSNDRVLIYVKEGVYDENIDIPIYKTNIVLIGDGSDVTFITGNRSVGDGWTTFRSATLAVSGEGFLARDIMITNTAGPEKHQAVALRVNADFVALYRCVIDGYQDTLYTHSFRQFYRECDIYGTIDYIFGNAAVVFQGCNIVSKLPMPGQFTVITAQSRDTQDEDTGISMQNCSILASEDLFNSSNKVKSYLGRPWREFSRTVVMESYIDEFIDGSGWSKWNGGEALDTLYYGEYNNNGPGSETVKRVNWPGFHIMGYEDAFNFTATEFITGDGWLGSTSFPYDNGI

SEQ ID NO: 44803 - protein, 287 aa, Arabidopsis thaliana
  peptide (1)..(287): Ceres Seq. ID no. 13646380
MSNDRVLIYVKEGVYDENIDIPIYKTNIVLIGDGSDVTFITGNRSVGDGWTTFRSATLAVSGEGFLARDIMITNTAGPEKHQAVALRVNADFVALYRCVIDGYQDTLYTHSFRQFYRECDIYGTIDYIFGNAAVVFQGCNIVSKLPMPGQFTVITAQSRDTQDEDTGISMQNCSILASEDLFNSSNKVKSYLGRPWREFSRTVVMESYIDEFIDGSGWSKWNGGEALDTLYYGEYNNNGPGSETVKRVNWPGFHIMGYEDAFNFTATEFITGDGWLGSTSFPYDNGI

SEQ ID NO: 44804 - DNA, 2256 bp, Arabidopsis thaliana; identical to SEQ ID NO: 22038
  misc_feature (1)..(2256): Ceres Seq. ID no. 13646318
  misc_feature (1)..(2256): Ortholog of  Ceres SEQ ID NO 14303276 as cited in SEQ ID NO 1264
  misc_feature (1)..(2256): Ortholog of  Ceres SEQ ID NO 15170536 as cited in SEQ ID NO 52791
  misc_feature (1)..(2256): Ortholog of  Ceres SEQ ID NO 15171813 as cited in SEQ ID NO 57309
  misc_feature (1)..(2256): Ortholog of  Ceres SEQ ID NO 14314378 as cited in SEQ ID NO 57601
  misc_feature (1)..(2256): Ortholog of  Ceres SEQ ID NO 12465083 as cited in SEQ ID NO 68239

SEQ ID NO: 44805 - protein, 651 aa, Arabidopsis thaliana; identical to SEQ ID NO: 22039
  peptide (1)..(651): Ceres Seq. ID no. 13646319

SEQ ID NO: 44806 - protein, 588 aa, Arabidopsis thaliana; identical to SEQ ID NO: 22040
  peptide (1)..(588): Ceres Seq. ID no. 13646320

SEQ ID NO: 44807 - protein, 562 aa, Arabidopsis thaliana; identical to SEQ ID NO: 22041
  peptide (1)..(562): Ceres Seq. ID no. 13646321

SEQ ID NO: 44808 - DNA, 2575 bp, Arabidopsis thaliana
  misc_feature (1)..(2575): Ceres Seq. ID no. 12603727
  misc_feature (1)..(2575): Ortholog of  Ceres SEQ ID NO 13600310 as cited in SEQ ID NO 5086
tttcagatcgagacgaagatggaaaagatctgtgtcgcagtcagggtaagaccgccggcgccggaaaacggagcttcactctggaaagtcgaagataatcggatctctcttcataaatcactcgacactccaatcacaaccgcttctcacgcttttgatcatgtgttcgacgaaagttctacgaatgctagtgtctacgagcttcttactaaggatatcatacatgccgctgttgagggttttaatggtactgcatttgcttatgggcaaactagtagtgggaagacgtttacgatgacgggctctgaaactgatcctggaattattcgaagatctgttcgagatgtgtttgaaagaatacatatgatatctgatcgtgagtttctcatccgggtttcgtacatggaaatttacaacgaagaaattaatgatcttttagctgttgagaaccagagactgcaaattcatgagcatttggagcgtggagtgtttgttgctggtcttaaggaagaaattgttagtgatgctgaacagattctaaagcttatagattctggagaagttaataggcactttggcgagacaaacatgaatgttcatagtagcaggtctcacaccatattcagaatggtgattgagagcaggggaaaagataatagttcttcagatgctattcgtgtctcagtcttgaatttggtcgatttagctggatctgagcgaattgctaaaactggtgctggtggtgtacgcttgcaagaagggaagtacattaataagagcttaatgattcttggtaatgtcatcaataaattaagtgacagtacaaagctaagggcacatattccgtaccgagatagtaagctgactcgaattcttcagcctgcacttggtggtaatgcaaagacctgcattatatgcactatcgcaccagaagagcatcatattgaggaatcaaaaggaactctccaatttgcaagcagagcaaagcgcatcaccaactgtgctcaagtgaatgagatcttgactgatgccgctttattgaagcgccaaaagttggagatagaagagctacgcatgaagcttcagggatctcatgcggaagtgttggaacaagagatcttaaatttaagcaatcagatgctgaagtatgagttggaatgtgaaaggctaaaaacacaactggaagaagagaaaaggaagcagaaggagcaggaaaattgcatcaaggagcaacagatgaaaattgagaaccttaacaattttgtcactaattctgacttcaagaggaaccagtcagaggactttatcatttcaagaaagactccagatgggctatgcaatgtcaatgacactagcgatgttcctggaaccccttgctttaaatcagcttcccgttcctttgtggttgctcggtcaaataattattcaggactatctgattttagtccgatggttcattccctgggggacgtggccgatgaagatacttggatgaaactaaacaagggttttgttgcagaccttgatcaaatccaatttacacctgctgttaaatgtcaacccactcctttaagtattgcaaccacggagtgcccgcgtgaaaatcactcagaggtggaagatctcaaaagtcggattcagttgctgaccaatgagaatgacagtcttcaggtaaaatttaatgaacaagtactcctgagcaacaatctgatgcaagagatgtctgagctcaaacaagaaacgcttactgtgaaagaaattccgaataggttatctgagtcagttgctaattgcaaagatgtctacaaggatgtcatagtcactatgaagagcttaatcactgacaaggaatctccaacggcaaacctgctcctgggtacaactgaaatcacaacgagcctactggcaactctagaaacacaattctcaatgataatggatggtcagaaaacgggtagtagcatagatcatcctttatctgaccattgggaaacacttcgtgtgaatctgaagaacacaacgacgttgttgctgtcagacgcacaagcaaaagatgaatttttgaactcccacaacaagggacaagaaacagctgctttggaggagaagaaactgaagtctgagctcatcatcatcaaggaaagatacaacgagctcgagaaagagttgtgtttggataaacagcttctagaagcttcaagagaaagtcatgagaagctgataaaagaggtacagttcctgaaggaagaaagagattctttagatagaaaaatctctcaatcaactcagagattgagagtgattgcaagtgataaagagaatgctttgaaagatcttaatgtggaagtgaagaggaggaaagatatggaggaagagattaagcacatcagcattgctttcgctaccaggcacaaatcttttgtgtcttttcacagtgaaatcaagtccaaaatgcagaaactaaccactcaaaactcaaaagctccttagcaaaaacagttaagtttgttgaatttgtatgtttaatttatcaccggattcgctaatgttgattaagaaagtgaagaacctattt

SEQ ID NO: 44809 - protein, 829 aa, Arabidopsis thaliana
  peptide (1)..(829): Ceres Seq. ID no. 12603728
FQIETKMEKICVAVRVRPPAPENGASLWKVEDNRISLHKSLDTPITTASHAFDHVFDESSTNASVYELLTKDIIHAAVEGFNGTAFAYGQTSSGKTFTMTGSETDPGIIRRSVRDVFERIHMISDREFLIRVSYMEIYNEEINDLLAVENQRLQIHEHLERGVFVAGLKEEIVSDAEQILKLIDSGEVNRHFGETNMNVHSSRSHTIFRMVIESRGKDNSSSDAIRVSVLNLVDLAGSERIAKTGAGGVRLQEGKYINKSLMILGNVINKLSDSTKLRAHIPYRDSKLTRILQPALGGNAKTCIICTIAPEEHHIEESKGTLQFASRAKRITNCAQVNEILTDAALLKRQKLEIEELRMKLQGSHAEVLEQEILNLSNQMLKYELECERLKTQLEEEKRKQKEQENCIKEQQMKIENLNNFVTNSDFKRNQSEDFIISRKTPDGLCNVNDTSDVPGTPCFKSASRSFVVARSNNYSGLSDFSPMVHSLGDVADEDTWMKLNKGFVADLDQIQFTPAVKCQPTPLSIATTECPRENHSEVEDLKSRIQLLTNENDSLQVKFNEQVLLSNNLMQEMSELKQETLTVKEIPNRLSESVANCKDVYKDVIVTMKSLITDKESPTANLLLGTTEITTSLLATLETQFSMIMDGQKTGSSIDHPLSDHWETLRVNLKNTTTLLLSDAQAKDEFLNSHNKGQETAALEEKKLKSELIIIKERYNELEKELCLDKQLLEASRESHEKLIKEVQFLKEERDSLDRKISQSTQRLRVIASDKENALKDLNVEVKRRKDMEEEIKHISIAFATRHKSFVSFHSEIKSKMQKLTTQNSKAP

SEQ ID NO: 44810 - protein, 823 aa, Arabidopsis thaliana
  peptide (1)..(823): Ceres Seq. ID no. 12603729
MEKICVAVRVRPPAPENGASLWKVEDNRISLHKSLDTPITTASHAFDHVFDESSTNASVYELLTKDIIHAAVEGFNGTAFAYGQTSSGKTFTMTGSETDPGIIRRSVRDVFERIHMISDREFLIRVSYMEIYNEEINDLLAVENQRLQIHEHLERGVFVAGLKEEIVSDAEQILKLIDSGEVNRHFGETNMNVHSSRSHTIFRMVIESRGKDNSSSDAIRVSVLNLVDLAGSERIAKTGAGGVRLQEGKYINKSLMILGNVINKLSDSTKLRAHIPYRDSKLTRILQPALGGNAKTCIICTIAPEEHHIEESKGTLQFASRAKRITNCAQVNEILTDAALLKRQKLEIEELRMKLQGSHAEVLEQEILNLSNQMLKYELECERLKTQLEEEKRKQKEQENCIKEQQMKIENLNNFVTNSDFKRNQSEDFIISRKTPDGLCNVNDTSDVPGTPCFKSASRSFVVARSNNYSGLSDFSPMVHSLGDVADEDTWMKLNKGFVADLDQIQFTPAVKCQPTPLSIATTECPRENHSEVEDLKSRIQLLTNENDSLQVKFNEQVLLSNNLMQEMSELKQETLTVKEIPNRLSESVANCKDVYKDVIVTMKSLITDKESPTANLLLGTTEITTSLLATLETQFSMIMDGQKTGSSIDHPLSDHWETLRVNLKNTTTLLLSDAQAKDEFLNSHNKGQETAALEEKKLKSELIIIKERYNELEKELCLDKQLLEASRESHEKLIKEVQFLKEERDSLDRKISQSTQRLRVIASDKENALKDLNVEVKRRKDMEEEIKHISIAFATRHKSFVSFHSEIKSKMQKLTTQNSKAP

SEQ ID NO: 44811 - protein, 731 aa, Arabidopsis thaliana
  peptide (1)..(731): Ceres Seq. ID no. 12603730
MTGSETDPGIIRRSVRDVFERIHMISDREFLIRVSYMEIYNEEINDLLAVENQRLQIHEHLERGVFVAGLKEEIVSDAEQILKLIDSGEVNRHFGETNMNVHSSRSHTIFRMVIESRGKDNSSSDAIRVSVLNLVDLAGSERIAKTGAGGVRLQEGKYINKSLMILGNVINKLSDSTKLRAHIPYRDSKLTRILQPALGGNAKTCIICTIAPEEHHIEESKGTLQFASRAKRITNCAQVNEILTDAALLKRQKLEIEELRMKLQGSHAEVLEQEILNLSNQMLKYELECERLKTQLEEEKRKQKEQENCIKEQQMKIENLNNFVTNSDFKRNQSEDFIISRKTPDGLCNVNDTSDVPGTPCFKSASRSFVVARSNNYSGLSDFSPMVHSLGDVADEDTWMKLNKGFVADLDQIQFTPAVKCQPTPLSIATTECPRENHSEVEDLKSRIQLLTNENDSLQVKFNEQVLLSNNLMQEMSELKQETLTVKEIPNRLSESVANCKDVYKDVIVTMKSLITDKESPTANLLLGTTEITTSLLATLETQFSMIMDGQKTGSSIDHPLSDHWETLRVNLKNTTTLLLSDAQAKDEFLNSHNKGQETAALEEKKLKSELIIIKERYNELEKELCLDKQLLEASRESHEKLIKEVQFLKEERDSLDRKISQSTQRLRVIASDKENALKDLNVEVKRRKDMEEEIKHISIAFATRHKSFVSFHSEIKSKMQKLTTQNSKAP

SEQ ID NO: 44812 - DNA, 3209 bp, Arabidopsis thaliana; identical to SEQ ID NO: 39832
  misc_feature (1)..(3209): Ceres Seq. ID no. 12599971
  misc_feature (1)..(3209): Ortholog of  Ceres SEQ ID NO 13646569 as cited in SEQ ID NO 20745

SEQ ID NO: 44813 - protein, 949 aa, Arabidopsis thaliana; identical to SEQ ID NO: 39833
  peptide (1)..(949): Ceres Seq. ID no. 12599972

SEQ ID NO: 44814 - protein, 885 aa, Arabidopsis thaliana; identical to SEQ ID NO: 39834
  peptide (1)..(885): Ceres Seq. ID no. 12599973

SEQ ID NO: 44815 - protein, 877 aa, Arabidopsis thaliana; identical to SEQ ID NO: 39835
  peptide (1)..(877): Ceres Seq. ID no. 12599974

SEQ ID NO: 44816 - DNA, 2764 bp, Arabidopsis thaliana
  misc_feature (1)..(2764): Ceres Seq. ID no. 13646330
  misc_feature (1)..(2764): Ortholog of  Ceres SEQ ID NO 15169142 as cited in SEQ ID NO 58748
actgacgaatcagtgaaacaatatctcaaacccagaaaccaacaataattcatagattactactatacaaaattctatataactataatctgttctcttgtgtgtttctcgcgtggcttgcgtgttacttcattcatcactgctttagcttctcctcatatgaatctcgaggcaatccagtcactgacttttctcactccccatctctagggttaaaactgtgagcatttggagtagcaaaagtaacaaagcatggcaacacttaaagacattggtgtatcagcagggataaacatcctcactgcattcattttcttcataatctttgcgtttttaaggcttcagccattcaacgacagagtttacttctccaaatggtacctcagggggttaagaagcagccctgcaagtggcggcggattcgcggggcggtttgtgaatttggagttgagatcatacctcaagttcttgcattggatgcctgaagctcttaagatgcctgagcgtgagctgattgatcatgctggtttagactctgttgtctatctccggatttactggctcgggcttaagatttttgctccaatagcaatgcttgcttgggcagttcttgtaccggttaattggacaaacaacgagttggagttggctaagcattttaagaatgtgacttcaagtgatattgacaaactaacaatttcgaatatcccagaaggttcaaataggttttgggctcatatcataatggcttatgcctttacaatctggacttgttatatgctgatgaaggagtatgagacagttgctaacatgaggcttcagtttcttgcctcagaaggccgtcgacctgaccagttcactgttcttgttaggaatgtacctccggacccagacgaaactgtgagtgagcttgtggagcattttttcctagttaatcaccctgataactacctcacacatcaggttgtatgcaatgcaaacaagctcgcggatttggttagtaaaaagacgaagctgcagaactggcttgactattatcagctcaaatacactagaaataattctcagatcagacctataacgaagcttgggtgccttggcttgtgtggacaaaaagttgacgcaatcgaacattacattgctgaagtagataaaacatcaaaagagattgctgaagagagagagaatgtggtgaatgatcaaaagtcagtcatgccagcatcttttgtctctttcaaaacccgttgggctgctgctgtttgcgctcagaccacgcagacccgaaacccaactgaatggttaaccgaatgggctgcagagccgcgtgatatatattggccaaacctagcgattccatatgtttctttgactgtgagaagattggttatgaatgtagccttcttcttccttaccttctttttcatcatccctatcgcgtttgtacaatctcttgctaccattgaaggaattgagaaagttgcaccgttcttgaaagtcattatcgaaaaagatttcataaaatcgctgatacaaggtttgctagccggtattgcgttgaagcttttcctcatctttctgccagccatactgatgaccatgtccaaatttgaaggctttacttcagtttcattcttagaaagacgatccgcgtctagatattacatctttaacttagtgaacgtctttcttggaagtgttatcgctggagctgcgtttgagcagcttaactctttcctcaatcaatcgcctaatcaaatccctaagactattggcatggcgataccgatgaaagcaaccttctttatcacatatataatggttgatggttgggcaggagttgcaggagagattcttatgttgaaacctctcattatataccacctcaaaaacgcattcttggtgaaaacagagaaagacagagaggaagcaatgaacccgggaagcatcggtttcaacactggagagcctcagatacagctttacttccttcttggtcttgtctatgctcctgtgacaccaatgcttcttccttttatcttagtctttttcgctcttgcttatgtcgtataccgccatcagatcataaatgtgtataatcaagagtatgagagcgctgctgcgttttggccggatgttcatggacgggttataacggcattgatcatatctcagttgcttctgatgggtttgttaggtacaaaacatgccgcttcagctgctccgtttctcattgctcttcctgtgattactatcggtttccaccgcttctgtaaaggccgtttcgaacctgcctttgtccgttaccccttacaggaagctatgatgaaagatacattggaaagagcaagagagccaaatctgaacctgaaaggttacttgcaagacgcttatattcatccggtttttaaaggcggtgataatgatgacgacggtgacatgatcggaaaattggagaatgaagtcatcatagtgccaacaaaacgccaatcgcggaggaacactcctgcaccgagcagaatcagcggtgaatcgtctccatctttggccgttattaacggtaaagaagtctagtttaacggtttcaattcagtaaaagcatctgcatacgatttaagtatgaatatagttcgtgtatgtatgtacttttatgtgtacatagagaggtttgtgtttttgcttagacgttgttgatgggttttaattgttgaagtattgaagtttcagggtatttttagaataatatcattttaattgggtgtttttc

SEQ ID NO: 44817 - protein, 772 aa, Arabidopsis thaliana
  peptide (1)..(772): Ceres Seq. ID no. 13646331
MATLKDIGVSAGINILTAFIFFIIFAFLRLQPFNDRVYFSKWYLRGLRSSPASGGGFAGRFVNLELRSYLKFLHWMPEALKMPERELIDHAGLDSVVYLRIYWLGLKIFAPIAMLAWAVLVPVNWTNNELELAKHFKNVTSSDIDKLTISNIPEGSNRFWAHIIMAYAFTIWTCYMLMKEYETVANMRLQFLASEGRRPDQFTVLVRNVPPDPDETVSELVEHFFLVNHPDNYLTHQVVCNANKLADLVSKKTKLQNWLDYYQLKYTRNNSQIRPITKLGCLGLCGQKVDAIEHYIAEVDKTSKEIAEERENVVNDQKSVMPASFVSFKTRWAAAVCAQTTQTRNPTEWLTEWAAEPRDIYWPNLAIPYVSLTVRRLVMNVAFFFLTFFFIIPIAFVQSLATIEGIEKVAPFLKVIIEKDFIKSLIQGLLAGIALKLFLIFLPAILMTMSKFEGFTSVSFLERRSASRYYIFNLVNVFLGSVIAGAAFEQLNSFLNQSPNQIPKTIGMAIPMKATFFITYIMVDGWAGVAGEILMLKPLIIYHLKNAFLVKTEKDREEAMNPGSIGFNTGEPQIQLYFLLGLVYAPVTPMLLPFILVFFALAYVVYRHQIINVYNQEYESAAAFWPDVHGRVITALIISQLLLMGLLGTKHAASAAPFLIALPVITIGFHRFCKGRFEPAFVRYPLQEAMMKDTLERAREPNLNLKGYLQDAYIHPVFKGGDNDDDGDMIGKLENEVIIVPTKRQSRRNTPAPSRISGESSPSLAVINGKEV

SEQ ID NO: 44818 - protein, 697 aa, Arabidopsis thaliana
  peptide (1)..(697): Ceres Seq. ID no. 13646332
MPEALKMPERELIDHAGLDSVVYLRIYWLGLKIFAPIAMLAWAVLVPVNWTNNELELAKHFKNVTSSDIDKLTISNIPEGSNRFWAHIIMAYAFTIWTCYMLMKEYETVANMRLQFLASEGRRPDQFTVLVRNVPPDPDETVSELVEHFFLVNHPDNYLTHQVVCNANKLADLVSKKTKLQNWLDYYQLKYTRNNSQIRPITKLGCLGLCGQKVDAIEHYIAEVDKTSKEIAEERENVVNDQKSVMPASFVSFKTRWAAAVCAQTTQTRNPTEWLTEWAAEPRDIYWPNLAIPYVSLTVRRLVMNVAFFFLTFFFIIPIAFVQSLATIEGIEKVAPFLKVIIEKDFIKSLIQGLLAGIALKLFLIFLPAILMTMSKFEGFTSVSFLERRSASRYYIFNLVNVFLGSVIAGAAFEQLNSFLNQSPNQIPKTIGMAIPMKATFFITYIMVDGWAGVAGEILMLKPLIIYHLKNAFLVKTEKDREEAMNPGSIGFNTGEPQIQLYFLLGLVYAPVTPMLLPFILVFFALAYVVYRHQIINVYNQEYESAAAFWPDVHGRVITALIISQLLLMGLLGTKHAASAAPFLIALPVITIGFHRFCKGRFEPAFVRYPLQEAMMKDTLERAREPNLNLKGYLQDAYIHPVFKGGDNDDDGDMIGKLENEVIIVPTKRQSRRNTPAPSRISGESSPSLAVINGKEV

SEQ ID NO: 44819 - protein, 691 aa, Arabidopsis thaliana
  peptide (1)..(691): Ceres Seq. ID no. 13646333
MPERELIDHAGLDSVVYLRIYWLGLKIFAPIAMLAWAVLVPVNWTNNELELAKHFKNVTSSDIDKLTISNIPEGSNRFWAHIIMAYAFTIWTCYMLMKEYETVANMRLQFLASEGRRPDQFTVLVRNVPPDPDETVSELVEHFFLVNHPDNYLTHQVVCNANKLADLVSKKTKLQNWLDYYQLKYTRNNSQIRPITKLGCLGLCGQKVDAIEHYIAEVDKTSKEIAEERENVVNDQKSVMPASFVSFKTRWAAAVCAQTTQTRNPTEWLTEWAAEPRDIYWPNLAIPYVSLTVRRLVMNVAFFFLTFFFIIPIAFVQSLATIEGIEKVAPFLKVIIEKDFIKSLIQGLLAGIALKLFLIFLPAILMTMSKFEGFTSVSFLERRSASRYYIFNLVNVFLGSVIAGAAFEQLNSFLNQSPNQIPKTIGMAIPMKATFFITYIMVDGWAGVAGEILMLKPLIIYHLKNAFLVKTEKDREEAMNPGSIGFNTGEPQIQLYFLLGLVYAPVTPMLLPFILVFFALAYVVYRHQIINVYNQEYESAAAFWPDVHGRVITALIISQLLLMGLLGTKHAASAAPFLIALPVITIGFHRFCKGRFEPAFVRYPLQEAMMKDTLERAREPNLNLKGYLQDAYIHPVFKGGDNDDDGDMIGKLENEVIIVPTKRQSRRNTPAPSRISGESSPSLAVINGKEV

SEQ ID NO: 44820 - DNA, 2965 bp, Arabidopsis thaliana
  misc_feature (1)..(2965): Ceres Seq. ID no. 12562108
  misc_feature (1)..(2965): Ortholog of  Ceres SEQ ID NO 14303430 as cited in SEQ ID NO 54795
  misc_feature (1)..(2965): Ortholog of  Ceres SEQ ID NO 12465083 as cited in SEQ ID NO 68239
aagttttctccagaacctgacggaaaaaaacttgaatctgcaaatcgacttcccccggagaatgcgatcggagatcggaaactgaggaattgctgctctctactcgcggtgtttagtttacgattggaatatggggaagatatttagctggttagtggtgttattgtcattgatctcattagtccctgttccatcggaatcggctgttttgagtgtagatctaggttcagaatgggttaaagttgccgtagttaatctgaaacgaggacagagtccaatctctgtagccattaatgagatgtccaagaggaaatccccagctttagtagcatttcaatctggagaccggttactaggcgaggaggctgcgggaataacggctcgttatccgaataaagtttattcacaactgagggatatggtgggaaaacctttcaaacatgttaaggatttcattgattctgtctacttgccttttgatattgtagaagattctagaggtgcagttggtattaagatcgatgacggttcgactgtttactcagtggaggagttgttagctatgatcttgggttatgcctcaaatctagctgagttccatgctaaaatcccagtgaaggatatggttgtttcagttccaccttactttggacaggctgagagacggggtttgatccaggcttctcagttggctggggttaatgtcctctccctggttaatgagcattccggtgctgctttgcaatatgggattgataaggattttgctaatgggtcgagacatgtcatattttatgacatgggttcaagtagtacttacgcagcccttgtctattactcagcttacagtgagaaggaatatggcaagactgtttctgtcaaccaatttcaggtcaaggatgttagatgggacttgggacttggaggacagagtatggagatgcgcttggtagagcactttgcagatgagtttaataaacagctcggtaatggagttgatgtgaggaagttccccaaagcaatggctaaattgaaaaaacaagtcaagcgtacaaaggaaattttgagtgcaaacactgcggctccaatatctgtggaatctcttcatgatgatcgtgacttcaggagcacaattacccgtgagaagtttgaggaactgtgtaaagatctgtgggagagatctcttacacctttaaaagatgtgctcaagcattcaggtttgaagattgatgatatatctgcagtggaactaataggaggagctactagagttcccaaactacagagcacaatccaggaatttattgggaaacaacagttagacaaacatctagacgctgatgaggctattgtcctcggctcagcactacatgctgctaacttgagcgatggaattaaattgaaacgtaggctaggtatagttgatggttccccctatggttttctggttgagttggaaggccctaatgttaagaaagatgagagcacaaagcagcaactcgtaccacggatgaaaaagctacccagcaagatgttcagatcctttgtccttgacaaagattttgacgtgtcacttgcttatgagtctgagggtattctaccaccaggaaccacctcccctgtgtttgcacagtattctgtctctggtttggcggatgcatctgagaaatattcttctcggaatctatcagcacctatcaaggcaaatctgcatttctctctaagtagaagtgggattctcagtctagatcgaggagatgctgtaattgaaatcacagaatgggtagacgttcctaagaagaacgtgactattgatagtaacacaactacatcaacaggcaatgccactgacgagaattcacaagaaaataaagaagacctgcaaaccgatgctgaaaacagcactgcttcaaatacaacagcagaagagccagctgttgcttctctgggcacagaaaaaaagctgaagaagcggacattcagaatacctctgaaggtagttgagaaaactgttggacctggagcaccattttcgaaagagtctcttgctgaagctaagataaaattagaagccttggacaagaaagatagggaaagaagaagaacggctgagttaaaaaacaaccttgaatcttatatatatgctaccaaagagaagctggaaacacccgagtttgaaaagatatccacccaagaagagcgcaaggcgtttgttgaaaagcttgatgaggtgcaagattggctttacatggatggagaagatgctaatgccacagagtttgagaagcggcttgactcacttaaagccatcggcagtcccatatctttccgatcagaggagcttacagcacgaccagtagcaattgaatatgctaggaaatacctaactgaactcaaagagatcataaaagaatgggagacgaacaaaacttggcttccaaaagaaaaaatcgacgaggtctcaaaggaagcagagaaagtaaaaagctggttagataagaatgtggctgagcaagaaaagacttctctgtggagcaaaccggtgttcacgtccactgaagtgtacgctaaagtatttactctacaagacaaggtcacaaaggtgaataagatcccaaagccaaagccaaagatagagaaagtaaccaagacggagaacacaacaaaggaggaggaacaatcaaaatcctctgatgaagctgccaaagaagaagaaagtcacgacgagctttgattaaggatatataataaatagagttttcgttaatttttgtgtttttaagagggaaaataggattaaaagtaggcagctgagatgagcaaaaggattttattcctttctcctcaacttcttcacatcaccattagaaacggaatattctgtgtttttgtttttcattatatcaagttttggtctctctatttctataactgaatcttcaatatatttagtagaagtttataa

SEQ ID NO: 44821 - protein, 867 aa, Arabidopsis thaliana
  peptide (1)..(867): Ceres Seq. ID no. 12562109
MGKIFSWLVVLLSLISLVPVPSESAVLSVDLGSEWVKVAVVNLKRGQSPISVAINEMSKRKSPALVAFQSGDRLLGEEAAGITARYPNKVYSQLRDMVGKPFKHVKDFIDSVYLPFDIVEDSRGAVGIKIDDGSTVYSVEELLAMILGYASNLAEFHAKIPVKDMVVSVPPYFGQAERRGLIQASQLAGVNVLSLVNEHSGAALQYGIDKDFANGSRHVIFYDMGSSSTYAALVYYSAYSEKEYGKTVSVNQFQVKDVRWDLGLGGQSMEMRLVEHFADEFNKQLGNGVDVRKFPKAMAKLKKQVKRTKEILSANTAAPISVESLHDDRDFRSTITREKFEELCKDLWERSLTPLKDVLKHSGLKIDDISAVELIGGATRVPKLQSTIQEFIGKQQLDKHLDADEAIVLGSALHAANLSDGIKLKRRLGIVDGSPYGFLVELEGPNVKKDESTKQQLVPRMKKLPSKMFRSFVLDKDFDVSLAYESEGILPPGTTSPVFAQYSVSGLADASEKYSSRNLSAPIKANLHFSLSRSGILSLDRGDAVIEITEWVDVPKKNVTIDSNTTTSTGNATDENSQENKEDLQTDAENSTASNTTAEEPAVASLGTEKKLKKRTFRIPLKVVEKTVGPGAPFSKESLAEAKIKLEALDKKDRERRRTAELKNNLESYIYATKEKLETPEFEKISTQEERKAFVEKLDEVQDWLYMDGEDANATEFEKRLDSLKAIGSPISFRSEELTARPVAIEYARKYLTELKEIIKEWETNKTWLPKEKIDEVSKEAEKVKSWLDKNVAEQEKTSLWSKPVFTSTEVYAKVFTLQDKVTKVNKIPKPKPKIEKVTKTENTTKEEEQSKSSDEAAKEEESHDEL

SEQ ID NO: 44822 - protein, 811 aa, Arabidopsis thaliana
  peptide (1)..(811): Ceres Seq. ID no. 12562110
MSKRKSPALVAFQSGDRLLGEEAAGITARYPNKVYSQLRDMVGKPFKHVKDFIDSVYLPFDIVEDSRGAVGIKIDDGSTVYSVEELLAMILGYASNLAEFHAKIPVKDMVVSVPPYFGQAERRGLIQASQLAGVNVLSLVNEHSGAALQYGIDKDFANGSRHVIFYDMGSSSTYAALVYYSAYSEKEYGKTVSVNQFQVKDVRWDLGLGGQSMEMRLVEHFADEFNKQLGNGVDVRKFPKAMAKLKKQVKRTKEILSANTAAPISVESLHDDRDFRSTITREKFEELCKDLWERSLTPLKDVLKHSGLKIDDISAVELIGGATRVPKLQSTIQEFIGKQQLDKHLDADEAIVLGSALHAANLSDGIKLKRRLGIVDGSPYGFLVELEGPNVKKDESTKQQLVPRMKKLPSKMFRSFVLDKDFDVSLAYESEGILPPGTTSPVFAQYSVSGLADASEKYSSRNLSAPIKANLHFSLSRSGILSLDRGDAVIEITEWVDVPKKNVTIDSNTTTSTGNATDENSQENKEDLQTDAENSTASNTTAEEPAVASLGTEKKLKKRTFRIPLKVVEKTVGPGAPFSKESLAEAKIKLEALDKKDRERRRTAELKNNLESYIYATKEKLETPEFEKISTQEERKAFVEKLDEVQDWLYMDGEDANATEFEKRLDSLKAIGSPISFRSEELTARPVAIEYARKYLTELKEIIKEWETNKTWLPKEKIDEVSKEAEKVKSWLDKNVAEQEKTSLWSKPVFTSTEVYAKVFTLQDKVTKVNKIPKPKPKIEKVTKTENTTKEEEQSKSSDEAAKEEESHDEL

SEQ ID NO: 44823 - protein, 771 aa, Arabidopsis thaliana
  peptide (1)..(771): Ceres Seq. ID no. 12562111
MVGKPFKHVKDFIDSVYLPFDIVEDSRGAVGIKIDDGSTVYSVEELLAMILGYASNLAEFHAKIPVKDMVVSVPPYFGQAERRGLIQASQLAGVNVLSLVNEHSGAALQYGIDKDFANGSRHVIFYDMGSSSTYAALVYYSAYSEKEYGKTVSVNQFQVKDVRWDLGLGGQSMEMRLVEHFADEFNKQLGNGVDVRKFPKAMAKLKKQVKRTKEILSANTAAPISVESLHDDRDFRSTITREKFEELCKDLWERSLTPLKDVLKHSGLKIDDISAVELIGGATRVPKLQSTIQEFIGKQQLDKHLDADEAIVLGSALHAANLSDGIKLKRRLGIVDGSPYGFLVELEGPNVKKDESTKQQLVPRMKKLPSKMFRSFVLDKDFDVSLAYESEGILPPGTTSPVFAQYSVSGLADASEKYSSRNLSAPIKANLHFSLSRSGILSLDRGDAVIEITEWVDVPKKNVTIDSNTTTSTGNATDENSQENKEDLQTDAENSTASNTTAEEPAVASLGTEKKLKKRTFRIPLKVVEKTVGPGAPFSKESLAEAKIKLEALDKKDRERRRTAELKNNLESYIYATKEKLETPEFEKISTQEERKAFVEKLDEVQDWLYMDGEDANATEFEKRLDSLKAIGSPISFRSEELTARPVAIEYARKYLTELKEIIKEWETNKTWLPKEKIDEVSKEAEKVKSWLDKNVAEQEKTSLWSKPVFTSTEVYAKVFTLQDKVTKVNKIPKPKPKIEKVTKTENTTKEEEQSKSSDEAAKEEESHDEL

SEQ ID NO: 44824 - DNA, 3102 bp, Arabidopsis thaliana
  misc_feature (1)..(3102): Ceres Seq. ID no. 12559357
  misc_feature (1)..(3102): Ortholog of  Ceres SEQ ID NO 13532807 as cited in SEQ ID NO 53012
  misc_feature (1)..(3102): Ortholog of  Ceres SEQ ID NO 15176375 as cited in SEQ ID NO 53238
  misc_feature (1)..(3102): Ortholog of  Ceres SEQ ID NO 15170532 as cited in SEQ ID NO 55671
  misc_feature (1)..(3102): Ortholog of  Ceres SEQ ID NO 14316507 as cited in SEQ ID NO 57397
  misc_feature (1)..(3102): Ortholog of  Ceres SEQ ID NO 13663060 as cited in SEQ ID NO 60964
  misc_feature (1)..(3102): Ortholog of  Ceres SEQ ID NO 13598532 as cited in SEQ ID NO 65204
  misc_feature (1)..(3102): Ortholog of  Ceres SEQ ID NO 13656849 as cited in SEQ ID NO 65764
  misc_feature (1)..(3102): Ortholog of  Ceres SEQ ID NO 13500573 as cited in SEQ ID NO 67431
  misc_feature (1)..(3102): Ortholog of  Ceres SEQ ID NO 13656501 as cited in SEQ ID NO 69206
gagaaactttcttctctctctctctctccgccattgttcgttccctctccacggtaatctatatccacccgtcgtcaatcggaactttacgaactccttatcaatcgtattttcactttccaattctgagttctcttctcgtttcgtcctctcttcctccgtatccacgggtctcgctttcggtttctagggtttcgcggttctgatcacaagttctgcttcaattgtaagcgatttgatcgcaagtagctgttaaatcggtgcgtaattcaacttttgaaatctcaaggtttagtctctgcaattctgattttgaacacagctagctagtagcagatttaagagttcgtcaaattaggattttgggtttgtttgggtccctttctcaccgaagttctgtatggcggctgggaggaatataagatatccagaccatgaactgagagaccaggaatcgaattctagattttccaggcgggatagtgcttatgcgaacgaggattataatcatgttaggaacggtgctattgataatggaaagggacgggttagtaatctaagacacggggatagagatagaattaagtctggagctagacaggaagagaacaaaatggttagtagtgggtttcggttatcgaagagcaatccaggtagtagagaagtatttatcgatcttggtcctaaaagatgcgggttttcagctaggtctgtggacagggaaccaggcgagctctctagtgagagtgggtcggatgatttgattgagtcggaatcactggcgaaagttaatggagttgtgaaggaggtagagaatagagctcaaagtcctgtggaaaagaagagaaagttttcaccaatagtatgggatagggatgaccatgagagaagtaatttgagcagaaatgaaaaacctgtggaggtcactcctcttcctcccccaccaccactagttaagaggtcaagccagtcacctagtgtcagttgtggtggtaattctcattattcacctgcaaagagtgacatgcatcaagatcctgtggaagttggtgtttctgcggtttctatgcctgctttgtcaccttcggtagagatgtcctctttgtgtgtggtagaacagtcatcaaatgctgagcaggatgacaaacaagagcatgcaacacacctggaagaggatgaaaacatgccaacacggcatatatcatcctctaggtgggctgctggtaatagttctccaactgatgaagttgaaatagtagaagaagttggggaaaagaaaaggaggaagaaaccatttcccgtgcaggggagatttcgcaatacctctcaaacacctgaggtcggggagttagtgagggaaggttatagatcatctgattccgatgaaagggggcaccattctttaccgggaagcagagatgattttgaggagagagatgctgttaagagtgacaagatggaaatagatgaggaggaacacagaagagaaaactctgttgacagccttagtgaaacagattcagatgacgaatatgtacggcatgagacacctgaacctgccagtactccactgagaagtataaacatgctccagggttgtagaagtgttgatgaatttgagaggttaaataagatcgatgaaggtacttatggtgttgtttatagagcaaaggataagaagacaggcgaaattgtggcattgaagaaggtgaagatggaaaaagaaagagaaggttttccattgacttctcttagggaaattaacatcctcctttcttttcatcatccatcaatagtggatgttaaagaggtggtcgtgggtagcagccttgatagcatattcatggtgatggaatacatggaacatgatcttaaagcattgatggagacaatgaagcagcgttttagtcaaagtgaagttaagtgcttaatgcttcaacttttagagggcgtcaagtatcttcacgacaactgggtgcttcatcgagatttgaaaacatctaacctgcttttaaacaatcggggtgagttgaagatatgtgactttggtttggctcggcaatatggcagcccgctcaagccttatactcatctggttgttacgctttggtacagggcacctgaacttctcttgggagcaaaacaatattctacagccattgacatgtggtcactgggctgtatcatggcagaactattaatgaaggcgccattgttcaatgggaaaacggagtttgatcaacttgacaagattttcagaatccttggtactcccaatgaatctatttggcctgggttctctaaactacctggagtcaaggtcaactttgtcaagcatcagtataacctattacgtaagaaattcccagccacttcgttcactggtgcaccagttctgtccgatgctgggtttgacttactgaacaagctcctaacgtacgatcctgaaaggagaataactgttaatgaagctctaaagcatgattggttccgcgaagtccctctgccaaaatccaaagatttcatgcctacttttcctgctcaacatgcccaagacaggcgtgggaggagaatggtaaagagccctgatcctttggaagagcaacgtaggaaggaattaacgcaaaccgaacttgggtctggcggtctgtttggctgaagtacagcacaccggtcgaagatagcagttggaatacaaccttgatattctcaaataccttggaattaccacattttaggcgagggctgctgcttaagcggaggttggaatatttgtatctcagaatatcattcatgctttctttattcactttgagggtccgtggtgatttgtgaagatgattttcctcctttcgccactgagaatccttgcaggtttaatgtgttcacaagctaggctggccagttagtgctatggctttctgacagtgcttgttttgtaagacaatctccaatgtatagctctatatcttactctaaaatagagttgctttctctccaatgtatatttctattttctagtctaaaaaagaatatttttagaaatattctatttctatttatatactaataccttttaattatataatttacaatttactc

SEQ ID NO: 44825 - protein, 752 aa, Arabidopsis thaliana
  peptide (1)..(752): Ceres Seq. ID no. 12559358
MAAGRNIRYPDHELRDQESNSRFSRRDSAYANEDYNHVRNGAIDNGKGRVSNLRHGDRDRIKSGARQEENKMVSSGFRLSKSNPGSREVFIDLGPKRCGFSARSVDREPGELSSESGSDDLIESESLAKVNGVVKEVENRAQSPVEKKRKFSPIVWDRDDHERSNLSRNEKPVEVTPLPPPPPLVKRSSQSPSVSCGGNSHYSPAKSDMHQDPVEVGVSAVSMPALSPSVEMSSLCVVEQSSNAEQDDKQEHATHLEEDENMPTRHISSSRWAAGNSSPTDEVEIVEEVGEKKRRKKPFPVQGRFRNTSQTPEVGELVREGYRSSDSDERGHHSLPGSRDDFEERDAVKSDKMEIDEEEHRRENSVDSLSETDSDDEYVRHETPEPASTPLRSINMLQGCRSVDEFERLNKIDEGTYGVVYRAKDKKTGEIVALKKVKMEKEREGFPLTSLREINILLSFHHPSIVDVKEVVVGSSLDSIFMVMEYMEHDLKALMETMKQRFSQSEVKCLMLQLLEGVKYLHDNWVLHRDLKTSNLLLNNRGELKICDFGLARQYGSPLKPYTHLVVTLWYRAPELLLGAKQYSTAIDMWSLGCIMAELLMKAPLFNGKTEFDQLDKIFRILGTPNESIWPGFSKLPGVKVNFVKHQYNLLRKKFPATSFTGAPVLSDAGFDLLNKLLTYDPERRITVNEALKHDWFREVPLPKSKDFMPTFPAQHAQDRRGRRMVKSPDPLEEQRRKELTQTELGSGGLFG

SEQ ID NO: 44826 - protein, 681 aa, Arabidopsis thaliana
  peptide (1)..(681): Ceres Seq. ID no. 12559359
MVSSGFRLSKSNPGSREVFIDLGPKRCGFSARSVDREPGELSSESGSDDLIESESLAKVNGVVKEVENRAQSPVEKKRKFSPIVWDRDDHERSNLSRNEKPVEVTPLPPPPPLVKRSSQSPSVSCGGNSHYSPAKSDMHQDPVEVGVSAVSMPALSPSVEMSSLCVVEQSSNAEQDDKQEHATHLEEDENMPTRHISSSRWAAGNSSPTDEVEIVEEVGEKKRRKKPFPVQGRFRNTSQTPEVGELVREGYRSSDSDERGHHSLPGSRDDFEERDAVKSDKMEIDEEEHRRENSVDSLSETDSDDEYVRHETPEPASTPLRSINMLQGCRSVDEFERLNKIDEGTYGVVYRAKDKKTGEIVALKKVKMEKEREGFPLTSLREINILLSFHHPSIVDVKEVVVGSSLDSIFMVMEYMEHDLKALMETMKQRFSQSEVKCLMLQLLEGVKYLHDNWVLHRDLKTSNLLLNNRGELKICDFGLARQYGSPLKPYTHLVVTLWYRAPELLLGAKQYSTAIDMWSLGCIMAELLMKAPLFNGKTEFDQLDKIFRILGTPNESIWPGFSKLPGVKVNFVKHQYNLLRKKFPATSFTGAPVLSDAGFDLLNKLLTYDPERRITVNEALKHDWFREVPLPKSKDFMPTFPAQHAQDRRGRRMVKSPDPLEEQRRKELTQTELGSGGLFG

SEQ ID NO: 44827 - protein, 544 aa, Arabidopsis thaliana
  peptide (1)..(544): Ceres Seq. ID no. 12559360
MHQDPVEVGVSAVSMPALSPSVEMSSLCVVEQSSNAEQDDKQEHATHLEEDENMPTRHISSSRWAAGNSSPTDEVEIVEEVGEKKRRKKPFPVQGRFRNTSQTPEVGELVREGYRSSDSDERGHHSLPGSRDDFEERDAVKSDKMEIDEEEHRRENSVDSLSETDSDDEYVRHETPEPASTPLRSINMLQGCRSVDEFERLNKIDEGTYGVVYRAKDKKTGEIVALKKVKMEKEREGFPLTSLREINILLSFHHPSIVDVKEVVVGSSLDSIFMVMEYMEHDLKALMETMKQRFSQSEVKCLMLQLLEGVKYLHDNWVLHRDLKTSNLLLNNRGELKICDFGLARQYGSPLKPYTHLVVTLWYRAPELLLGAKQYSTAIDMWSLGCIMAELLMKAPLFNGKTEFDQLDKIFRILGTPNESIWPGFSKLPGVKVNFVKHQYNLLRKKFPATSFTGAPVLSDAGFDLLNKLLTYDPERRITVNEALKHDWFREVPLPKSKDFMPTFPAQHAQDRRGRRMVKSPDPLEEQRRKELTQTELGSGGLFG

SEQ ID NO: 44828 - DNA, 1580 bp, Arabidopsis thaliana
  misc_feature (1)..(1580): Ceres Seq. ID no. 12603792
  misc_feature (1)..(1580): Ortholog of  Ceres SEQ ID NO 13502874 as cited in SEQ ID NO 66298
  misc_feature (1)..(1580): Ortholog of  Ceres SEQ ID NO 12614124 as cited in SEQ ID NO 68392
gcttattagcaacaatgacagtaatggtcagctttgatcttctaaattgtttcatctttaccctcatattcctcatctcaactctctttctctttgttttattctataagaaaccaaacgatggatttgatgtacctccaagccctccttctcttcccatcattggtcatcttcatcttctcctctttgcttcaatccacaagtgttttcaaaaaatctcatccaaatacggaccttttctccatcttcgcattttccatgtccccattgttcttgtatcctctgcctcaacggcttacgatatcttcaagacaaacgacattaatgtctcttatcgtggtgatgttgcaatcgatgaatgcattgtgtttggttcttttggatatttccgagctccatgtgaagattactggaaattcatgagaaagctcatcatggccagggcactcggaccccaagcgctagagcggacacgtggtgttcgtgcagctgagctagagaggtttcatagaaaattactcgataaggctatgaaaaaacaaagccttaagatcggtgaagaagcaaggatactcgttaacaacaccctcggaaaaatgagcctaggaagtagtttttcaatagagaacaatgatgggacaaaagtttcagaatattctatcaagttagctgatttgtctcaaatgttttgtgtggcacaaatatttcataagccgcttgagaagctagggatctctcttttaaagaagcagattatggatgtttcacacaaatttgaggagttgctagaaaatattgttgtgaagtacgaggaaaaaatggacaaccatcaaagtactgaattcatggatgcattattggcagcttatcaagacgaaaacgcagagtataagatcactagaaaccatatcaaggcactactagcggagcttttctttggagccggtgaatcatcttcttcaacaacaaggtgggcaatgggagaaattttcaacaatcctaggatctttgagaaactaagaacagaaatcgattcagtggtggggacaacaaggttgattcaagaaagtgatctaccaaaacttccttacttgcaagcagtcgtgaaagaatctctaagattacacccggtgggagcggtcttgccaagagaatttacgcaagattgtaacattggagggttctatatacatgagggaacatcacttgtcgttaatgcttatgctgtgatgagagatcctgatatttgggaagatcctaatgagtttaagccggaaaggtttctagatgcctcaagattagggcaagaggaggagaaaaaggagaaaacactaaagttcctcccatttggcgctggaaggagaggatgtcctggattatatcttggttataccttagtagaaaccacaattggagtgatggtgcaatgctttgactgggaaatcgaaggagataaagtcaacatgcaagaaggttccggattaagatttttcttggatttggctcatccccttaagtgcactcctattcctcgaatcataaatcatgaaccttctaatacgcagattccaaattcgtga

SEQ ID NO: 44829 - protein, 525 aa, Arabidopsis thaliana
  peptide (1)..(525): Ceres Seq. ID no. 12603793
LLATMTVMVSFDLLNCFIFTLIFLISTLFLFVLFYKKPNDGFDVPPSPPSLPIIGHLHLLLFASIHKCFQKISSKYGPFLHLRIFHVPIVLVSSASTAYDIFKTNDINVSYRGDVAIDECIVFGSFGYFRAPCEDYWKFMRKLIMARALGPQALERTRGVRAAELERFHRKLLDKAMKKQSLKIGEEARILVNNTLGKMSLGSSFSIENNDGTKVSEYSIKLADLSQMFCVAQIFHKPLEKLGISLLKKQIMDVSHKFEELLENIVVKYEEKMDNHQSTEFMDALLAAYQDENAEYKITRNHIKALLAELFFGAGESSSSTTRWAMGEIFNNPRIFEKLRTEIDSVVGTTRLIQESDLPKLPYLQAVVKESLRLHPVGAVLPREFTQDCNIGGFYIHEGTSLVVNAYAVMRDPDIWEDPNEFKPERFLDASRLGQEEEKKEKTLKFLPFGAGRRGCPGLYLGYTLVETTIGVMVQCFDWEIEGDKVNMQEGSGLRFFLDLAHPLKCTPIPRIINHEPSNTQIPNS

SEQ ID NO: 44830 - protein, 521 aa, Arabidopsis thaliana
  peptide (1)..(521): Ceres Seq. ID no. 12603794
MTVMVSFDLLNCFIFTLIFLISTLFLFVLFYKKPNDGFDVPPSPPSLPIIGHLHLLLFASIHKCFQKISSKYGPFLHLRIFHVPIVLVSSASTAYDIFKTNDINVSYRGDVAIDECIVFGSFGYFRAPCEDYWKFMRKLIMARALGPQALERTRGVRAAELERFHRKLLDKAMKKQSLKIGEEARILVNNTLGKMSLGSSFSIENNDGTKVSEYSIKLADLSQMFCVAQIFHKPLEKLGISLLKKQIMDVSHKFEELLENIVVKYEEKMDNHQSTEFMDALLAAYQDENAEYKITRNHIKALLAELFFGAGESSSSTTRWAMGEIFNNPRIFEKLRTEIDSVVGTTRLIQESDLPKLPYLQAVVKESLRLHPVGAVLPREFTQDCNIGGFYIHEGTSLVVNAYAVMRDPDIWEDPNEFKPERFLDASRLGQEEEKKEKTLKFLPFGAGRRGCPGLYLGYTLVETTIGVMVQCFDWEIEGDKVNMQEGSGLRFFLDLAHPLKCTPIPRIINHEPSNTQIPNS

SEQ ID NO: 44831 - protein, 518 aa, Arabidopsis thaliana
  peptide (1)..(518): Ceres Seq. ID no. 12603795
MVSFDLLNCFIFTLIFLISTLFLFVLFYKKPNDGFDVPPSPPSLPIIGHLHLLLFASIHKCFQKISSKYGPFLHLRIFHVPIVLVSSASTAYDIFKTNDINVSYRGDVAIDECIVFGSFGYFRAPCEDYWKFMRKLIMARALGPQALERTRGVRAAELERFHRKLLDKAMKKQSLKIGEEARILVNNTLGKMSLGSSFSIENNDGTKVSEYSIKLADLSQMFCVAQIFHKPLEKLGISLLKKQIMDVSHKFEELLENIVVKYEEKMDNHQSTEFMDALLAAYQDENAEYKITRNHIKALLAELFFGAGESSSSTTRWAMGEIFNNPRIFEKLRTEIDSVVGTTRLIQESDLPKLPYLQAVVKESLRLHPVGAVLPREFTQDCNIGGFYIHEGTSLVVNAYAVMRDPDIWEDPNEFKPERFLDASRLGQEEEKKEKTLKFLPFGAGRRGCPGLYLGYTLVETTIGVMVQCFDWEIEGDKVNMQEGSGLRFFLDLAHPLKCTPIPRIINHEPSNTQIPNS

SEQ ID NO: 44832 - DNA, 2763 bp, Arabidopsis thaliana
  misc_feature (1)..(2763): Ceres Seq. ID no. 13646334
  misc_feature (1)..(2763): Ortholog of  Ceres SEQ ID NO 15168506 as cited in SEQ ID NO 57671
  misc_feature (1)..(2763): Ortholog of  Ceres SEQ ID NO 15180420 as cited in SEQ ID NO 0
gaaaaaatcgaagaaaattagaaaaatcggaagagcgatcgaagaggattttgaaccgccatggcttcttcttcgctctctaatctgatgctcgccattcatgagaagaagacgagctccgttgatctctaccgtcctctccgcaactacgttactttcacctactctgagcgcgaggctcagcttatagacgacgatctcgagaccttgaagcagctccgatccgatatagaacgcgtttccgatccttctccagctgctcggcgagaccttctcatctcctattacaaagttctttgtcttgtggagacgcgatttccaatttcccctgacaaggatcatgtcaacgccgtctctttcgtatggtacgatgctttcaagcaaaagcataaagctactcagcagaacattcatttggagaaagcagctgttctattcaatcttggtgctagctacagccagattggactcggtcatgaccgcaccaccgtcgatgggcgtcgtcaggcttcacatgcgttcatggctgcagcaggggcgttcgctcacttgagggataacgagtccattaaggcgacgatcgggccgagcactaccgtggatgtgtcggttgagtgtgttggaatgttggaacggttgatggtggcgcaggcgcaggaatgtgtctttgaaaataccattgctaaaggaagtactcctggtgtctctgctaaaattgctaggcaggttggcatattttatgaggaggctttatctgcgctaatcatttcgccattgaaggatcatttcgacaaaggctggatttctcatgtgcagctgaaagcagcactcttctatggtgaagcttgctttagatatggaaaagagttgcacgagaaagaggaaattgcagaagaaattgcacggctgaggagtggagccagccgtttggcagaagcaaagaagtcttcaaggggagctcctgctcagcttatagaagcgatgaacacactagagtctagcattaatggcaatttggatagggctgtcaaggaaaacgacagagtgtacctcatgagagttccttctccttcttctttgtctccacttcccgccttctcaatggttaagccaatgaacatgactgatattttggatgcaagcaaggaaaaaatgttttcaatccttgttccagacagcagtgcaaaggctctctctagatacactgagatggtcgatgatgtaattagaactcaggcggagagattacagcaagctagcgaactaactcgagttaggctcaaagagatggatcttccagattctattctcgctgtggatggtaattcagctcttcctgttgatcttaaagaagatgtagaagctgttcagatcagtggtggtccagctggcttggaagctgaactgcagcaacttagagatttgaagagggttaatcaggaactgttggtgcacactgaagagcttttgcagaaagaagcaactgaagattctcagttcagaagtcaatttgggactcggtggactaggcctcaatctagcacactgacaaagaacttgcaggataggctaaatcggtttgcagccaatttgaaacaagctggcgaaagtgatgttaagattgagcgatcagtgagagataactccgccctcatgtctattcttgatcgacggccgatagagtctgctgtcccaactcttgctaggccaataatgtctctggacgcaacagaggatgctattgtgggaactttgaagcagagtctgaggcaactggaaaatcttggtgctcagcgggcaggtcttgaagacatgctcaaagagatgaagagaaaggatgacatactgccaaagctgatgaccataacaggctcctatgaagatatgttcaggaaagagatatcaaagtatgaccacatttgtgaagatatttcccaaaacattgaagttcaagaacaattattgatgcaaattcaggctcaaaatgaagagttttcaactattttcaatcttgaagattataaagcatccaaggagaagtgctacaagcagattcaagctgcaataatgaagtatcgagagatcaaggagaacatcaatgagggcctgaagttctatgtcactctccaagatgcaatcacgaatgtgaagcagcagtgcagtgattttgtgatgacaaggagtatccagtgccgagatatgattgaagatgtgcaacgacagatgtctggtttgagttttcaggatcatagaagctccggcccatacccatctgtgcatcaaccaacggcttcaagtccgcctcctccaccagaaactcagaatccatctcatcctcacccacatgcaccatactatagaccgcctgagcagatgtcaaggcctggctactctatcccaccctacggtccacctcccccataccatactcctcatggccaggcgccacaaccataccctcctcaggcacagcaacagcctcatccatcatggcaacaaggctcttactatgatccgcagggacagcagcctcggcctccttatcccggccagagcccataccaacctcctcaccaaggtggaggatactacaggcaatgagttactttgggagcaataaaattctggtgttatatatctattgttgtgtttcctgtgagtacttgatgtgtgtctatctctttgacatgtttctgtcatgaaattgaatatctggtttgatagtgactcaaattctttattcaaagtagagccgatgtgatg

SEQ ID NO: 44833 - protein, 846 aa, Arabidopsis thaliana
  peptide (1)..(846): Ceres Seq. ID no. 13646335
MASSSLSNLMLAIHEKKTSSVDLYRPLRNYVTFTYSEREAQLIDDDLETLKQLRSDIERVSDPSPAARRDLLISYYKVLCLVETRFPISPDKDHVNAVSFVWYDAFKQKHKATQQNIHLEKAAVLFNLGASYSQIGLGHDRTTVDGRRQASHAFMAAAGAFAHLRDNESIKATIGPSTTVDVSVECVGMLERLMVAQAQECVFENTIAKGSTPGVSAKIARQVGIFYEEALSALIISPLKDHFDKGWISHVQLKAALFYGEACFRYGKELHEKEEIAEEIARLRSGASRLAEAKKSSRGAPAQLIEAMNTLESSINGNLDRAVKENDRVYLMRVPSPSSLSPLPAFSMVKPMNMTDILDASKEKMFSILVPDSSAKALSRYTEMVDDVIRTQAERLQQASELTRVRLKEMDLPDSILAVDGNSALPVDLKEDVEAVQISGGPAGLEAELQQLRDLKRVNQELLVHTEELLQKEATEDSQFRSQFGTRWTRPQSSTLTKNLQDRLNRFAANLKQAGESDVKIERSVRDNSALMSILDRRPIESAVPTLARPIMSLDATEDAIVGTLKQSLRQLENLGAQRAGLEDMLKEMKRKDDILPKLMTITGSYEDMFRKEISKYDHICEDISQNIEVQEQLLMQIQAQNEEFSTIFNLEDYKASKEKCYKQIQAAIMKYREIKENINEGLKFYVTLQDAITNVKQQCSDFVMTRSIQCRDMIEDVQRQMSGLSFQDHRSSGPYPSVHQPTASSPPPPPETQNPSHPHPHAPYYRPPEQMSRPGYSIPPYGPPPPYHTPHGQAPQPYPPQAQQQPHPSWQQGSYYDPQGQQPRPPYPGQSPYQPPHQGGGYYRQ

SEQ ID NO: 44834 - protein, 837 aa, Arabidopsis thaliana
  peptide (1)..(837): Ceres Seq. ID no. 13646336
MLAIHEKKTSSVDLYRPLRNYVTFTYSEREAQLIDDDLETLKQLRSDIERVSDPSPAARRDLLISYYKVLCLVETRFPISPDKDHVNAVSFVWYDAFKQKHKATQQNIHLEKAAVLFNLGASYSQIGLGHDRTTVDGRRQASHAFMAAAGAFAHLRDNESIKATIGPSTTVDVSVECVGMLERLMVAQAQECVFENTIAKGSTPGVSAKIARQVGIFYEEALSALIISPLKDHFDKGWISHVQLKAALFYGEACFRYGKELHEKEEIAEEIARLRSGASRLAEAKKSSRGAPAQLIEAMNTLESSINGNLDRAVKENDRVYLMRVPSPSSLSPLPAFSMVKPMNMTDILDASKEKMFSILVPDSSAKALSRYTEMVDDVIRTQAERLQQASELTRVRLKEMDLPDSILAVDGNSALPVDLKEDVEAVQISGGPAGLEAELQQLRDLKRVNQELLVHTEELLQKEATEDSQFRSQFGTRWTRPQSSTLTKNLQDRLNRFAANLKQAGESDVKIERSVRDNSALMSILDRRPIESAVPTLARPIMSLDATEDAIVGTLKQSLRQLENLGAQRAGLEDMLKEMKRKDDILPKLMTITGSYEDMFRKEISKYDHICEDISQNIEVQEQLLMQIQAQNEEFSTIFNLEDYKASKEKCYKQIQAAIMKYREIKENINEGLKFYVTLQDAITNVKQQCSDFVMTRSIQCRDMIEDVQRQMSGLSFQDHRSSGPYPSVHQPTASSPPPPPETQNPSHPHPHAPYYRPPEQMSRPGYSIPPYGPPPPYHTPHGQAPQPYPPQAQQQPHPSWQQGSYYDPQGQQPRPPYPGQSPYQPPHQGGGYYRQ

SEQ ID NO: 44835 - protein, 692 aa, Arabidopsis thaliana
  peptide (1)..(692): Ceres Seq. ID no. 13646337
MAAAGAFAHLRDNESIKATIGPSTTVDVSVECVGMLERLMVAQAQECVFENTIAKGSTPGVSAKIARQVGIFYEEALSALIISPLKDHFDKGWISHVQLKAALFYGEACFRYGKELHEKEEIAEEIARLRSGASRLAEAKKSSRGAPAQLIEAMNTLESSINGNLDRAVKENDRVYLMRVPSPSSLSPLPAFSMVKPMNMTDILDASKEKMFSILVPDSSAKALSRYTEMVDDVIRTQAERLQQASELTRVRLKEMDLPDSILAVDGNSALPVDLKEDVEAVQISGGPAGLEAELQQLRDLKRVNQELLVHTEELLQKEATEDSQFRSQFGTRWTRPQSSTLTKNLQDRLNRFAANLKQAGESDVKIERSVRDNSALMSILDRRPIESAVPTLARPIMSLDATEDAIVGTLKQSLRQLENLGAQRAGLEDMLKEMKRKDDILPKLMTITGSYEDMFRKEISKYDHICEDISQNIEVQEQLLMQIQAQNEEFSTIFNLEDYKASKEKCYKQIQAAIMKYREIKENINEGLKFYVTLQDAITNVKQQCSDFVMTRSIQCRDMIEDVQRQMSGLSFQDHRSSGPYPSVHQPTASSPPPPPETQNPSHPHPHAPYYRPPEQMSRPGYSIPPYGPPPPYHTPHGQAPQPYPPQAQQQPHPSWQQGSYYDPQGQQPRPPYPGQSPYQPPHQGGGYYRQ

SEQ ID NO: 44836 - DNA, 3978 bp, Arabidopsis thaliana
  misc_feature (1)..(3978): Ceres Seq. ID no. 13646346
  misc_feature (1)..(3978): Ortholog of  Ceres SEQ ID NO 13600485 as cited in SEQ ID NO 1221
gacaatcttaggctcctccttctctcgctctcttccctctgttgctcggaaagctttggcctttttggttttcttatggctaattctcttctcaaaactattcgtatctgagagagattgagataataaatatagagagagatccaaaccagaagcaatctttttttgtttgtctttctgtgaagattcgtatcatttttctccggcaaaccaacggcggcgatccactcttctctatagcttctattatgttggatttatcttcttctttggaagaaatgaacaagtttggttttttcgctttcatgaatgtgatccggtctatataagggtacttagagtttggtgaagcttgaatctaagagatgaagagggttagagaagaggtttacgttgaaccacaaatgcgaggacctactgtttcctctcgaggagaaacaaatggtaggccttcaacgattagtggcggaggaacaacgggagggctaacaacagttgatgctttgacatatcttaaagctgtgaaggatatgtttcaagacaacaaagagaaatatgagactttccttggagtcatgaaggacttcaaagctcagagagttgacactaatggcgtcatagcaagagtaaaagatttgttcaagggctatgacgacttacttttgggttttaataccttcttacctaaggggtacaaaattacccttcagcctgaggatgagaaacctaagaagccagtggatttccaagtagctatcgaatttgtcaacaggattaaggcgcgatttggaggtgatgaccgtgcatataaaaaatttctagacatcttgaacatgtatagaaaggaaaccaagtccatcaacgaggtctatcaagaggttactctgttgttccaggaccatgaagatctgctcggggagtttgttcatttcttaccagattttcgaggatcagtttctgttaatgaccctcttttccagaggaacacaataccgcgtgatagaaattctacatttcctggcatgcatccaaagcattttgagaagaaaataaaacggagtaggcatgatgagtatactgaactctctgatcaacgagaggatggtgatgagaaccttgtggcctactctgctgacatcggaagtcaaaaaaatctactgtctacaaaccatatggccaaggcaataaatgaactggatcttactgactgtgcacaatgtacaccaagttatcgtcgcttgccagatgattatcctattcagattccaagctacagaaattcacttggtgaaaaggtgcttaacgatcattgggtatctgtcacatcggggagtgaggattactcattcaaacacatgcgcaaaaatcagtatgaagaaagcttgtttcgatgtgaggatgataggtttgagttggacatgttactagagtctgtaagtgcagccatcaagcgtgtggaaagtcttctggaaaagattaacaacaatacaatctctatagagacaccaatttgtattagagaacacttatcaggcaaatgcattgagcggttgtacggggattatgggcttgatgtcatggattttctgaagaagaattctcatatcgccttacctgtgattctaacacgcttgaagcagaaacaagaagaatgggctaggtgtcgcgctgatttcaggaaagtatgggctgaagtatatgctaagaatcatcacaaatcactcgatcatcgtagtttctatttcaagcagcaggactccaagaatttaagcacaaaaggtttagtggcggagattaaagatatcagtgagagaaagcataaagaagacctgcttcgtgccattgctgttggaactaagccctctttcaccccagatgtggagttcatttatactgatacaaaagttcatactgacctatataagctaatcaagtattattgtgaggaaatatgtgctactgaacagtcggataaagtaatgaagctatgggtaacctttttggagcccatgtttggcgttccttctaggtctgaaactattgagacaatgaaagatgttgcaaagatcgaagacaaccaagagcaccatgatgcaagtgaggcagtgaaggaaaatacatgtgacggttctatggcctcaaaccttaaaccgttaacacctccaaaaatgcctaacaaagaaaacccaatgatacaaggaagctcttttgcgcaagatttgccagtcaacacaggagaaagcattcagcaagataaactgcatgatgttgcagctataactaatgaggatagccagccttccaaactggtgtcaaccagaaacgatttgataatggagggtgtagagaatcgtagtagggtcagtgatgtatcaatgggagggcataaggtcgagcgagaagagggtgaattatcccccactgaaagttgcgagcaagaaaatttcgaggtttataaagagaatgggctcgagcctgtgcagaaactaccagataatgaaataagtaatacagaccgagaacccaaagagggtgcatgtggtactgaagctgtaacaaggagcaatgccctccctgaagatgatgataataaaataactcaaaagttatcagaaggggatgaaaatgcctcgaaatttattgtctcagcaagcaagtttggtggccaagtttcttccgatgaagagcataaaggagctgagagtgaaaatgaggctggagggatggttaattccaacgagggtgaagatggatcctttttcacattttcagaacggtatctgcaacctgtaaagccccttgcaaagcatgtgcctgggacactgcaagcaagtgaatgcgacacccggaatgattctcgagttttctatgggaatgattcactctatgtgctttttaggcttcatcaaatgttgtacgagagaatacaatcagcaaagatacattcagagaggaaatggaaagctccagatagcacatctactgattcttataccaggttcatggaagccctttacaatttacttgatggctctagcgacaatacaaagtttgaagatgaatgtcgagctattatcggagcacaatcatatgttctcttcacattggacaagctagttcaaaagtttgttaagcatcttcacgcagtcgcagctgatgagacagacaccaagcttctgcagctatatgcatacgagaactacagaaaaccaggaagattctttgatatagtgtaccatgagaatgctcgagcccttctccatgatcagaacatatacaggattgaatattcatctgcccaaacccgtctcggaattcaacttatgaacagctggaatgatcagcctgaagttacagctgtaacagtggaaccaggttttgctaattatctgcagaatgactttctttcgtttgtcagtgatgaagagaaacccggactatttctgaaaaggaacaaggcaaaattaagtggtccgggtgaagaatctctagggatgtcacgtgccttggaaggattgaacattatcaatgaggttgaatgtaagatagcttgcagttctttcaaggtcaagtatgaaccacacacagcagatcttttatatagaagaaagcagaagaaagcaacactgaatccaactggacctgaaaatgttaaaacctctgatagtagtgaactctcgagaaagaaacgaatatcgcgctttcacatgagtcttaaccgcagacttgtcgccttgccttaactcaagaacgccgtgtgaagttctttgctgagaatgagatatgcaagaatgagtagtagtagagagagactagagaataactgtctttgacaaagattcttgcatcattttaggctcaaagagattcacatggcaacaaccatagtttttatcttctacagtctacactgcagctggagccgccagttttgctgtatagtgttagaatatcttttttttttttaaggatgatgct

SEQ ID NO: 44837 - protein, 1125 aa, Arabidopsis thaliana
  peptide (1)..(1125): Ceres Seq. ID no. 13646347
MKRVREEVYVEPQMRGPTVSSRGETNGRPSTISGGGTTGGLTTVDALTYLKAVKDMFQDNKEKYETFLGVMKDFKAQRVDTNGVIARVKDLFKGYDDLLLGFNTFLPKGYKITLQPEDEKPKKPVDFQVAIEFVNRIKARFGGDDRAYKKFLDILNMYRKETKSINEVYQEVTLLFQDHEDLLGEFVHFLPDFRGSVSVNDPLFQRNTIPRDRNSTFPGMHPKHFEKKIKRSRHDEYTELSDQREDGDENLVAYSADIGSQKNLLSTNHMAKAINELDLTDCAQCTPSYRRLPDDYPIQIPSYRNSLGEKVLNDHWVSVTSGSEDYSFKHMRKNQYEESLFRCEDDRFELDMLLESVSAAIKRVESLLEKINNNTISIETPICIREHLSGKCIERLYGDYGLDVMDFLKKNSHIALPVILTRLKQKQEEWARCRADFRKVWAEVYAKNHHKSLDHRSFYFKQQDSKNLSTKGLVAEIKDISERKHKEDLLRAIAVGTKPSFTPDVEFIYTDTKVHTDLYKLIKYYCEEICATEQSDKVMKLWVTFLEPMFGVPSRSETIETMKDVAKIEDNQEHHDASEAVKENTCDGSMASNLKPLTPPKMPNKENPMIQGSSFAQDLPVNTGESIQQDKLHDVAAITNEDSQPSKLVSTRNDLIMEGVENRSRVSDVSMGGHKVEREEGELSPTESCEQENFEVYKENGLEPVQKLPDNEISNTDREPKEGACGTEAVTRSNALPEDDDNKITQKLSEGDENASKFIVSASKFGGQVSSDEEHKGAESENEAGGMVNSNEGEDGSFFTFSERYLQPVKPLAKHVPGTLQASECDTRNDSRVFYGNDSLYVLFRLHQMLYERIQSAKIHSERKWKAPDSTSTDSYTRFMEALYNLLDGSSDNTKFEDECRAIIGAQSYVLFTLDKLVQKFVKHLHAVAADETDTKLLQLYAYENYRKPGRFFDIVYHENARALLHDQNIYRIEYSSAQTRLGIQLMNSWNDQPEVTAVTVEPGFANYLQNDFLSFVSDEEKPGLFLKRNKAKLSGPGEESLGMSRALEGLNIINEVECKIACSSFKVKYEPHTADLLYRRKQKKATLNPTGPENVKTSDSSELSRKKRISRFHMSLNRRLVALP

SEQ ID NO: 44838 - protein, 1112 aa, Arabidopsis thaliana
  peptide (1)..(1112): Ceres Seq. ID no. 13646348
MRGPTVSSRGETNGRPSTISGGGTTGGLTTVDALTYLKAVKDMFQDNKEKYETFLGVMKDFKAQRVDTNGVIARVKDLFKGYDDLLLGFNTFLPKGYKITLQPEDEKPKKPVDFQVAIEFVNRIKARFGGDDRAYKKFLDILNMYRKETKSINEVYQEVTLLFQDHEDLLGEFVHFLPDFRGSVSVNDPLFQRNTIPRDRNSTFPGMHPKHFEKKIKRSRHDEYTELSDQREDGDENLVAYSADIGSQKNLLSTNHMAKAINELDLTDCAQCTPSYRRLPDDYPIQIPSYRNSLGEKVLNDHWVSVTSGSEDYSFKHMRKNQYEESLFRCEDDRFELDMLLESVSAAIKRVESLLEKINNNTISIETPICIREHLSGKCIERLYGDYGLDVMDFLKKNSHIALPVILTRLKQKQEEWARCRADFRKVWAEVYAKNHHKSLDHRSFYFKQQDSKNLSTKGLVAEIKDISERKHKEDLLRAIAVGTKPSFTPDVEFIYTDTKVHTDLYKLIKYYCEEICATEQSDKVMKLWVTFLEPMFGVPSRSETIETMKDVAKIEDNQEHHDASEAVKENTCDGSMASNLKPLTPPKMPNKENPMIQGSSFAQDLPVNTGESIQQDKLHDVAAITNEDSQPSKLVSTRNDLIMEGVENRSRVSDVSMGGHKVEREEGELSPTESCEQENFEVYKENGLEPVQKLPDNEISNTDREPKEGACGTEAVTRSNALPEDDDNKITQKLSEGDENASKFIVSASKFGGQVSSDEEHKGAESENEAGGMVNSNEGEDGSFFTFSERYLQPVKPLAKHVPGTLQASECDTRNDSRVFYGNDSLYVLFRLHQMLYERIQSAKIHSERKWKAPDSTSTDSYTRFMEALYNLLDGSSDNTKFEDECRAIIGAQSYVLFTLDKLVQKFVKHLHAVAADETDTKLLQLYAYENYRKPGRFFDIVYHENARALLHDQNIYRIEYSSAQTRLGIQLMNSWNDQPEVTAVTVEPGFANYLQNDFLSFVSDEEKPGLFLKRNKAKLSGPGEESLGMSRALEGLNIINEVECKIACSSFKVKYEPHTADLLYRRKQKKATLNPTGPENVKTSDSSELSRKKRISRFHMSLNRRLVALP

SEQ ID NO: 44839 - protein, 1070 aa, Arabidopsis thaliana
  peptide (1)..(1070): Ceres Seq. ID no. 13646349
MFQDNKEKYETFLGVMKDFKAQRVDTNGVIARVKDLFKGYDDLLLGFNTFLPKGYKITLQPEDEKPKKPVDFQVAIEFVNRIKARFGGDDRAYKKFLDILNMYRKETKSINEVYQEVTLLFQDHEDLLGEFVHFLPDFRGSVSVNDPLFQRNTIPRDRNSTFPGMHPKHFEKKIKRSRHDEYTELSDQREDGDENLVAYSADIGSQKNLLSTNHMAKAINELDLTDCAQCTPSYRRLPDDYPIQIPSYRNSLGEKVLNDHWVSVTSGSEDYSFKHMRKNQYEESLFRCEDDRFELDMLLESVSAAIKRVESLLEKINNNTISIETPICIREHLSGKCIERLYGDYGLDVMDFLKKNSHIALPVILTRLKQKQEEWARCRADFRKVWAEVYAKNHHKSLDHRSFYFKQQDSKNLSTKGLVAEIKDISERKHKEDLLRAIAVGTKPSFTPDVEFIYTDTKVHTDLYKLIKYYCEEICATEQSDKVMKLWVTFLEPMFGVPSRSETIETMKDVAKIEDNQEHHDASEAVKENTCDGSMASNLKPLTPPKMPNKENPMIQGSSFAQDLPVNTGESIQQDKLHDVAAITNEDSQPSKLVSTRNDLIMEGVENRSRVSDVSMGGHKVEREEGELSPTESCEQENFEVYKENGLEPVQKLPDNEISNTDREPKEGACGTEAVTRSNALPEDDDNKITQKLSEGDENASKFIVSASKFGGQVSSDEEHKGAESENEAGGMVNSNEGEDGSFFTFSERYLQPVKPLAKHVPGTLQASECDTRNDSRVFYGNDSLYVLFRLHQMLYERIQSAKIHSERKWKAPDSTSTDSYTRFMEALYNLLDGSSDNTKFEDECRAIIGAQSYVLFTLDKLVQKFVKHLHAVAADETDTKLLQLYAYENYRKPGRFFDIVYHENARALLHDQNIYRIEYSSAQTRLGIQLMNSWNDQPEVTAVTVEPGFANYLQNDFLSFVSDEEKPGLFLKRNKAKLSGPGEESLGMSRALEGLNIINEVECKIACSSFKVKYEPHTADLLYRRKQKKATLNPTGPENVKTSDSSELSRKKRISRFHMSLNRRLVALP

SEQ ID NO: 44840 - DNA, 2722 bp, Arabidopsis thaliana
  misc_feature (1)..(2722): Ceres Seq. ID no. 12600042
  misc_feature (1)..(2722): Ortholog of  Ceres SEQ ID NO 14310206 as cited in SEQ ID NO 20650
acttgtaaaaaaactcaccaaacgaggaaagccaaagagagagagagagaaacaaaaatggcgtcacagagttgctacaatggaatccatcgtataaaaagggttcatcctctgattcactctctcacatttcatcgattctcctcatcttctcttccattcaaatctcacattccctcttcacaacaacagcttcgtattcgctcatcttcttcgctttctgatcttggaaatcgcaggcattgttcgtctactcgaggatttcaattttggtcatacaagagaagcgaagcagcgtcgccgttcaagacgaggtacagagaaaacgaagaagaagaagatatgacgattaaaccggcggttcgtatttccgacgggaatctaatcatcaaaaaccggacgattctaaccggtgtaccagataatgtcatcacgacgtcagcatcggaagctggaccggtagaaggagtcttcgtcggagctgtatttaacaaggaagagagtaaacacatcgtaccgatcggtacgcttcgcaattcccggtttatgtcttgtttccggtttaagctctggtggatggcccagagaatgggagaaatgggccgagatattccctacgagacgcagttcttattggtcgagagcaacgatgggtcccaccttgagtctgacggagctaacggcgtcgagtgtaaccagaaagtttacaccgttttcttgccgttaatcgaaggatctttccgttcgtgtctccaaggaaacgttaacgatgaggttgagctctgtttggagagtggtgacgtggacactaaacggtcgtcgtttactcactctctgtatattcacgccggtacagatccgtttcagacaataacggacgctattcgcaccgttaagttgcatctgaatagtttccgtcaacgtcacgaaaagaagcttccagggatcgttgactacttcggatggtgcacttgggacgcgttttatcaagaagtgactcaggaaggcgtcgaagctggtcttaagtctctcgccgccggtggtacgccgccgaagtttgttatcatagacgacggttggcaatcagttgagagagatgccacggtggaggccggagatgagaagaaagagtcaccgatttttcgactgacggggatcaaggagaacgaaaagtttaagaagaaggatgatccaaacgttgggattaagaacattgtcaagattgctaaggagaaacacggtttgaaatatgtttacgtgtggcacgcgataacgggttattggggcggagttagacccggggaagaatacggatctgttatgaaatatcctaatatgtcaaagggtgtggtggagaatgatccgacgtggaagactgatgtaatgacgctgcaagggttgggtttggttagccccaagaaagtgtataagttttacaatgagcttcatagttacttggctgatgctggcgtggacggtgtgaaagtggatgtgcagtgtgtattggagactttgggtggtggtttaggcggtcgggttgagctgactcgtcagtttcatcaagctcttgactcctctgttgctaagaacttcccggataatggctgcattgcttgtatgagccataatacggatgctctttactgctcgaagcaagcagctgtgattagagcatcagatgatttctatccacgggatccggtgtctcataccatccatatagcctccgttgcttataacagtgtgttcttgggagagtttatgcagcctgactgggatatgttccattccgtgcaccctgctgcagagtatcatgcctctgctagggccatcagtggtgggcctctctatgtcagtgattctcctggaaagcacaactttgagcttctaagaaagcttgtattgcctgatggatcgattcttcgtgctcgactccctggtagaccaactcgcgattgtttgttcgctgatcctgcccgtgatggtgtcagcttgctaaagatatggaacatgaacaagtacactggagttcttggcgtgtataactgccaaggagcagcttggagcagcacagagagaaaaaacattttccaccagactaaaactgatagcctcactggctccattcgtggtcgtgatgtgcattcaatatcggaggcctccactgatccaacaacctggaatggagactgtgctgtttactcccagagcagaggcgaacttattgttatgccatacaatgtgtctcttccagtctcactcaaaatccgtgagcacgagatcttcacggtgagccccattagtcatcttgttgatggtgtatcttttgccccaattggtctagtaaacatgtacaattcgggaggagctatcgaaggacttagatatgaagccgagaagatgaaagtggtaatggaagttaaaggatgtggcaaattcggatcttactcttctgtgaagcctaagagatgcgttgttgagtcaaatgagattgcattcgagtacgattcctcctctggattggtcacctttgagttagacaaaatgcctatagagaacaaacgatttcatctgatccaagttgagttatgaagagtgattcatacaattcattaaacaaaaacagtctcaaaacagttttaaatagtctttattatttgtaaacctttggttaccattgtagctactttcaatgttatactacagttcacgttattgttct

SEQ ID NO: 44841 - protein, 863 aa, Arabidopsis thaliana
  peptide (1)..(863): Ceres Seq. ID no. 12600043
TCKKTHQTRKAKERERETKMASQSCYNGIHRIKRVHPLIHSLTFHRFSSSSLPFKSHIPSSQQQLRIRSSSSLSDLGNRRHCSSTRGFQFWSYKRSEAASPFKTRYRENEEEEDMTIKPAVRISDGNLIIKNRTILTGVPDNVITTSASEAGPVEGVFVGAVFNKEESKHIVPIGTLRNSRFMSCFRFKLWWMAQRMGEMGRDIPYETQFLLVESNDGSHLESDGANGVECNQKVYTVFLPLIEGSFRSCLQGNVNDEVELCLESGDVDTKRSSFTHSLYIHAGTDPFQTITDAIRTVKLHLNSFRQRHEKKLPGIVDYFGWCTWDAFYQEVTQEGVEAGLKSLAAGGTPPKFVIIDDGWQSVERDATVEAGDEKKESPIFRLTGIKENEKFKKKDDPNVGIKNIVKIAKEKHGLKYVYVWHAITGYWGGVRPGEEYGSVMKYPNMSKGVVENDPTWKTDVMTLQGLGLVSPKKVYKFYNELHSYLADAGVDGVKVDVQCVLETLGGGLGGRVELTRQFHQALDSSVAKNFPDNGCIACMSHNTDALYCSKQAAVIRASDDFYPRDPVSHTIHIASVAYNSVFLGEFMQPDWDMFHSVHPAAEYHASARAISGGPLYVSDSPGKHNFELLRKLVLPDGSILRARLPGRPTRDCLFADPARDGVSLLKIWNMNKYTGVLGVYNCQGAAWSSTERKNIFHQTKTDSLTGSIRGRDVHSISEASTDPTTWNGDCAVYSQSRGELIVMPYNVSLPVSLKIREHEIFTVSPISHLVDGVSFAPIGLVNMYNSGGAIEGLRYEAEKMKVVMEVKGCGKFGSYSSVKPKRCVVESNEIAFEYDSSSGLVTFELDKMPIENKRFHLIQVEL

SEQ ID NO: 44842 - protein, 844 aa, Arabidopsis thaliana
  peptide (1)..(844): Ceres Seq. ID no. 12600044
MASQSCYNGIHRIKRVHPLIHSLTFHRFSSSSLPFKSHIPSSQQQLRIRSSSSLSDLGNRRHCSSTRGFQFWSYKRSEAASPFKTRYRENEEEEDMTIKPAVRISDGNLIIKNRTILTGVPDNVITTSASEAGPVEGVFVGAVFNKEESKHIVPIGTLRNSRFMSCFRFKLWWMAQRMGEMGRDIPYETQFLLVESNDGSHLESDGANGVECNQKVYTVFLPLIEGSFRSCLQGNVNDEVELCLESGDVDTKRSSFTHSLYIHAGTDPFQTITDAIRTVKLHLNSFRQRHEKKLPGIVDYFGWCTWDAFYQEVTQEGVEAGLKSLAAGGTPPKFVIIDDGWQSVERDATVEAGDEKKESPIFRLTGIKENEKFKKKDDPNVGIKNIVKIAKEKHGLKYVYVWHAITGYWGGVRPGEEYGSVMKYPNMSKGVVENDPTWKTDVMTLQGLGLVSPKKVYKFYNELHSYLADAGVDGVKVDVQCVLETLGGGLGGRVELTRQFHQALDSSVAKNFPDNGCIACMSHNTDALYCSKQAAVIRASDDFYPRDPVSHTIHIASVAYNSVFLGEFMQPDWDMFHSVHPAAEYHASARAISGGPLYVSDSPGKHNFELLRKLVLPDGSILRARLPGRPTRDCLFADPARDGVSLLKIWNMNKYTGVLGVYNCQGAAWSSTERKNIFHQTKTDSLTGSIRGRDVHSISEASTDPTTWNGDCAVYSQSRGELIVMPYNVSLPVSLKIREHEIFTVSPISHLVDGVSFAPIGLVNMYNSGGAIEGLRYEAEKMKVVMEVKGCGKFGSYSSVKPKRCVVESNEIAFEYDSSSGLVTFELDKMPIENKRFHLIQVEL

SEQ ID NO: 44843 - protein, 749 aa, Arabidopsis thaliana
  peptide (1)..(749): Ceres Seq. ID no. 12600045
MTIKPAVRISDGNLIIKNRTILTGVPDNVITTSASEAGPVEGVFVGAVFNKEESKHIVPIGTLRNSRFMSCFRFKLWWMAQRMGEMGRDIPYETQFLLVESNDGSHLESDGANGVECNQKVYTVFLPLIEGSFRSCLQGNVNDEVELCLESGDVDTKRSSFTHSLYIHAGTDPFQTITDAIRTVKLHLNSFRQRHEKKLPGIVDYFGWCTWDAFYQEVTQEGVEAGLKSLAAGGTPPKFVIIDDGWQSVERDATVEAGDEKKESPIFRLTGIKENEKFKKKDDPNVGIKNIVKIAKEKHGLKYVYVWHAITGYWGGVRPGEEYGSVMKYPNMSKGVVENDPTWKTDVMTLQGLGLVSPKKVYKFYNELHSYLADAGVDGVKVDVQCVLETLGGGLGGRVELTRQFHQALDSSVAKNFPDNGCIACMSHNTDALYCSKQAAVIRASDDFYPRDPVSHTIHIASVAYNSVFLGEFMQPDWDMFHSVHPAAEYHASARAISGGPLYVSDSPGKHNFELLRKLVLPDGSILRARLPGRPTRDCLFADPARDGVSLLKIWNMNKYTGVLGVYNCQGAAWSSTERKNIFHQTKTDSLTGSIRGRDVHSISEASTDPTTWNGDCAVYSQSRGELIVMPYNVSLPVSLKIREHEIFTVSPISHLVDGVSFAPIGLVNMYNSGGAIEGLRYEAEKMKVVMEVKGCGKFGSYSSVKPKRCVVESNEIAFEYDSSSGLVTFELDKMPIENKRFHLIQVEL

SEQ ID NO: 44844 - DNA, 3169 bp, Arabidopsis thaliana
  misc_feature (1)..(3169): Ceres Seq. ID no. 14302738
  misc_feature (1)..(3169): Ortholog of  Ceres SEQ ID NO 14306148 as cited in SEQ ID NO 1370
gctctctctctctctttcgctgctctcacacgcaaataatggctcatctcttcagggagctgtctctgggccactccaagagagagtctacgccgccgccgccgtcacattcggcgacttcacgttcttcttcaatgtcttccgatctacctccatcaccactcggacaactcgctgtccaactttccgattccgatctccgtctcactgcttacgagatcttcgtcgccgcatgtcgtagcgccaccggtaaacctctctcatcggctgtttcagtcgctgttttgaatcaggattctcccaatggctctcctgcttcgccggcgattcagcgttctctgacctcaaccgccgctagtaaaatgaagaaagctttggggttaaggtcgtcttcttcgctttcacctggatctaataagagttctggttctgcttcgggttctaatggtaagtcgaaacgtcctactactgtcggtgagcttatgcggatccaaatgcgagtatcggaggctgtcgattctcgtgttcgtagagcttttcttagaatcgctgcttcacaggttggaaggaagattgagtcagtagttcttcctttagagttgttacagcagctaaagtcttctgattttacggatcagcaagaatatgatgcttggctgaagagatcattgaaggttcttgaggcaggtcttttgttgcatcctcgtgtacctcttgataagacgaatagttctcaacgactgcgacagattattcatggtgctttagatcggcctttggagactggaaggaataatgagcaaatgcaaagtcttagatcagcggtcatgtctcttgcaactagatctgatgggtctttctctgattcttgtcactgggctgatggatctccgtttaatctcaggctttatgaattgcttttagaagcgtgttttgattctaatgatgcgacgtccatggttgaggaagttgacgacctaatggaacatataaagaagacgtgggtaattcttggaatcaatcaaatgctgcataacctctgttttacgtggcttttgtttagtcggtatgttgttactggacaagttgagatggacctgcttcatgcttgtgattctcaactggcagaagttgctaaagatgcaaagacaacaaaggatcctgaatactcccaggttttaagttctacactgagtgctatattaggatgggcagagaaaaggctccttgcataccatgacacttttgaccgaggaaatattcataccatggagggaattgtttctgtgggtgtatcagctgccaggatattagttgaagatatatctaacgagtaccgtagaagaaggaaaggagaagttgatgtagctcgtaccaggattgagacgtacatcaggtcctcactacgaacttcgtttgcgcagagaatggagaaagcagattcaagccggagagcatctaggaaccagaaaaatcctcttcctgttctagccatccttgctaaggacattggtgagctagctattcaggaaaagcggatgttcagtccaatattgaagagatggcatccgtttgctgcaggggttgctgtggcgacccttcatgtttgttacggaaatgagattaaacagtttatagccggaatatctgaattgacacctgatgctgtccagatactaagagctgcagataagctagaaaaggatctggtgcaaatcgcagtagaggattctgttgacagtgatgatggtggcaaagcaattatccgtgaaatgcctcccttcgaagctgagaccgtaattgctaatttggtcaaagactggataaaggcaagaatagacagacttaaggaatgggttgacaggaatttgcagcaagaggtttggaaacccctggagaacctagaaggaggatatgcacagtctgctgccgaagtgttgcggattactgatgaaactttggaagctttttttcagcttcccatacctatgcatcctgctgtattacctgatttaattattggtttagacaaatatcttcagtattatgtctcaaaggcgaaatctggctgcggctctcggactacgtacatgcctacaatgcctgcactcaccagatgtacaacgggatcaaaattccaatggaagaagaaagaaaagacacctaccactcagaagagagaatctcaggtttcggttatgaacggtgagaattcttttggggtcacgcaaatatgtgtcagaataaacagcttgcacaaaatccgcagtgagcttgatgttgtggaaaaaagagtgatcacacatttgaggaactgtgagtcagctcacaccgatgacttttccaacggcttagaaaaaaagtttgagctcacaccagcggcttgcatagaaggcgttcaacagctttctgagtctctggcttataaggtcgtcttccacgacctaagccacacgttatgggacgggttatacatcggagacctctcttcctctagaatcgatcctttcctcaaggaactcgaacagaatttgacagtcatagcagagacagtacatgaaagagttcgaacacgcatcatcaccgatattatgagagcctctttagatggcttcttacttgtcctgcttgccggaggaccctctagggcgttcacaagacaagactctcagataatggaagaagatttcaaatcaatgaaagatatgttctgggctaacggagatggtctagccatggacctgatcgataaattctcaaccactgtcagaggcgtgcttcctctgttcagtacagatacagacagtttaatagagaggttcaagggaacgaccctcgaagcatatggttcttcagctaagtcgaggcttccgttgcctccaacatcaggccagtggaatggcatggagccaaacacactcttacgtgttttgtgttaccgtaacgacgaatctgccacgaggtttctcaagaagacatataatctacctaagaagctttagtaaacttacggctactactgcaacgtataataacctcacaagatgaagagtgtgtgttccacttgcaggagggagcctccgagatttgtatagtgagtttcattttttttgttttatggttttttttctaatacattcctatacgtactatataattcatttatatc

SEQ ID NO: 44845 - protein, 999 aa, Arabidopsis thaliana
  peptide (1)..(999): Ceres Seq. ID no. 14302739
SLSLFRCSHTQIMAHLFRELSLGHSKRESTPPPPSHSATSRSSSMSSDLPPSPLGQLAVQLSDSDLRLTAYEIFVAACRSATGKPLSSAVSVAVLNQDSPNGSPASPAIQRSLTSTAASKMKKALGLRSSSSLSPGSNKSSGSASGSNGKSKRPTTVGELMRIQMRVSEAVDSRVRRAFLRIAASQVGRKIESVVLPLELLQQLKSSDFTDQQEYDAWLKRSLKVLEAGLLLHPRVPLDKTNSSQRLRQIIHGALDRPLETGRNNEQMQSLRSAVMSLATRSDGSFSDSCHWADGSPFNLRLYELLLEACFDSNDATSMVEEVDDLMEHIKKTWVILGINQMLHNLCFTWLLFSRYVVTGQVEMDLLHACDSQLAEVAKDAKTTKDPEYSQVLSSTLSAILGWAEKRLLAYHDTFDRGNIHTMEGIVSVGVSAARILVEDISNEYRRRRKGEVDVARTRIETYIRSSLRTSFAQRMEKADSSRRASRNQKNPLPVLAILAKDIGELAIQEKRMFSPILKRWHPFAAGVAVATLHVCYGNEIKQFIAGISELTPDAVQILRAADKLEKDLVQIAVEDSVDSDDGGKAIIREMPPFEAETVIANLVKDWIKARIDRLKEWVDRNLQQEVWKPLENLEGGYAQSAAEVLRITDETLEAFFQLPIPMHPAVLPDLIIGLDKYLQYYVSKAKSGCGSRTTYMPTMPALTRCTTGSKFQWKKKEKTPTTQKRESQVSVMNGENSFGVTQICVRINSLHKIRSELDVVEKRVITHLRNCESAHTDDFSNGLEKKFELTPAACIEGVQQLSESLAYKVVFHDLSHTLWDGLYIGDLSSSRIDPFLKELEQNLTVIAETVHERVRTRIITDIMRASLDGFLLVLLAGGPSRAFTRQDSQIMEEDFKSMKDMFWANGDGLAMDLIDKFSTTVRGVLPLFSTDTDSLIERFKGTTLEAYGSSAKSRLPLPPTSGQWNGMEPNTLLRVLCYRNDESATRFLKKTYNLPKKL

SEQ ID NO: 44846 - protein, 987 aa, Arabidopsis thaliana
  peptide (1)..(987): Ceres Seq. ID no. 14302740
MAHLFRELSLGHSKRESTPPPPSHSATSRSSSMSSDLPPSPLGQLAVQLSDSDLRLTAYEIFVAACRSATGKPLSSAVSVAVLNQDSPNGSPASPAIQRSLTSTAASKMKKALGLRSSSSLSPGSNKSSGSASGSNGKSKRPTTVGELMRIQMRVSEAVDSRVRRAFLRIAASQVGRKIESVVLPLELLQQLKSSDFTDQQEYDAWLKRSLKVLEAGLLLHPRVPLDKTNSSQRLRQIIHGALDRPLETGRNNEQMQSLRSAVMSLATRSDGSFSDSCHWADGSPFNLRLYELLLEACFDSNDATSMVEEVDDLMEHIKKTWVILGINQMLHNLCFTWLLFSRYVVTGQVEMDLLHACDSQLAEVAKDAKTTKDPEYSQVLSSTLSAILGWAEKRLLAYHDTFDRGNIHTMEGIVSVGVSAARILVEDISNEYRRRRKGEVDVARTRIETYIRSSLRTSFAQRMEKADSSRRASRNQKNPLPVLAILAKDIGELAIQEKRMFSPILKRWHPFAAGVAVATLHVCYGNEIKQFIAGISELTPDAVQILRAADKLEKDLVQIAVEDSVDSDDGGKAIIREMPPFEAETVIANLVKDWIKARIDRLKEWVDRNLQQEVWKPLENLEGGYAQSAAEVLRITDETLEAFFQLPIPMHPAVLPDLIIGLDKYLQYYVSKAKSGCGSRTTYMPTMPALTRCTTGSKFQWKKKEKTPTTQKRESQVSVMNGENSFGVTQICVRINSLHKIRSELDVVEKRVITHLRNCESAHTDDFSNGLEKKFELTPAACIEGVQQLSESLAYKVVFHDLSHTLWDGLYIGDLSSSRIDPFLKELEQNLTVIAETVHERVRTRIITDIMRASLDGFLLVLLAGGPSRAFTRQDSQIMEEDFKSMKDMFWANGDGLAMDLIDKFSTTVRGVLPLFSTDTDSLIERFKGTTLEAYGSSAKSRLPLPPTSGQWNGMEPNTLLRVLCYRNDESATRFLKKTYNLPKKL

SEQ ID NO: 44847 - protein, 955 aa, Arabidopsis thaliana
  peptide (1)..(955): Ceres Seq. ID no. 14302741
MSSDLPPSPLGQLAVQLSDSDLRLTAYEIFVAACRSATGKPLSSAVSVAVLNQDSPNGSPASPAIQRSLTSTAASKMKKALGLRSSSSLSPGSNKSSGSASGSNGKSKRPTTVGELMRIQMRVSEAVDSRVRRAFLRIAASQVGRKIESVVLPLELLQQLKSSDFTDQQEYDAWLKRSLKVLEAGLLLHPRVPLDKTNSSQRLRQIIHGALDRPLETGRNNEQMQSLRSAVMSLATRSDGSFSDSCHWADGSPFNLRLYELLLEACFDSNDATSMVEEVDDLMEHIKKTWVILGINQMLHNLCFTWLLFSRYVVTGQVEMDLLHACDSQLAEVAKDAKTTKDPEYSQVLSSTLSAILGWAEKRLLAYHDTFDRGNIHTMEGIVSVGVSAARILVEDISNEYRRRRKGEVDVARTRIETYIRSSLRTSFAQRMEKADSSRRASRNQKNPLPVLAILAKDIGELAIQEKRMFSPILKRWHPFAAGVAVATLHVCYGNEIKQFIAGISELTPDAVQILRAADKLEKDLVQIAVEDSVDSDDGGKAIIREMPPFEAETVIANLVKDWIKARIDRLKEWVDRNLQQEVWKPLENLEGGYAQSAAEVLRITDETLEAFFQLPIPMHPAVLPDLIIGLDKYLQYYVSKAKSGCGSRTTYMPTMPALTRCTTGSKFQWKKKEKTPTTQKRESQVSVMNGENSFGVTQICVRINSLHKIRSELDVVEKRVITHLRNCESAHTDDFSNGLEKKFELTPAACIEGVQQLSESLAYKVVFHDLSHTLWDGLYIGDLSSSRIDPFLKELEQNLTVIAETVHERVRTRIITDIMRASLDGFLLVLLAGGPSRAFTRQDSQIMEEDFKSMKDMFWANGDGLAMDLIDKFSTTVRGVLPLFSTDTDSLIERFKGTTLEAYGSSAKSRLPLPPTSGQWNGMEPNTLLRVLCYRNDESATRFLKKTYNLPKKL

SEQ ID NO: 44848 - DNA, 2810 bp, Arabidopsis thaliana
  misc_feature (1)..(2810): Ceres Seq. ID no. 12650352
  misc_feature (1)..(2810): Ortholog of  Ceres SEQ ID NO 13598023 as cited in SEQ ID NO 66487
aaaaaacctctcactgcaaagtgccaacaaacaacaagtcttcaccttcttcttcttcttcttcttcaaaatctcttgtacgcaaataatccatgagaaactagggtttaacttgagatctctcttccgaagtattaccatcaatggcgacttcttcttcttcatcgtcgtctctgcttttaccaaacatcaatttcaactcaagacaatctccaacaatcactcgttccgtttcaatcgccgggatcttcttacccagaaaccgattaagctacaatcacaatctccggattcgtacgagattaatcagagcttctaaagacgataatgtcgctgttgaagatcgtgataatgcagtgaagatcaacggtgattacaacggaagtgcacgtttaaacggtaacggctctgcgagaaaatccgtcaacggagattttaacggaagtgctcgtttgaacggtaacggtagtttggtgaagtatgtgaacggaagtgtaacggtggaaacggaggaagtgacaaagaagagaaaagaagaagtgaggaagaagagagtagaagatattggtcaagaggatgcttggtttaagaacaacactcaacaaaaacaagttgaggtttctgttacacctggtggtcgatggaatagattcaagacttactcaactattcaaagaacattggagatttggggttttgttgtacagtttattttcaggacttggttaagcaataagaagttctcttataaagggggaatgactgaagagaagaaggttttaagaaggaaggttttggctaagtggttgaaagaaaacattttgagattaggtcctacatttatcaaaattgggcaacagttctctactagagtggatattcttcctcaagagtatgttgatcaattgtcagaacttcaggatcaagttcctcctttcccttctgctacagctttatccattgttgaagaggagcttggaggttctgttgaggacattttcgaccgttttgattatgaacctatagctgcagctagtcttgggcaagttcaccgtgcaagacttaagggtcaagaggttgtccttaaagtacagagacctggtctgaaggatctctttgatattgaccttaagaatttgagggtgatcgctgagtatctccaaaaggtggacccaaaatcagatggtgcaaagagagattgggttgcaatctatgatgaatgtgccagtgttttgtaccaggaaattgattacacaaaagaagcagctaattcggagttgtttgctaataacttcaaagacttagagtatgtaaaagttccatccatctactgggaatacactacacctcaggtcctgacaatggagtatgtccctgggattaagattaacaagatacaagccttagatcagttaggtgttgatcgaaaaaggctaggaagatatgctgttgaatcttacctggagcaaatcttatctcatggattcttccacgccgaccctcaccctgggaatatagcagttgatgatgtcaatggcgggcggctgatattttacgactttggaatgatgggaagtattagcccaaatattagagaaggtttgttggaggcattttatggcgtctatgaaaaggatccagataaggtccttcaagctatggttcaaatgggagtgcttgtaccaactggagatttgacggcagttagaagaacagcattgttttttctcaacagttttgaagagcggcttgctgcacaaagaaaggagaaagaagaaatagcagcagcagaagagcttgggttcaagaagccactaagcaaggaagaaaagcaagagaaaaagaagcaaaggttggctgcaatcggagaagacttattagccattgcggctgatcagcctttccggttccccgccacattcacatttgttgttagagccttttcagtattggatggcatcggcaaaggtcttgacccccgatttgatataacggagattgctaaaccctatgctttggaattgttgcggtttcgggaagctggagtggaagttgtagtaaaggacctgagaaagagatgggacaggcaatcacaagcattctacaatctatttagacaagcggatagagttgaaaagctagctgtagtcattgaacgacttgagcaaggtgatttgaagcttagggtccgagcgctagagtctgagagggcatttcaacgcgttgcagctgttcaaaaaacagtaggaagtgctgttgctgcaggaagtttagtcaatctcgcaacaattttgtatctgaattctataaaaacacctgcaactatagcatatacagtatgtgctttcttcagcctccaagttctaatcggaatcataaaggttaagaagttcgatcaacgggaaaaactaatcactggaacagcttaagaacttgcttgaagaaatgtattaaagcttcttcaatctccataaacccttttgtgcatttcacaggagtgttaacaatttcactggtctgcaaataaaattatcttatggaagcttgagaggcaagagatggtcaactagtcaaaccaccaccactctctcatctctgtcttcttaaagttcgataataatttttggagaggagactctggttgttcatcaacagagtggtcatgagccacatgtattgcttgtgtatagagagatttagaaattaggaactttttcgtataaatatactcattgtactcagctactcactagactcatctctgttttagtaatattttgaatactgtatctcaaataaattaatcttat

SEQ ID NO: 44849 - protein, 761 aa, Arabidopsis thaliana
  peptide (1)..(761): Ceres Seq. ID no. 12650353
MATSSSSSSSLLLPNINFNSRQSPTITRSVSIAGIFLPRNRLSYNHNLRIRTRLIRASKDDNVAVEDRDNAVKINGDYNGSARLNGNGSARKSVNGDFNGSARLNGNGSLVKYVNGSVTVETEEVTKKRKEEVRKKRVEDIGQEDAWFKNNTQQKQVEVSVTPGGRWNRFKTYSTIQRTLEIWGFVVQFIFRTWLSNKKFSYKGGMTEEKKVLRRKVLAKWLKENILRLGPTFIKIGQQFSTRVDILPQEYVDQLSELQDQVPPFPSATALSIVEEELGGSVEDIFDRFDYEPIAAASLGQVHRARLKGQEVVLKVQRPGLKDLFDIDLKNLRVIAEYLQKVDPKSDGAKRDWVAIYDECASVLYQEIDYTKEAANSELFANNFKDLEYVKVPSIYWEYTTPQVLTMEYVPGIKINKIQALDQLGVDRKRLGRYAVESYLEQILSHGFFHADPHPGNIAVDDVNGGRLIFYDFGMMGSISPNIREGLLEAFYGVYEKDPDKVLQAMVQMGVLVPTGDLTAVRRTALFFLNSFEERLAAQRKEKEEIAAAEELGFKKPLSKEEKQEKKKQRLAAIGEDLLAIAADQPFRFPATFTFVVRAFSVLDGIGKGLDPRFDITEIAKPYALELLRFREAGVEVVVKDLRKRWDRQSQAFYNLFRQADRVEKLAVVIERLEQGDLKLRVRALESERAFQRVAAVQKTVGSAVAAGSLVNLATILYLNSIKTPATIAYTVCAFFSLQVLIGIIKVKKFDQREKLITGTA

SEQ ID NO: 44850 - protein, 556 aa, Arabidopsis thaliana
  peptide (1)..(556): Ceres Seq. ID no. 12650354
MTEEKKVLRRKVLAKWLKENILRLGPTFIKIGQQFSTRVDILPQEYVDQLSELQDQVPPFPSATALSIVEEELGGSVEDIFDRFDYEPIAAASLGQVHRARLKGQEVVLKVQRPGLKDLFDIDLKNLRVIAEYLQKVDPKSDGAKRDWVAIYDECASVLYQEIDYTKEAANSELFANNFKDLEYVKVPSIYWEYTTPQVLTMEYVPGIKINKIQALDQLGVDRKRLGRYAVESYLEQILSHGFFHADPHPGNIAVDDVNGGRLIFYDFGMMGSISPNIREGLLEAFYGVYEKDPDKVLQAMVQMGVLVPTGDLTAVRRTALFFLNSFEERLAAQRKEKEEIAAAEELGFKKPLSKEEKQEKKKQRLAAIGEDLLAIAADQPFRFPATFTFVVRAFSVLDGIGKGLDPRFDITEIAKPYALELLRFREAGVEVVVKDLRKRWDRQSQAFYNLFRQADRVEKLAVVIERLEQGDLKLRVRALESERAFQRVAAVQKTVGSAVAAGSLVNLATILYLNSIKTPATIAYTVCAFFSLQVLIGIIKVKKFDQREKLITGTA

SEQ ID NO: 44851 - DNA, 1901 bp, Arabidopsis thaliana
  misc_feature (1)..(1901): Ceres Seq. ID no. 12603788
  misc_feature (1)..(1901): Ortholog of  Ceres SEQ ID NO 13657460 as cited in SEQ ID NO 66115
  misc_feature (1)..(1901): Ortholog of  Ceres SEQ ID NO 13659394 as cited in SEQ ID NO 67049
aaagattgagagaaccctctcactcccaaaaaaaaagctttagacattttctctaaatccatattctctgcatctttcaagaaattccgaatcgtgggtttggttcttctcgttacgagtctctcaaagtttaaatctttctttacaaaaaaggttacttttggttctgagtaaatcaaaatcaagcttttggccttcaatggtggctatgtttcaagaagataatggaacatcttctgtagcttcatcaccacttcaagtcttctcaactatgtcactcaacagaccgactctcctcgcttcttcatctccgtttcattgtctcaaagatctcaaaccagaggagcgtggtctctacttaatccacctcttgctaacttgtgccaaccacgtggcttcaggtagcctccaaaacgctaacgcagcgctcgagcagctctctcacctcgcttctcctgacggcgacacgatgcagcgaatcgctgcttacttcaccgaagcgcttgctaacagaatccttaagtcctggcctggtctttacaaggctcttaacgcaactcagacaagaactaacaatgtctctgaggagattcatgttagaagactcttctttgagatgttcccgatactcaaagtctcttacttgctcactaatcgagctatactcgaggctatggaaggagagaagatggttcatgtgattgatctcgatgcttctgagccagctcaatggcttgctttgcttcaagcttttaactctaggcctgaaggtccacctcatttgagaatcactggtgttcatcaccagaaggaagtgcttgaacaaatggctcatagactcattgaggaagcagagaaactcgatatcccgtttcagtttaatcccgttgtgagtaggttagactgtttaaatgtagaacagttgcgggttaaaacaggagaggccttagccgttagctcggttcttcaattgcataccttcttggcctctgatgatgatctcatgagaaagaactgcgctttacggtttcagaacaaccctagtggagttgacttgcagagagttctaatgatgagccatggctctgcagctgaggcacgtgagaatgatatgagtaacaacaatgggtatagccctagcggtgactcggcctcatctttgcctttaccaagttcaggaaggactgatagcttcctcaatgctatttggggtttgtctccaaaggtcatggtggtcactgagcaagactcagaccacaacggctccacactaatggagaggctattagaatcactttacacctacgcagcattgtttgattgcttggaaacaaaagttccaagaacgtctcaagataggatcaaagtggagaagatgctcttcggggaggagatcaagaacatcatatcctgcgagggatttgagagaagagaaagacacgagaagcttgagaaatggagccagaggatcgatttggctggttttgggaatgttcctcttagctattatgcgatgttgcaggctaggagattgcttcaagggtgcggttttgatgggtatagaatcaaggaagagagcgggtgcgcagtaatttgctggcaagatcgacctctatactcggtatcagcttggagatgcaggaagtgaatgatatattacagtttgtcttctattttggttatgagcagagtccctttcttttttgtatacatggggacacaatcttagttgttttgtgatggtgactttctgtctctttatgctattttggcttaaatgcttctactgcctctgcatgtaaagcctttgtgtgttggttcaatttggtctggtgtgggtgtaataccaaaccaaatccaatttgagctgaagataactaatttgatgatcggctcgtgcc

SEQ ID NO: 44852 - protein, 482 aa, Arabidopsis thaliana
  peptide (1)..(482): Ceres Seq. ID no. 12603789
MVAMFQEDNGTSSVASSPLQVFSTMSLNRPTLLASSSPFHCLKDLKPEERGLYLIHLLLTCANHVASGSLQNANAALEQLSHLASPDGDTMQRIAAYFTEALANRILKSWPGLYKALNATQTRTNNVSEEIHVRRLFFEMFPILKVSYLLTNRAILEAMEGEKMVHVIDLDASEPAQWLALLQAFNSRPEGPPHLRITGVHHQKEVLEQMAHRLIEEAEKLDIPFQFNPVVSRLDCLNVEQLRVKTGEALAVSSVLQLHTFLASDDDLMRKNCALRFQNNPSGVDLQRVLMMSHGSAAEARENDMSNNNGYSPSGDSASSLPLPSSGRTDSFLNAIWGLSPKVMVVTEQDSDHNGSTLMERLLESLYTYAALFDCLETKVPRTSQDRIKVEKMLFGEEIKNIISCEGFERRERHEKLEKWSQRIDLAGFGNVPLSYYAMLQARRLLQGCGFDGYRIKEESGCAVICWQDRPLYSVSAWRCRK

SEQ ID NO: 44853 - protein, 479 aa, Arabidopsis thaliana
  peptide (1)..(479): Ceres Seq. ID no. 12603790
MFQEDNGTSSVASSPLQVFSTMSLNRPTLLASSSPFHCLKDLKPEERGLYLIHLLLTCANHVASGSLQNANAALEQLSHLASPDGDTMQRIAAYFTEALANRILKSWPGLYKALNATQTRTNNVSEEIHVRRLFFEMFPILKVSYLLTNRAILEAMEGEKMVHVIDLDASEPAQWLALLQAFNSRPEGPPHLRITGVHHQKEVLEQMAHRLIEEAEKLDIPFQFNPVVSRLDCLNVEQLRVKTGEALAVSSVLQLHTFLASDDDLMRKNCALRFQNNPSGVDLQRVLMMSHGSAAEARENDMSNNNGYSPSGDSASSLPLPSSGRTDSFLNAIWGLSPKVMVVTEQDSDHNGSTLMERLLESLYTYAALFDCLETKVPRTSQDRIKVEKMLFGEEIKNIISCEGFERRERHEKLEKWSQRIDLAGFGNVPLSYYAMLQARRLLQGCGFDGYRIKEESGCAVICWQDRPLYSVSAWRCRK

SEQ ID NO: 44854 - protein, 458 aa, Arabidopsis thaliana
  peptide (1)..(458): Ceres Seq. ID no. 12603791
MSLNRPTLLASSSPFHCLKDLKPEERGLYLIHLLLTCANHVASGSLQNANAALEQLSHLASPDGDTMQRIAAYFTEALANRILKSWPGLYKALNATQTRTNNVSEEIHVRRLFFEMFPILKVSYLLTNRAILEAMEGEKMVHVIDLDASEPAQWLALLQAFNSRPEGPPHLRITGVHHQKEVLEQMAHRLIEEAEKLDIPFQFNPVVSRLDCLNVEQLRVKTGEALAVSSVLQLHTFLASDDDLMRKNCALRFQNNPSGVDLQRVLMMSHGSAAEARENDMSNNNGYSPSGDSASSLPLPSSGRTDSFLNAIWGLSPKVMVVTEQDSDHNGSTLMERLLESLYTYAALFDCLETKVPRTSQDRIKVEKMLFGEEIKNIISCEGFERRERHEKLEKWSQRIDLAGFGNVPLSYYAMLQARRLLQGCGFDGYRIKEESGCAVICWQDRPLYSVSAWRCRK

SEQ ID NO: 44855 - DNA, 1910 bp, Arabidopsis thaliana; identical to SEQ ID NO: 30306
  misc_feature (1)..(1910): Ceres Seq. ID no. 13509014
  misc_feature (1)..(1910): Ortholog of  Ceres SEQ ID NO 15177320 as cited in SEQ ID NO 52645
  misc_feature (1)..(1910): Ortholog of  Ceres SEQ ID NO 15171359 as cited in SEQ ID NO 57279
  misc_feature (1)..(1910): Ortholog of  Ceres SEQ ID NO 15168502 as cited in SEQ ID NO 60095
  misc_feature (1)..(1910): Ortholog of  Ceres SEQ ID NO 14314084 as cited in SEQ ID NO 63256
  misc_feature (1)..(1910): Ortholog of  Ceres SEQ ID NO 15169466 as cited in SEQ ID NO 66135
  misc_feature (1)..(1910): Ortholog of  Ceres SEQ ID NO 14303091 as cited in SEQ ID NO 66369

SEQ ID NO: 44856 - protein, 510 aa, Arabidopsis thaliana; identical to SEQ ID NO: 30307
  peptide (1)..(510): Ceres Seq. ID no. 13509015

SEQ ID NO: 44857 - protein, 500 aa, Arabidopsis thaliana [sequence omitted]

SEQ ID NO: 44858 - protein, 326 aa, Arabidopsis thaliana; identical to SEQ ID NO: 30309
  peptide (1)..(326): Ceres Seq. ID no. 13509017

SEQ ID NO: 44859 - DNA, 2604 bp, Arabidopsis thaliana
  misc_feature (1)..(2604): Ceres Seq. ID no. 13575539
  misc_feature (1)..(2604): Ortholog of  Ceres SEQ ID NO 15174591 as cited in SEQ ID NO 53383
gaattggaatatctctctctctatctttcttctgaatctctcaaaaatttcgccattgttgttgctctgaaatctgttaactttggtgatttgattgcatttgcctttgagagttttaatcttcaatttttggctacatcgagatttggttctgaattttggcatctctattagtagtgaggccatttcctgatttggatcataaagagtggagaaaaatcttgcctttgtctccttaggattgtggcttgatcaggtaatgagactatgtgcttcaaaattgagacttgtttggtgaaagaagcggatgaaaaagtttctgtgtacagcgagaggaattagtggtttctgcttacgaatgatatgagaggttcttggtacaagagtgtttcctctgtttttggtctcagaccacggatcagagggttgttattcttcattgttggtgttgtggctctagttactattttagcaccattgacatctaattcgtatgattcttcgtcaagttcgacacttgtgccgaacatttatagtaactataggaggataaaggagcaagctgctgttgattatcttgatctgaggtctctttctttaggggctagtttaaaagagtttcctttttgtggtaaagaaagagaaagttatgtgccttgttataacataactgggaatttgcttgctgggcttcaagagggtgaggagttagatcgacattgcgagtttgaaagagagaaggaaagatgtgtagttcgtcctccgagagattataaaataccacttaggtggccacttggtagagatatcatatggagtgggaacgtgaagattaccaaagaccagtttctttcttcaggaactgtgacaacgaggttaatgttgcttgaagagaatcaaataacctttcactcggaggacggcctggtctttgatggggtcaaagactatgctcgtcaaattgctgagatgataggtttaggaagtgatactgaatttgctcaagcgggtgtaagtattcttaatcttattatcttacacatcaaaattttcagttccagcttctgagatttcttctgatgcttgcaggtacggactgtgttagacattggttgcggatttggtagctttggtgctcatttagtgtctttgaagctgatgcctatatgtattgctgagtatgaggcaactgggagccaagttcagttagctctagagagaggccttcctgcaatgattggcaatttcttttcaaaacagcttccttatccagcactgtcttttgatatggtccattgtgctcaatgtggcactacttgggatatcaaagatgcaatgctacttttggaagtggatcgtgttctgaaacccgggggatactttgttttaacttctcccacaaacaaagcacagggaaacttaccagataccaagaaaacgagcatctcaacacgggtgaatgagttatctaagaaaatctgttggagtctaacagctcagcaggatgagacgtttctttggcagaaaacttctgattcaagttgctattcttctcgttcgcaagcttctatacctctttgcaaagatggagatagcgttccgtattaccacccattggttccatgtataagcggaaccacgagtaaacgctggatttctatacagaacaggtctgctgttgcaggaacaacctctgccgggcttgaaattcatggtttaaaaccggaagaattcttcgaggatacacaaatatggagatcagctctgaaaaactattggtccttgcttacacctctaattttctctgaccatccgaagagacccggtgatgaggatcctctcccgcctttcaacatgatacgcaatgtgatggacatgcatgctcgttttgggaatttaaatgccgctttactcgacgaaggaaaatctgcttgggtaatgaacgtcgtcccagtcaatgcacgtaatactcttcctatcatacttgatcgtggtttcgccggtgttctacatgactggtgtgaaccattcccgacatatcctcgaacatatgacatgcttcatgccaatgaacttctcacacatcttagctcagaacgatgcagcctaatggacttgttcttggagatggaccggattcttcgccctgagggatgggttgttctaagcgacaaagtgggagtaatcgagatggctcgagcacttgcagctcgagtgcgttgggaagcaagagtcattgatcttcaagatggtagtgaccaaagacttctcgtctgtcaaaaaccattcatcaaaaaataactcaaaagcaacatcaaaatattatatgcttctttcaccataaacaacactcactacacacagtcttttcactgatccaaattatgtctcctgcaaattctggagataaaatcaatatttttgttgttgctcggatggctttttaaaacttgtgaaggggctatgtagtaagtggaagctgtagagctatgagtagaagaaagagtttagattcaatattctttcatttttctttttgtctatctttctttaatttttgatattgaacaaaattgtagctatatatatatttttcattcatcc

SEQ ID NO: 44860 - protein, 380 aa, Arabidopsis thaliana
  peptide (1)..(380): Ceres Seq. ID no. 13575540
MPICIAEYEATGSQVQLALERGLPAMIGNFFSKQLPYPALSFDMVHCAQCGTTWDIKDAMLLLEVDRVLKPGGYFVLTSPTNKAQGNLPDTKKTSISTRVNELSKKICWSLTAQQDETFLWQKTSDSSCYSSRSQASIPLCKDGDSVPYYHPLVPCISGTTSKRWISIQNRSAVAGTTSAGLEIHGLKPEEFFEDTQIWRSALKNYWSLLTPLIFSDHPKRPGDEDPLPPFNMIRNVMDMHARFGNLNAALLDEGKSAWVMNVVPVNARNTLPIILDRGFAGVLHDWCEPFPTYPRTYDMLHANELLTHLSSERCSLMDLFLEMDRILRPEGWVVLSDKVGVIEMARALAARVRWEARVIDLQDGSDQRLLVCQKPFIKK

SEQ ID NO: 44861 - protein, 355 aa, Arabidopsis thaliana
  peptide (1)..(355): Ceres Seq. ID no. 13575541
MIGNFFSKQLPYPALSFDMVHCAQCGTTWDIKDAMLLLEVDRVLKPGGYFVLTSPTNKAQGNLPDTKKTSISTRVNELSKKICWSLTAQQDETFLWQKTSDSSCYSSRSQASIPLCKDGDSVPYYHPLVPCISGTTSKRWISIQNRSAVAGTTSAGLEIHGLKPEEFFEDTQIWRSALKNYWSLLTPLIFSDHPKRPGDEDPLPPFNMIRNVMDMHARFGNLNAALLDEGKSAWVMNVVPVNARNTLPIILDRGFAGVLHDWCEPFPTYPRTYDMLHANELLTHLSSERCSLMDLFLEMDRILRPEGWVVLSDKVGVIEMARALAARVRWEARVIDLQDGSDQRLLVCQKPFIKK

SEQ ID NO: 44862 - protein, 337 aa, Arabidopsis thaliana
  peptide (1)..(337): Ceres Seq. ID no. 13575542
MVHCAQCGTTWDIKDAMLLLEVDRVLKPGGYFVLTSPTNKAQGNLPDTKKTSISTRVNELSKKICWSLTAQQDETFLWQKTSDSSCYSSRSQASIPLCKDGDSVPYYHPLVPCISGTTSKRWISIQNRSAVAGTTSAGLEIHGLKPEEFFEDTQIWRSALKNYWSLLTPLIFSDHPKRPGDEDPLPPFNMIRNVMDMHARFGNLNAALLDEGKSAWVMNVVPVNARNTLPIILDRGFAGVLHDWCEPFPTYPRTYDMLHANELLTHLSSERCSLMDLFLEMDRILRPEGWVVLSDKVGVIEMARALAARVRWEARVIDLQDGSDQRLLVCQKPFIKK

SEQ ID NO: 44863 - DNA, 2351 bp, Arabidopsis thaliana
  misc_feature (1)..(2351): Ceres Seq. ID no. 12559445
  misc_feature (1)..(2351): Ortholog of  Ceres SEQ ID NO 13596319 as cited in SEQ ID NO 67933
acgcaaacacaagtccttgtccttccttcctcaatcaaacaacaccttctttaatccagaacaaaaaaaaacaaacagaagaaaaaaaaaaaaaaaaactacaaaaaaaaaatctctgcccgcttctccgttctcggggttgcgtcaaaattgcaccaaattaatcaaaacctacccagaaatcatttttggtcacaggggataggcgggcagatttaaattttcttcttttgttcttctgtttgaatttgtattgattcgtgaaattgtgtttgtttgatggggtttttggtggatacgcaaaaggaaggaggtggacattcatggggttacgttagaagtttggttagaaggaaacaagtcgactctgctaatggccaatctcatggtcaccaacttgctagagccctcactgttcctcatctcgttgcaattggtgttggagcaacaataggagctggagtttatattcttgtaggaacagttgcgagagagcattcaggaccttctcttgctttgtcttttcttattgctggaattgctgctggtctttctgcgttttgttatgctgaactctctagtcgttgcccttcagctgggagtgcgtatcactattcttacatttgtgttggtgaaggtgttgcgtggataatcggttgggcgttgattctggagtataccattggtggctcagctgttgcccgtggcatatcccctaatctggcactgatttttggtggtgaagatggtttgcctgcaattttagcgcgccaccagatcccaggccttgatattgttgttgatccatgtgctgctattcttgtgtttgttgtaactggccttttgtgcatgggaataaaggagagcacatttgctcagggaattgtaactgcagtcaatgtgtgtgtcctgttatttgtcatagtagctggcagttatctcggcttcaagacaggttggcctggttatgaacttccaacagggttctttccattcggagtagatggaatgtttgctggttctgctacagtcttttttgcattcattgggtttgattcggttgcaagtaccgcagaggaggtgagaaatccccaacgggatttaccgattggtattggtcttgctctcttgttatgttgttctctctacatgatggtctccatagttattgttggtttaattccttactatgcaatggatcccgacaccccgatatcctctgcattcgctagtcatgacatgcaatgggctgtatacttaataactttaggagctgtcatggcactctgctcagctttaatgggtgcccttctccctcagccacgaattctgatggcaatggctagggatggtctgctcccttctattttttcagacattaataaacgcacacaggttccggttaaagcaacagtggcaactgggttgtgtgctgcaaccttagcgttctttatggatgtttcacagcttgcagggatggtgagtgttgggacacttctggcatttacaatggtggcaatatcagtgttgatactaagatatgttcctccagatgagcaacctcttccgtcatctcttcaagagagaattgattctgtttcctttatatgtggtgaaacaacgtcatccggtcatgttggtacttccgatagcagtcaccagcctttaatagttaataatgatgctttggtcgatgtcccacttatcaagaatcaagaagctctagggtgtttggttctcagcgaggaaaccagaaggattgtcgctggatggagcattatgttcacatgtgttggggccttccttttaagttatgcggcatcaagcctgagcttcccagggcttattagatatccgttgtgtggtgttggtggatgtctcctccttgctggtttgattgctctgagttccatagatcaggatgatgcgagacacacttttggacattctggaggttacatgtgcccgtttgttcccctcctacctatcatctgcattctcatcaacatgtaccttttggttaaccttggatctgcgacatgggctcgtgtatcggtgtggctgcttataggagtgattgtgtatgttttctatggtcggaaaaacagttcgcttgccaatgcagtttacgtaactacagctcatgcggaggagatatatcgcgaacatgaaggttctttggcatagtctgagaaagcagcatctcttttgttatatatgtaacacaaatctgtattatctttatctggatgtaacagcaagagtggcactatctatttgtttgcaaaaagatctgtccacggcctttgtaaataatatatatcatcatcaattcataatcaggaaagact

SEQ ID NO: 44864 - protein, 635 aa, Arabidopsis thaliana
  peptide (1)..(635): Ceres Seq. ID no. 12559446
MGFLVDTQKEGGGHSWGYVRSLVRRKQVDSANGQSHGHQLARALTVPHLVAIGVGATIGAGVYILVGTVAREHSGPSLALSFLIAGIAAGLSAFCYAELSSRCPSAGSAYHYSYICVGEGVAWIIGWALILEYTIGGSAVARGISPNLALIFGGEDGLPAILARHQIPGLDIVVDPCAAILVFVVTGLLCMGIKESTFAQGIVTAVNVCVLLFVIVAGSYLGFKTGWPGYELPTGFFPFGVDGMFAGSATVFFAFIGFDSVASTAEEVRNPQRDLPIGIGLALLLCCSLYMMVSIVIVGLIPYYAMDPDTPISSAFASHDMQWAVYLITLGAVMALCSALMGALLPQPRILMAMARDGLLPSIFSDINKRTQVPVKATVATGLCAATLAFFMDVSQLAGMVSVGTLLAFTMVAISVLILRYVPPDEQPLPSSLQERIDSVSFICGETTSSGHVGTSDSSHQPLIVNNDALVDVPLIKNQEALGCLVLSEETRRIVAGWSIMFTCVGAFLLSYAASSLSFPGLIRYPLCGVGGCLLLAGLIALSSIDQDDARHTFGHSGGYMCPFVPLLPIICILINMYLLVNLGSATWARVSVWLLIGVIVYVFYGRKNSSLANAVYVTTAHAEEIYREHEGSLA

SEQ ID NO: 44865 - protein, 445 aa, Arabidopsis thaliana
  peptide (1)..(445): Ceres Seq. ID no. 12559447
MGIKESTFAQGIVTAVNVCVLLFVIVAGSYLGFKTGWPGYELPTGFFPFGVDGMFAGSATVFFAFIGFDSVASTAEEVRNPQRDLPIGIGLALLLCCSLYMMVSIVIVGLIPYYAMDPDTPISSAFASHDMQWAVYLITLGAVMALCSALMGALLPQPRILMAMARDGLLPSIFSDINKRTQVPVKATVATGLCAATLAFFMDVSQLAGMVSVGTLLAFTMVAISVLILRYVPPDEQPLPSSLQERIDSVSFICGETTSSGHVGTSDSSHQPLIVNNDALVDVPLIKNQEALGCLVLSEETRRIVAGWSIMFTCVGAFLLSYAASSLSFPGLIRYPLCGVGGCLLLAGLIALSSIDQDDARHTFGHSGGYMCPFVPLLPIICILINMYLLVNLGSATWARVSVWLLIGVIVYVFYGRKNSSLANAVYVTTAHAEEIYREHEGSLA

SEQ ID NO: 44866 - protein, 392 aa, Arabidopsis thaliana
  peptide (1)..(392): Ceres Seq. ID no. 12559448
MFAGSATVFFAFIGFDSVASTAEEVRNPQRDLPIGIGLALLLCCSLYMMVSIVIVGLIPYYAMDPDTPISSAFASHDMQWAVYLITLGAVMALCSALMGALLPQPRILMAMARDGLLPSIFSDINKRTQVPVKATVATGLCAATLAFFMDVSQLAGMVSVGTLLAFTMVAISVLILRYVPPDEQPLPSSLQERIDSVSFICGETTSSGHVGTSDSSHQPLIVNNDALVDVPLIKNQEALGCLVLSEETRRIVAGWSIMFTCVGAFLLSYAASSLSFPGLIRYPLCGVGGCLLLAGLIALSSIDQDDARHTFGHSGGYMCPFVPLLPIICILINMYLLVNLGSATWARVSVWLLIGVIVYVFYGRKNSSLANAVYVTTAHAEEIYREHEGSLA

SEQ ID NO: 44867 - DNA, 2019 bp, Arabidopsis thaliana
  misc_feature (1)..(2019): Ceres Seq. ID no. 13575547
  misc_feature (1)..(2019): Ortholog of  Ceres SEQ ID NO 14308221 as cited in SEQ ID NO 60363
gaacaaaaaagtatactttctcgtggggcgatcacaggacaaaaccagaaaaagtaacagcttcctccgtcaactacgcacttcactgattcagtcttcgatttcaaacgatcaacaaacatttttatcataatcataatcagaaaaaagtgttaaactttctcctaaaaagatggattcttcttactcctttgccttggggacaagtagttctattttgccaaaactcagtttcaggaatgtagagaacagattttatggtgagaagaacaacaacaatggtttgtgtaaacgttttggatcagatttgggctccaagaagtttaggaatcaaaagttcaagcacggtgttgtttacgctgttgccacttcagataatccaaaaaaggctatgacagtaaagacttccatgtttgagagaagaaaggtagacccgcaaaatgtggctgcaatcattctaggaggaggcaatggagctaaactcttccctcttacaatgagagccgcaacaccagctgttcctgttggtggatgctacaggctgatcgatatcccgatgagtaactgtattaacagctgcatcaacaagatatttgtgctgacacagttcaactcagcttcccttaatcgacatttagcacgaacttattttgggaatggcataaactttggaggtggtttcgtagaggttcttgctgctacacaaacaccaggggaagctgggaagaagtggtttcaaggaacagcagatgctgtcagaaaattcctctgggtgtttgaggatgccaagaacaggaacattgagaacatacttattttgtctggagatcatctctatagaatgaactacatggactttgttcagtctcatgtggatagtaatgcggatattactctttcgtgtgcaccagttagtgaaagccgtgcatcaaattttggtctagtaaagattgatcgaggtgggcgtgtaatccatttctccgagaaaccaacaggagtcgacctgaaatcaatgcaaacagacacaacaatgcttggactgtctcatcaagaagcaacagattctccatacattgcatcaatgggagtttattgtttcaaaaccgaagctttgctgaaccttctaacaagacagtatccgagttccaatgactttggatctgaagttattcctgcagccataagagatcacgatgttcaaggatacatattcagagattactgggaggatattggaactataaagacattttatgaggctaatttagctcttgttgaggagcgaccaaagtttgaattctatgatccagaaactccgttctacacttctcctcggttcctcccaccaacaaaagctgagaaatgtcggatggtagattcaataatctcacatggatgtttcctgcgagaatgcagcgtccaacgttcaatcattggtgaacgatcacgtctagactacggggttgagcttcaggatacattgatgttaggtgcagattactaccaaactgagtctgagattgcatctctattagcagaaggaaaggttccaattggtattggtaaagacacaaaaatcaggaaatgcatcattgacaagaatgctaagatcggtaaaaacgtgatcatcatgaacaaaggcgatgtacaagaagcagataggccagaggaaggattctacattcgatcaggaatcactgtgatagtcgaaaaggcgacaattcaagatggtactgtaatatgaatggagagcttgaaagtaagtccaccgagcaacaatctgagattaaaaagcattttagctagccggtgaatgaaaatagaaagcttcgatcttttctttcccgcagtgcatctacaactagaagaactcaaatttagagatatagatttagagaacaataagaaacacagtcaagtattgatcagtgctccggccgagcagtctttctctcttttcaccttttgtatttaggaatctttgctgattctctttataatattattcaaaaaataagc

SEQ ID NO: 44868 - protein, 523 aa, Arabidopsis thaliana
  peptide (1)..(523): Ceres Seq. ID no. 13575548
MDSSYSFALGTSSSILPKLSFRNVENRFYGEKNNNNGLCKRFGSDLGSKKFRNQKFKHGVVYAVATSDNPKKAMTVKTSMFERRKVDPQNVAAIILGGGNGAKLFPLTMRAATPAVPVGGCYRLIDIPMSNCINSCINKIFVLTQFNSASLNRHLARTYFGNGINFGGGFVEVLAATQTPGEAGKKWFQGTADAVRKFLWVFEDAKNRNIENILILSGDHLYRMNYMDFVQSHVDSNADITLSCAPVSESRASNFGLVKIDRGGRVIHFSEKPTGVDLKSMQTDTTMLGLSHQEATDSPYIASMGVYCFKTEALLNLLTRQYPSSNDFGSEVIPAAIRDHDVQGYIFRDYWEDIGTIKTFYEANLALVEERPKFEFYDPETPFYTSPRFLPPTKAEKCRMVDSIISHGCFLRECSVQRSIIGERSRLDYGVELQDTLMLGADYYQTESEIASLLAEGKVPIGIGKDTKIRKCIIDKNAKIGKNVIIMNKGDVQEADRPEEGFYIRSGITVIVEKATIQDGTVI

SEQ ID NO: 44869 - protein, 450 aa, Arabidopsis thaliana
  peptide (1)..(450): Ceres Seq. ID no. 13575549
MTVKTSMFERRKVDPQNVAAIILGGGNGAKLFPLTMRAATPAVPVGGCYRLIDIPMSNCINSCINKIFVLTQFNSASLNRHLARTYFGNGINFGGGFVEVLAATQTPGEAGKKWFQGTADAVRKFLWVFEDAKNRNIENILILSGDHLYRMNYMDFVQSHVDSNADITLSCAPVSESRASNFGLVKIDRGGRVIHFSEKPTGVDLKSMQTDTTMLGLSHQEATDSPYIASMGVYCFKTEALLNLLTRQYPSSNDFGSEVIPAAIRDHDVQGYIFRDYWEDIGTIKTFYEANLALVEERPKFEFYDPETPFYTSPRFLPPTKAEKCRMVDSIISHGCFLRECSVQRSIIGERSRLDYGVELQDTLMLGADYYQTESEIASLLAEGKVPIGIGKDTKIRKCIIDKNAKIGKNVIIMNKGDVQEADRPEEGFYIRSGITVIVEKATIQDGTVI

SEQ ID NO: 44870 - protein, 444 aa, Arabidopsis thaliana
  peptide (1)..(444): Ceres Seq. ID no. 13575550
MFERRKVDPQNVAAIILGGGNGAKLFPLTMRAATPAVPVGGCYRLIDIPMSNCINSCINKIFVLTQFNSASLNRHLARTYFGNGINFGGGFVEVLAATQTPGEAGKKWFQGTADAVRKFLWVFEDAKNRNIENILILSGDHLYRMNYMDFVQSHVDSNADITLSCAPVSESRASNFGLVKIDRGGRVIHFSEKPTGVDLKSMQTDTTMLGLSHQEATDSPYIASMGVYCFKTEALLNLLTRQYPSSNDFGSEVIPAAIRDHDVQGYIFRDYWEDIGTIKTFYEANLALVEERPKFEFYDPETPFYTSPRFLPPTKAEKCRMVDSIISHGCFLRECSVQRSIIGERSRLDYGVELQDTLMLGADYYQTESEIASLLAEGKVPIGIGKDTKIRKCIIDKNAKIGKNVIIMNKGDVQEADRPEEGFYIRSGITVIVEKATIQDGTVI

SEQ ID NO: 44871 - DNA, 3561 bp, Arabidopsis thaliana
  misc_feature (1)..(3561): Ceres Seq. ID no. 12639063
  misc_feature (1)..(3561): Ortholog of  Ceres SEQ ID NO 13600310 as cited in SEQ ID NO 5086
  misc_feature (1)..(3561): Ortholog of  Ceres SEQ ID NO 14313863 as cited in SEQ ID NO 54791
atgagctttctttagcgcggcagtttccaagtcggagaaggctaataataataaatggaatgagagagcagagggaaggaggattttgccagattgcaaaaatctcacaacgatgacggtgcagaaaacgccattaacaacgattacaagagctgttgtgcatttccgattattgaaaggctgatttgtccacgaagagagagagagatactaggagaaattcgtcgcttcccctggatctccttcttggggtttatactttatagggcatccggagctacgcacgtcctctgaggtaggtaggtgtctttgaaacaaggacgaataattcactgcacatgtgattccttgagagagccagatcgaactttctacagaagaggctgtgatatatcatcttcttaagtcctcccctcttcttcttcttcttctaaggtagggtagaagatgactacagaagatgatgatcagatgctaggaccaagcggcacccaggaaaagatctatgtttctgttcgtatgcgacctttaaacgacaaggaaaagtttaggaatgatgtccctgactgggagtgcatcaacaatactaccatcatttacaggagtcatctttctatctccgagcgttccatgtatccttctgcttacacatttgacagagtgtttagccctgagtgttgtacaaggcaggtgtatgaacaaggggcaaaggaagtcgctttctctgttgtcagtggcgttaatgctagtgtattcgcatatgggcaaacaagcagtggaaagacgtacactatgagcggaattactgactgcgccttggttgatatatatggctacattgacaagcacaaggaaagagaattcattcttaagttctctgctatggagatctacaatgagtctgtaagagatctcttaagtacagatactagtccactcagacttttagatgaccctgagaaagggacagttgttgagaaactcacagaggaaactctgcgagactggaatcatttcaaggagctcctatctgtctgcaaagcacaaaggcaaattggtgagacagctctaaatgaagttagctcccggtctcatcagattttgagattgacagtagaaagcatagctcgtgaattttctaccaatgataagtttagtactctaacagcgacagtgaacttcattgatcttgctggaagtgaacgtgcgtctcaatcattatcagccggcacaaggttaaaagaaggttgtcatataaaccgaagtttgttaacactgggaactgtgatccgtaagctaagtaaagaaaaaactgggcacattccattcagagattcaaaactgacacgcatacttcagtcttctttgggaggaaatgcaagaactgccataatttgcactatgagtcctgcgagaatccatgttgaacaatcaagaaacacactgttatttgcaagctgcgcaaaggaggtgacaacaaatgcacaagtcaatgttgtcatgtctgataaagctttagtaaagcacttgcagagggagttggctaaactggaaagtgagttgagaagccctagtcaggcttcaattgtttctgacacaactgcattactgacggagaaagaccttgaggttgaaaagcttaagaaagaggtattccaactagcacaacaactagagcaagctcgttccgagattaaggatcttcgacgaatggttgaagaagaaaaaaaccaagaaaaagagacgctatcaacagaaacagaagggttaaatgttctgatggaacatcaataccccaagctgcgggtgcgcaggacatgggactctgagaatacaacaccactgagccctatatcagctcaccgttccagtatatctccacgatcaactgaatatagttatgaagagaatgtctttcagctatcagatttcaggatagattctgcatcaagtagtccgcaacagcttgcgtttgtaactcctttccttaaggttccacttgatgatattcacgtgacagatactgtagaccaatctcatgttcacaaagaggaagctatagaagaacctcatgttcaggaggaacggttttatgaaatggctgaacacactgacggaaattctgaggataactgcagggaagttcggtgcatagaaacagagaagtcagatattagtataggtccagtggaaaatatgccggagagcagtccagacaaatacgaggctgtaactgcagaagaaccagtatctgtgacagagccaaagaacttacaacatccgacagaagaagcagtatgtgtgacagagacaaagaacttacaacatcccacagaagctgaaaacgaagaagaagaagaagaagaaagagtaaaggaagtcagtggtgcttctcctgaaccaaaacaagaaagcaacctcacaaaaaatcctgcattgtgtgatttggaatgttcacctgatgagtttgatacaagcatgtctaacctgagtagaatctcaacacctccagcccttatcactccctctcctgaaaagcctttctcttggattatggagagagattcacaacttttcagaggaatgaagctgactagaagtcgaagctgccgaccaagcttattatcgagcccttcctcctcttggttagagaaagatgctgatacaccgccaagctggtacgacaaagaatttatcaaaacagctgagagaaacttgacaatgtgcgacatcaagaaccagagattgttgcaggatgagtttagtgggaggagcatgccaacaacttggttcgagagaagcttgagtgacactcaaacggtggatgctgcttcacatggtgtcagcaacgaaatgtcgccaaatgaatcaccatttcggccatctgatgcttctgtgtttgagctccagacaagtggtagagcttcaataagccaggacagaacagaggagactgctgctcaaaaagacaagcaaatcattcatcgatcgatggaggaaagggaacagaagttcttggcctcgaattcaacgaagagtttcaaggacgcagcaatggacccaatacaagactacttagacacggccttgaattggccagtggagttcaagaggctacagagggagataatagagctatggcacgtgtgtaaagtctcaatggcacacagaagctacttcttccttctgttcagaggagatcagaaagattgcttgtacttggaggtagagctccgtagacttaagtacatcagagaatctttcgcccaaaatagcaacgatggcaacaatatgaccctaatctcctgcacgagggcattgacgagggagaggtataagctgagcaagctgatgcagaggaaactgtcgaaagaagagagagagaacttgttcttgagatggggcattgggctcaacacgaatcacagacgggtccagctggcgcgtcgtctctggtcggattacaaagacatgggtcatgtccgagagagcgcctccctcgttggtaagctcaatgggcatggaaatggaaaatcagattttgatgaaaccaacctctaa

SEQ ID NO: 44872 - protein, 1037 aa, Arabidopsis thaliana
  peptide (1)..(1037): Ceres Seq. ID no. 12639064
MTTEDDDQMLGPSGTQEKIYVSVRMRPLNDKEKFRNDVPDWECINNTTIIYRSHLSISERSMYPSAYTFDRVFSPECCTRQVYEQGAKEVAFSVVSGVNASVFAYGQTSSGKTYTMSGITDCALVDIYGYIDKHKEREFILKFSAMEIYNESVRDLLSTDTSPLRLLDDPEKGTVVEKLTEETLRDWNHFKELLSVCKAQRQIGETALNEVSSRSHQILRLTVESIAREFSTNDKFSTLTATVNFIDLAGSERASQSLSAGTRLKEGCHINRSLLTLGTVIRKLSKEKTGHIPFRDSKLTRILQSSLGGNARTAIICTMSPARIHVEQSRNTLLFASCAKEVTTNAQVNVVMSDKALVKHLQRELAKLESELRSPSQASIVSDTTALLTEKDLEVEKLKKEVFQLAQQLEQARSEIKDLRRMVEEEKNQEKETLSTETEGLNVLMEHQYPKLRVRRTWDSENTTPLSPISAHRSSISPRSTEYSYEENVFQLSDFRIDSASSSPQQLAFVTPFLKVPLDDIHVTDTVDQSHVHKEEAIEEPHVQEERFYEMAEHTDGNSEDNCREVRCIETEKSDISIGPVENMPESSPDKYEAVTAEEPVSVTEPKNLQHPTEEAVCVTETKNLQHPTEAENEEEEEEERVKEVSGASPEPKQESNLTKNPALCDLECSPDEFDTSMSNLSRISTPPALITPSPEKPFSWIMERDSQLFRGMKLTRSRSCRPSLLSSPSSSWLEKDADTPPSWYDKEFIKTAERNLTMCDIKNQRLLQDEFSGRSMPTTWFERSLSDTQTVDAASHGVSNEMSPNESPFRPSDASVFELQTSGRASISQDRTEETAAQKDKQIIHRSMEEREQKFLASNSTKSFKDAAMDPIQDYLDTALNWPVEFKRLQREIIELWHVCKVSMAHRSYFFLLFRGDQKDCLYLEVELRRLKYIRESFAQNSNDGNNMTLISCTRALTRERYKLSKLMQRKLSKEERENLFLRWGIGLNTNHRRVQLARRLWSDYKDMGHVRESASLVGKLNGHGNGKSDFDETNL

SEQ ID NO: 44873 - protein, 1029 aa, Arabidopsis thaliana
  peptide (1)..(1029): Ceres Seq. ID no. 12639065
MLGPSGTQEKIYVSVRMRPLNDKEKFRNDVPDWECINNTTIIYRSHLSISERSMYPSAYTFDRVFSPECCTRQVYEQGAKEVAFSVVSGVNASVFAYGQTSSGKTYTMSGITDCALVDIYGYIDKHKEREFILKFSAMEIYNESVRDLLSTDTSPLRLLDDPEKGTVVEKLTEETLRDWNHFKELLSVCKAQRQIGETALNEVSSRSHQILRLTVESIAREFSTNDKFSTLTATVNFIDLAGSERASQSLSAGTRLKEGCHINRSLLTLGTVIRKLSKEKTGHIPFRDSKLTRILQSSLGGNARTAIICTMSPARIHVEQSRNTLLFASCAKEVTTNAQVNVVMSDKALVKHLQRELAKLESELRSPSQASIVSDTTALLTEKDLEVEKLKKEVFQLAQQLEQARSEIKDLRRMVEEEKNQEKETLSTETEGLNVLMEHQYPKLRVRRTWDSENTTPLSPISAHRSSISPRSTEYSYEENVFQLSDFRIDSASSSPQQLAFVTPFLKVPLDDIHVTDTVDQSHVHKEEAIEEPHVQEERFYEMAEHTDGNSEDNCREVRCIETEKSDISIGPVENMPESSPDKYEAVTAEEPVSVTEPKNLQHPTEEAVCVTETKNLQHPTEAENEEEEEEERVKEVSGASPEPKQESNLTKNPALCDLECSPDEFDTSMSNLSRISTPPALITPSPEKPFSWIMERDSQLFRGMKLTRSRSCRPSLLSSPSSSWLEKDADTPPSWYDKEFIKTAERNLTMCDIKNQRLLQDEFSGRSMPTTWFERSLSDTQTVDAASHGVSNEMSPNESPFRPSDASVFELQTSGRASISQDRTEETAAQKDKQIIHRSMEEREQKFLASNSTKSFKDAAMDPIQDYLDTALNWPVEFKRLQREIIELWHVCKVSMAHRSYFFLLFRGDQKDCLYLEVELRRLKYIRESFAQNSNDGNNMTLISCTRALTRERYKLSKLMQRKLSKEERENLFLRWGIGLNTNHRRVQLARRLWSDYKDMGHVRESASLVGKLNGHGNGKSDFDETNL

SEQ ID NO: 44874 - protein, 1013 aa, Arabidopsis thaliana
  peptide (1)..(1013): Ceres Seq. ID no. 12639066
MRPLNDKEKFRNDVPDWECINNTTIIYRSHLSISERSMYPSAYTFDRVFSPECCTRQVYEQGAKEVAFSVVSGVNASVFAYGQTSSGKTYTMSGITDCALVDIYGYIDKHKEREFILKFSAMEIYNESVRDLLSTDTSPLRLLDDPEKGTVVEKLTEETLRDWNHFKELLSVCKAQRQIGETALNEVSSRSHQILRLTVESIAREFSTNDKFSTLTATVNFIDLAGSERASQSLSAGTRLKEGCHINRSLLTLGTVIRKLSKEKTGHIPFRDSKLTRILQSSLGGNARTAIICTMSPARIHVEQSRNTLLFASCAKEVTTNAQVNVVMSDKALVKHLQRELAKLESELRSPSQASIVSDTTALLTEKDLEVEKLKKEVFQLAQQLEQARSEIKDLRRMVEEEKNQEKETLSTETEGLNVLMEHQYPKLRVRRTWDSENTTPLSPISAHRSSISPRSTEYSYEENVFQLSDFRIDSASSSPQQLAFVTPFLKVPLDDIHVTDTVDQSHVHKEEAIEEPHVQEERFYEMAEHTDGNSEDNCREVRCIETEKSDISIGPVENMPESSPDKYEAVTAEEPVSVTEPKNLQHPTEEAVCVTETKNLQHPTEAENEEEEEEERVKEVSGASPEPKQESNLTKNPALCDLECSPDEFDTSMSNLSRISTPPALITPSPEKPFSWIMERDSQLFRGMKLTRSRSCRPSLLSSPSSSWLEKDADTPPSWYDKEFIKTAERNLTMCDIKNQRLLQDEFSGRSMPTTWFERSLSDTQTVDAASHGVSNEMSPNESPFRPSDASVFELQTSGRASISQDRTEETAAQKDKQIIHRSMEEREQKFLASNSTKSFKDAAMDPIQDYLDTALNWPVEFKRLQREIIELWHVCKVSMAHRSYFFLLFRGDQKDCLYLEVELRRLKYIRESFAQNSNDGNNMTLISCTRALTRERYKLSKLMQRKLSKEERENLFLRWGIGLNTNHRRVQLARRLWSDYKDMGHVRESASLVGKLNGHGNGKSDFDETNL

SEQ ID NO: 44875 - DNA, 1756 bp, Arabidopsis thaliana
  misc_feature (1)..(1756): Ceres Seq. ID no. 12559477
  misc_feature (1)..(1756): Ortholog of  Ceres SEQ ID NO 13654989 as cited in SEQ ID NO 63117
  misc_feature (1)..(1756): Ortholog of  Ceres SEQ ID NO 13584744 as cited in SEQ ID NO 69137
aatttaatctttttatttgttttgttcttcctcgattcaacactcgatgctgtgacaaagcccagattttggccggaaagttttgtgtgtttccggcgaagaatgcgaagaaaccggaagaatctgtaacggaatctaagctaaaagttaaagtacgatgtcggtgtacgacgctgctttccttaatacagagctttcgaaaccgacatcgatttttggtctccggctatgggtcgtgatcggaatcttacttggatctctaattgtcatcgcactctttcttctctccctctgcttaacttctcgccggaaaaatcgaaagccgagagccgatttcgcctccgccgccatcgctacaccgccgatttcaaaggagattaaagagatcgttccggcgcagaatcagtctgttccggcggagatccaggtcgatatcgggaagatcgagcatcgagtggtgttttcagatcgagtgtcgagtggtgagagtagaggaacagcgagtgcaagtgaaacggcgtcgtattccggtagcgggaattgtgggccggaggtgtcgcatcttggatggggccgatggtatactctgagagagcttgaagcggccacgaatgggctttgtgaagagaatgtaatcggagaaggtggttacgggattgtgtatcgtggcattttaactgatggaaccaaagtcgccgtcaagaacttgcttaacaataggggtcaagcagagaaggaattcaaagtagaagtggaagtcattgggcgagtacgacacaagaatcttgttaggcttttagggtattgcgtggaaggtgcatacaggatgctcgtgtatgactttgtcgacaatggtaatttggagcaatggattcacggtgatgttggcgatgtcagcccgctaacttgggatatacgtatgaatattatactggggatggccaaaggattggcgtatctacacgagggtcttgagccaaaagttgttcatcgggatattaaatcaagcaatatcttacttgatcgccaatggaatgctaaggtttcggattttggacttgctaagctcttggggtctgagagcagttatgtgactactcgtgtgatgggaactttcggttatgtagcaccagaatacgcttgcaccggaatgttaaacgagaagagtgatatctatagcttcggaatactaatcatggagataatcactggaagaaacccggttgattatagtcggcctcaaggagagacaaatctagtggattggcttaaatcaatggtgggaaaccgaagatcagaagaagttgttgatccgaaaatacccgaaccaccatcctcaaaggctcttaaacgagtgttgcttgtagctttgcgttgtgtggatcctgatgcgaacaagagacctaaaatgggtcatatcatacatatgcttgaagccgaagatctactctatcgcgatgaacgccgaacaacaagggaccatggaagccgcgagagacaagagacagctgtggttgctgccggtagtgaaagtggtgagagcggttcacggcatcatcagcaaaagcaaagatgaaaaaagagagtcacttgggttaagtgatttccacacgaccattatatttcatttttttttccggtatattattgtctcacttacataatattttcattctttggctcttcgagtcttggccttacgaaattaacattcttcttctttgtaaccttttgtcaacgatcacattcacatgtc

SEQ ID NO: 44876 - protein, 472 aa, Arabidopsis thaliana
  peptide (1)..(472): Ceres Seq. ID no. 12559478
MSVYDAAFLNTELSKPTSIFGLRLWVVIGILLGSLIVIALFLLSLCLTSRRKNRKPRADFASAAIATPPISKEIKEIVPAQNQSVPAEIQVDIGKIEHRVVFSDRVSSGESRGTASASETASYSGSGNCGPEVSHLGWGRWYTLRELEAATNGLCEENVIGEGGYGIVYRGILTDGTKVAVKNLLNNRGQAEKEFKVEVEVIGRVRHKNLVRLLGYCVEGAYRMLVYDFVDNGNLEQWIHGDVGDVSPLTWDIRMNIILGMAKGLAYLHEGLEPKVVHRDIKSSNILLDRQWNAKVSDFGLAKLLGSESSYVTTRVMGTFGYVAPEYACTGMLNEKSDIYSFGILIMEIITGRNPVDYSRPQGETNLVDWLKSMVGNRRSEEVVDPKIPEPPSSKALKRVLLVALRCVDPDANKRPKMGHIIHMLEAEDLLYRDERRTTRDHGSRERQETAVVAAGSESGESGSRHHQQKQR

SEQ ID NO: 44877 - protein, 249 aa, Arabidopsis thaliana
  peptide (1)..(249): Ceres Seq. ID no. 12559479
MLVYDFVDNGNLEQWIHGDVGDVSPLTWDIRMNIILGMAKGLAYLHEGLEPKVVHRDIKSSNILLDRQWNAKVSDFGLAKLLGSESSYVTTRVMGTFGYVAPEYACTGMLNEKSDIYSFGILIMEIITGRNPVDYSRPQGETNLVDWLKSMVGNRRSEEVVDPKIPEPPSSKALKRVLLVALRCVDPDANKRPKMGHIIHMLEAEDLLYRDERRTTRDHGSRERQETAVVAAGSESGESGSRHHQQKQR

SEQ ID NO: 44878 - DNA, 2010 bp, Arabidopsis thaliana; identical to SEQ ID NO: 36516
  misc_feature (1)..(2010): Ceres Seq. ID no. 12600087
  misc_feature (1)..(2010): Ortholog of  Ceres SEQ ID NO 14311103 as cited in SEQ ID NO 52897

SEQ ID NO: 44879 - protein, 536 aa, Arabidopsis thaliana; identical to SEQ ID NO: 36517
  peptide (1)..(536): Ceres Seq. ID no. 12600088

SEQ ID NO: 44880 - protein, 377 aa, Arabidopsis thaliana; identical to SEQ ID NO: 36518
  peptide (1)..(377): Ceres Seq. ID no. 12600089

SEQ ID NO: 44881 - protein, 357 aa, Arabidopsis thaliana; identical to SEQ ID NO: 36519
  peptide (1)..(357): Ceres Seq. ID no. 12600090

SEQ ID NO: 44882 - DNA, 2105 bp, Arabidopsis thaliana
  misc_feature (1)..(2105): Ceres Seq. ID no. 12559607
  misc_feature (1)..(2105): Ortholog of  Ceres SEQ ID NO 15177463 as cited in SEQ ID NO 0
agagaagaagtgattctctaaacaacaaaaataaaataaaactcttctttctctatttctgttgaaggtacctcatcattgcaacacaaacttaaagctttgtttgtgtctgctttcagacaatgataccaagttacgacccaaatgatacagaggctggtctcaagcttctcgaggatctgacaacaaatgcagaggctatccaacaacaagttcttcaccaaatactctctcaaaactctggaactcaatatctccgagcatttctggacggagaagccgacaagaatcaacaaagcttcaaaaacaaagtccctgtggtgaattatgacgacgtaaagcctttcattcaacgaatcgctgatggagaatcatctgatatcgtctctgctcagcccatcacagaactcctcactagttcggggacttctgcaggaaagccgaagttgatgccttctacagctgaagaattggaaaggaagacatttttctacagcatgcttgtgcctatcatgaacaaatatgtggatgggctagatgagggaaaagggatgtatcttctattcataaaaccagagatcaagactccgtcaggtctaatggcccgtcctgttttgaccagctactacaaaagtcaacatttcagaaacagaccattcaacaagtacaacgtctacactagccctgaccagaccattctttgtcaagacagcaagcagagcatgtactgtcagcttctctgcggtctagtacagcgatctcatgtcctaagagtcggagctgtctttgcctctgcctttcttcgagcagtcaagttcttggaggatcattacaaagagctttgcgctgacattagaaccggtactgtcactagctggatcactgactcatcctgcagagactcggtcttgtcgatccttaatggcccaaatcaagaattggctgatgaaattgagagtgagtgcgctgaaaagtcgtgggaaggaatcttgaggaggatatggcctaaggctaaatatgttgaggtgattgtgactggttcgatggctcaatacattccgacactagagttttatagcggaggtttaccgttggtttcaacgatgtatgcttcctctgagtgttactttggtatcaaccttaatccgttgtgtgatcctgccgatgtttcctacacgcttcttcctaacatggcttacttcgagttcttgcccgtcgacgacaaatcccacgaagagattcactttgcaactcactccaacaccgatgatgatgatgatgctctcaaggaagatctcatcgtcaatcttgttaatgtcgaagtcggtcaatactacgaaatcgtcatcactacattcacaggtttgtacagatacagagtaggcgatattctaaaagtgacgggtttccacaacaaagcgcctcaattccgtttcgtgcagcgaagaaacgttgtactaagcatcgacactgacaaaacgagcgaagaagatctactaaacgcagtgacacaagctaaactaaaccatcttcaacatccttcaagcctcttgctcacggagtacacaagctacgcagacacgtcatcaatcccagggcattacgtgctcttctgggagctaaagccacgtcacagcaatgacccaccaaagcttgacgacaagacaatggaggattgttgctctgaggttgaggattgtttggattacgtctacaggagatgcaggaacagggacaagtcgattgggccattggagataagagtggtgagtttgggcacgtttgattcgttaatggatttttgtgtctcacaaggatcatctttgaatcagtataagactccaagatgtgttaaatctggaggagctcttgagattcttgattccagagttattgggaggttcttcagtaagagagttcctcaatgggaaccacttggtttagattcttagactttacttctttttctttaatgtatgattaaagtcttgattttataagtataagatcttcatttgttaagttgctaattggtgtttctttttttaattgttaagcttttgtctcttttgtaacaaactttcagcaaagtcctctcattttgt

SEQ ID NO: 44883 - protein, 609 aa, Arabidopsis thaliana
  peptide (1)..(609): Ceres Seq. ID no. 12559608
MIPSYDPNDTEAGLKLLEDLTTNAEAIQQQVLHQILSQNSGTQYLRAFLDGEADKNQQSFKNKVPVVNYDDVKPFIQRIADGESSDIVSAQPITELLTSSGTSAGKPKLMPSTAEELERKTFFYSMLVPIMNKYVDGLDEGKGMYLLFIKPEIKTPSGLMARPVLTSYYKSQHFRNRPFNKYNVYTSPDQTILCQDSKQSMYCQLLCGLVQRSHVLRVGAVFASAFLRAVKFLEDHYKELCADIRTGTVTSWITDSSCRDSVLSILNGPNQELADEIESECAEKSWEGILRRIWPKAKYVEVIVTGSMAQYIPTLEFYSGGLPLVSTMYASSECYFGINLNPLCDPADVSYTLLPNMAYFEFLPVDDKSHEEIHFATHSNTDDDDDALKEDLIVNLVNVEVGQYYEIVITTFTGLYRYRVGDILKVTGFHNKAPQFRFVQRRNVVLSIDTDKTSEEDLLNAVTQAKLNHLQHPSSLLLTEYTSYADTSSIPGHYVLFWELKPRHSNDPPKLDDKTMEDCCSEVEDCLDYVYRRCRNRDKSIGPLEIRVVSLGTFDSLMDFCVSQGSSLNQYKTPRCVKSGGALEILDSRVIGRFFSKRVPQWEPLGLDS

SEQ ID NO: 44884 - protein, 500 aa, Arabidopsis thaliana
  peptide (1)..(500): Ceres Seq. ID no. 12559609
MPSTAEELERKTFFYSMLVPIMNKYVDGLDEGKGMYLLFIKPEIKTPSGLMARPVLTSYYKSQHFRNRPFNKYNVYTSPDQTILCQDSKQSMYCQLLCGLVQRSHVLRVGAVFASAFLRAVKFLEDHYKELCADIRTGTVTSWITDSSCRDSVLSILNGPNQELADEIESECAEKSWEGILRRIWPKAKYVEVIVTGSMAQYIPTLEFYSGGLPLVSTMYASSECYFGINLNPLCDPADVSYTLLPNMAYFEFLPVDDKSHEEIHFATHSNTDDDDDALKEDLIVNLVNVEVGQYYEIVITTFTGLYRYRVGDILKVTGFHNKAPQFRFVQRRNVVLSIDTDKTSEEDLLNAVTQAKLNHLQHPSSLLLTEYTSYADTSSIPGHYVLFWELKPRHSNDPPKLDDKTMEDCCSEVEDCLDYVYRRCRNRDKSIGPLEIRVVSLGTFDSLMDFCVSQGSSLNQYKTPRCVKSGGALEILDSRVIGRFFSKRVPQWEPLGLDS

SEQ ID NO: 44885 - protein, 484 aa, Arabidopsis thaliana
  peptide (1)..(484): Ceres Seq. ID no. 12559610
MLVPIMNKYVDGLDEGKGMYLLFIKPEIKTPSGLMARPVLTSYYKSQHFRNRPFNKYNVYTSPDQTILCQDSKQSMYCQLLCGLVQRSHVLRVGAVFASAFLRAVKFLEDHYKELCADIRTGTVTSWITDSSCRDSVLSILNGPNQELADEIESECAEKSWEGILRRIWPKAKYVEVIVTGSMAQYIPTLEFYSGGLPLVSTMYASSECYFGINLNPLCDPADVSYTLLPNMAYFEFLPVDDKSHEEIHFATHSNTDDDDDALKEDLIVNLVNVEVGQYYEIVITTFTGLYRYRVGDILKVTGFHNKAPQFRFVQRRNVVLSIDTDKTSEEDLLNAVTQAKLNHLQHPSSLLLTEYTSYADTSSIPGHYVLFWELKPRHSNDPPKLDDKTMEDCCSEVEDCLDYVYRRCRNRDKSIGPLEIRVVSLGTFDSLMDFCVSQGSSLNQYKTPRCVKSGGALEILDSRVIGRFFSKRVPQWEPLGLDS

SEQ ID NO: 44886 - DNA, 2200 bp, Arabidopsis thaliana
  misc_feature (1)..(2200): Ceres Seq. ID no. 13575611
  misc_feature (1)..(2200): Ortholog of  Ceres SEQ ID NO 15177304 as cited in SEQ ID NO 52668
atggcgaaaaatattttaccatctcctgtggtaaaaaaaaaacatttaccatctccagtacaaatgtcccacgacaacaaccgcttcttcttcctcatccctcggatttacaaagaaacttgtcttcacgttaatcacgccacgtgtctgaacccaatttccaacgtgtctctcacattctcgaattcgactcttttagtggttctcgtcctctctgggcttttagactgggctcgaaccatctccattccaccgataacatcgaaacccgccacgtgtcctccctcctctgtctctcgtctatatatccacgctcttgttcgtcgattcgagatcacacacacaaccaccaaacacaaagcttttcaaaacccagagaaaatgttcatcgagagcttcaaagtagagagtccaaatgtcaaatacacagagaatgagatcaattcggtgtacgattacgaaacaacagaggtcgtccacgagaatcgtaacggtacatatcaatgggtcgtgaagccaaagactgtcaaatacgatttcaaaacagacactcgtgtccccaaattaggggttatgcttgttggttggggaggaaacaatggatcaacactaaccgctggtgtcattgctaacaaagaaggaatatcgtgggcgactaaagacaaagtgcaacaagctaattactttggttcacttactcaagcttcatcgattcgtgttggctcttacaatggtgaagagatctatgctcctttcaagagtcttcttccaatggtgaatccagaggatgttgtgtttggtggttgggatataagtgacatgaatttagcagacgctatggctagagctagagttcttgatattgatctgcagaaacaacttagaccttacatggagaacatgatcccacttcctggtatctatgaccctgatttcatcgctgctaatcaaggttcacgtgctaatagcgtgatcaaaggtaccaagaaggaacaagttgatcacatcatcaaggacatgagggagtttaaggagaagaacaaagtggataagttggttgtgttatggactgcaaacacagagcgttatagcaatgtgattgtaggacttaacgatacgacggagaatctattggcttctgttgaaaaggacgagtctgagatctcgccgtctacgttgtatgcgattgcttgtgttcttgaaggcattcctttcatcaatgggagtcctcagaatacttttgtccccggtcttatcgaattggctatatcgaagaattgtttgattggtggggatgatttcaagagtggtcagactaagatgaaatccgttttggttgatttccttgttggagctggcattaagcctacttcgattgtgagctataatcatttgggaaacaacgacgggatgaacctctcagcgccacagactttccgctctaaggagatttcaaagagcaatgttgtagacgacatggtagctagtaatggcatcctctttgagcctggtgaacaccctgaccatgtcgttgtcatcaagtatgtgccatatgttgcggatagtaaaagagcaatggatgagtacacgtctgagatattcatgggagggaggaacactatagtgttgcataacacttgtgaggactctctcttggctgcaccaattatcttggatcttgtccttctcgctgaactcagcaccagaatccaatttaaagctgaaggagaggggaagtttcactctttccacccggtagctaccatactcagttacctcacaaaggcacctcttgtaccgcccggaacaccggtggttaacgctctgtcgaagcagcgggcaatgctggaaaacattcttagggcatgtgttgggcttgcgccagagaacaacatgatcatggagtacaagtgaaggatgaggaagaagaagtaaaggtacctaagatgaccttaggatatgaaggacactgctccattgtttcatttatatatatcattttgtatgtatattatatgaatgtgtgtgtgacggataatatggataagcttagggttaacttgtgtgatatggatctggtcggtttatttggtgagaagattagctaagcttttggatcaaatgtgtaaaagatttaagtaattatgcttgtgtctccttgtaatataaccaaacttatgatctatgaatatggattttc

SEQ ID NO: 44887 - protein, 637 aa, Arabidopsis thaliana
  peptide (1)..(637): Ceres Seq. ID no. 13575612
MAKNILPSPVVKKKHLPSPVQMSHDNNRFFFLIPRIYKETCLHVNHATCLNPISNVSLTFSNSTLLVVLVLSGLLDWARTISIPPITSKPATCPPSSVSRLYIHALVRRFEITHTTTKHKAFQNPEKMFIESFKVESPNVKYTENEINSVYDYETTEVVHENRNGTYQWVVKPKTVKYDFKTDTRVPKLGVMLVGWGGNNGSTLTAGVIANKEGISWATKDKVQQANYFGSLTQASSIRVGSYNGEEIYAPFKSLLPMVNPEDVVFGGWDISDMNLADAMARARVLDIDLQKQLRPYMENMIPLPGIYDPDFIAANQGSRANSVIKGTKKEQVDHIIKDMREFKEKNKVDKLVVLWTANTERYSNVIVGLNDTTENLLASVEKDESEISPSTLYAIACVLEGIPFINGSPQNTFVPGLIELAISKNCLIGGDDFKSGQTKMKSVLVDFLVGAGIKPTSIVSYNHLGNNDGMNLSAPQTFRSKEISKSNVVDDMVASNGILFEPGEHPDHVVVIKYVPYVADSKRAMDEYTSEIFMGGRNTIVLHNTCEDSLLAAPIILDLVLLAELSTRIQFKAEGEGKFHSFHPVATILSYLTKAPLVPPGTPVVNALSKQRAMLENILRACVGLAPENNMIMEYK

SEQ ID NO: 44888 - protein, 616 aa, Arabidopsis thaliana
  peptide (1)..(616): Ceres Seq. ID no. 13575613
MSHDNNRFFFLIPRIYKETCLHVNHATCLNPISNVSLTFSNSTLLVVLVLSGLLDWARTISIPPITSKPATCPPSSVSRLYIHALVRRFEITHTTTKHKAFQNPEKMFIESFKVESPNVKYTENEINSVYDYETTEVVHENRNGTYQWVVKPKTVKYDFKTDTRVPKLGVMLVGWGGNNGSTLTAGVIANKEGISWATKDKVQQANYFGSLTQASSIRVGSYNGEEIYAPFKSLLPMVNPEDVVFGGWDISDMNLADAMARARVLDIDLQKQLRPYMENMIPLPGIYDPDFIAANQGSRANSVIKGTKKEQVDHIIKDMREFKEKNKVDKLVVLWTANTERYSNVIVGLNDTTENLLASVEKDESEISPSTLYAIACVLEGIPFINGSPQNTFVPGLIELAISKNCLIGGDDFKSGQTKMKSVLVDFLVGAGIKPTSIVSYNHLGNNDGMNLSAPQTFRSKEISKSNVVDDMVASNGILFEPGEHPDHVVVIKYVPYVADSKRAMDEYTSEIFMGGRNTIVLHNTCEDSLLAAPIILDLVLLAELSTRIQFKAEGEGKFHSFHPVATILSYLTKAPLVPPGTPVVNALSKQRAMLENILRACVGLAPENNMIMEYK

SEQ ID NO: 44889 - protein, 510 aa, Arabidopsis thaliana
  peptide (1)..(510): Ceres Seq. ID no. 13575614
MFIESFKVESPNVKYTENEINSVYDYETTEVVHENRNGTYQWVVKPKTVKYDFKTDTRVPKLGVMLVGWGGNNGSTLTAGVIANKEGISWATKDKVQQANYFGSLTQASSIRVGSYNGEEIYAPFKSLLPMVNPEDVVFGGWDISDMNLADAMARARVLDIDLQKQLRPYMENMIPLPGIYDPDFIAANQGSRANSVIKGTKKEQVDHIIKDMREFKEKNKVDKLVVLWTANTERYSNVIVGLNDTTENLLASVEKDESEISPSTLYAIACVLEGIPFINGSPQNTFVPGLIELAISKNCLIGGDDFKSGQTKMKSVLVDFLVGAGIKPTSIVSYNHLGNNDGMNLSAPQTFRSKEISKSNVVDDMVASNGILFEPGEHPDHVVVIKYVPYVADSKRAMDEYTSEIFMGGRNTIVLHNTCEDSLLAAPIILDLVLLAELSTRIQFKAEGEGKFHSFHPVATILSYLTKAPLVPPGTPVVNALSKQRAMLENILRACVGLAPENNMIMEYK

SEQ ID NO: 44890 - DNA, 1777 bp, Arabidopsis thaliana
  misc_feature (1)..(1777): Ceres Seq. ID no. 12559619
  misc_feature (1)..(1777): Ortholog of  Ceres SEQ ID NO 15226950 as cited in SEQ ID NO 68649
  misc_feature (1)..(1777): Ortholog of  Ceres SEQ ID NO 13502947 as cited in SEQ ID NO 69257
atcgtcagatttagcgatttcacctccattttcttcgatcagtgctagaaccagagcctacctagctcgcaccttaaggaggtgattcagtttacaagcaaaatggtgaagatttgctgcattggagctggatatgttggtggtccaaccatggctgtcattgctctaaagtgtccatctgttgaagtagctgttgttgatatctctgtgccaaggatcaatgcctggaacagtgatcagttaccgatctatgagcctggtcttgatgatgtcgttaagcagtgccgtggaaagaatctcttcttcagcaccgatgttgagaaacatgtgagagaggctgacattgtttttgtgtctgtcaacacccctactaagacccgtggtcttggagctggcaaagctgcggatttgacttactgggagagcgctgctcgtatgattgccgatgtttcggtttccgacaagattgttgttgagaaatcaactgttcctgtcaaaaccgcagaggcaattgagaagattcttacacacaacagcaaaggaatcaaattccagattctgtcaaaccctgagttccttgctgaaggaaccgctattgaagaccttttcatgcctgaccgtgtcctcatcggtggtcgtgaaacaactgaaggctttgcagccgtcaaagccttgaaagacatttatgcccaatgggtccctgaagagagaatcctcaccaccaatctatggtctgccgagctttccaagcttgcagctaatgccttcctagcccagagaatctcatcagtcaatgcaatgtccgctctctgtgaggcaactggcgccaatgtctcagaggtctcttatgctgtgggcaaagactctcgtattggtcccaagttcttgaactctagtgttgggttcggaggatcttgtttccagaaagatattctcaacttagtctacatctgcgaatgcaacggcttacccgaagttgctgagtactggaaacaagtcatcaagatcaacgactaccagaaaacccgatttgttaaccgcattgtctcttcaatgtttaacacagtctccaacaaaaagattgcggttctcggcttcgctttcaagaaagacactggagacactagagagactccagccattgatgtctgcaaaggtctgttaggtgacaaggctcgtctcagcatctacgacccacaagtcactgaagagcagatccaaagagacttaaccatgaacaaattcgactgggaccacccacttcatctccagcccatgagccccaccactgtgaagcaagtctcagtcgcttgggacgcatacactgcaaccaaagacgcccacggtatctgcattttaaccgagtgggacgagttcaagaaacttgatttccagcggatctttgagaatatgcagaaaccggcttttgtttttgacggtagaaacgtggtcgacgctgataaactcagggagattgggtttattgtttactccattggtaagccattggaccagtggctcaaggacatgcctgctcttgcctaaacaacaaccaaacctcttccttagcttttttctccattttttccgaattctcatgagtttttccatatatctttaactacagtatgtttgatcaataattgtttcttttgttcttcctattatgaattcctacagagattttaggtttggttcttgttggtaattatgtaccttgggttatcaaatattgtaagcttttcgaatattactttcataatataaaagttttccc

SEQ ID NO: 44891 - protein, 480 aa, Arabidopsis thaliana
  peptide (1)..(480): Ceres Seq. ID no. 12559620
MVKICCIGAGYVGGPTMAVIALKCPSVEVAVVDISVPRINAWNSDQLPIYEPGLDDVVKQCRGKNLFFSTDVEKHVREADIVFVSVNTPTKTRGLGAGKAADLTYWESAARMIADVSVSDKIVVEKSTVPVKTAEAIEKILTHNSKGIKFQILSNPEFLAEGTAIEDLFMPDRVLIGGRETTEGFAAVKALKDIYAQWVPEERILTTNLWSAELSKLAANAFLAQRISSVNAMSALCEATGANVSEVSYAVGKDSRIGPKFLNSSVGFGGSCFQKDILNLVYICECNGLPEVAEYWKQVIKINDYQKTRFVNRIVSSMFNTVSNKKIAVLGFAFKKDTGDTRETPAIDVCKGLLGDKARLSIYDPQVTEEQIQRDLTMNKFDWDHPLHLQPMSPTTVKQVSVAWDAYTATKDAHGICILTEWDEFKKLDFQRIFENMQKPAFVFDGRNVVDADKLREIGFIVYSIGKPLDQWLKDMPALA

SEQ ID NO: 44892 - protein, 464 aa, Arabidopsis thaliana
  peptide (1)..(464): Ceres Seq. ID no. 12559621
MAVIALKCPSVEVAVVDISVPRINAWNSDQLPIYEPGLDDVVKQCRGKNLFFSTDVEKHVREADIVFVSVNTPTKTRGLGAGKAADLTYWESAARMIADVSVSDKIVVEKSTVPVKTAEAIEKILTHNSKGIKFQILSNPEFLAEGTAIEDLFMPDRVLIGGRETTEGFAAVKALKDIYAQWVPEERILTTNLWSAELSKLAANAFLAQRISSVNAMSALCEATGANVSEVSYAVGKDSRIGPKFLNSSVGFGGSCFQKDILNLVYICECNGLPEVAEYWKQVIKINDYQKTRFVNRIVSSMFNTVSNKKIAVLGFAFKKDTGDTRETPAIDVCKGLLGDKARLSIYDPQVTEEQIQRDLTMNKFDWDHPLHLQPMSPTTVKQVSVAWDAYTATKDAHGICILTEWDEFKKLDFQRIFENMQKPAFVFDGRNVVDADKLREIGFIVYSIGKPLDQWLKDMPALA

SEQ ID NO: 44893 - protein, 369 aa, Arabidopsis thaliana
  peptide (1)..(369): Ceres Seq. ID no. 12559622
MIADVSVSDKIVVEKSTVPVKTAEAIEKILTHNSKGIKFQILSNPEFLAEGTAIEDLFMPDRVLIGGRETTEGFAAVKALKDIYAQWVPEERILTTNLWSAELSKLAANAFLAQRISSVNAMSALCEATGANVSEVSYAVGKDSRIGPKFLNSSVGFGGSCFQKDILNLVYICECNGLPEVAEYWKQVIKINDYQKTRFVNRIVSSMFNTVSNKKIAVLGFAFKKDTGDTRETPAIDVCKGLLGDKARLSIYDPQVTEEQIQRDLTMNKFDWDHPLHLQPMSPTTVKQVSVAWDAYTATKDAHGICILTEWDEFKKLDFQRIFENMQKPAFVFDGRNVVDADKLREIGFIVYSIGKPLDQWLKDMPALA

SEQ ID NO: 44894 - DNA, 3759 bp, Arabidopsis thaliana
  misc_feature (1)..(3759): Ceres Seq. ID no. 12559623
  misc_feature (1)..(3759): Ortholog of  Ceres SEQ ID NO 14316144 as cited in SEQ ID NO 52397
atgcagcaaaactctgttcttcttgctctgtttttcctctgtttctcatccgggttgggttcgggtcaaccgggtcaaagagacgatcttcaaactcttctcgaactgaagaactcttttatcacaaacccaaaagaagaagacgttctccgagattggaattccggtagtcccagttactgcaactggaccggcgtcacatgcggtggtcgtgaaatcatcggtttaaatctctccggtttaggtttaaccggttcaatttctccttcgatcggccggtttaacaacctaatccacatcgatttgtcttcgaaccgtcttgtcggtcccatcccaacgactctctctaacctctcctcttcattggaatcgttgcatctcttctctaacctactcagtggcgatataccgagtcaactcggctcacttgtgaatctcaaatcgttaaaactcggagacaacgaactcaacggaacaatcccggagacgtttgggaacctcgtcaacctccagatgcttgctttggcttcgtgtagactcaccggtcttataccgagtcgattcggtagactcgttcagctccagactttgatactacaagacaacgaactcgaaggaccgattccggcggaaatcggaaactgcaccagcctcgctttgtttgccgcggcgtttaatcgtctcaacggttcgttaccggcggagctgaatcgacttaagaacctccagacgctgaatttgggagataacagtttctccggtgagataccgagtcaactcggtgatttggttagtatccaataccttaatttgattggtaatcagttacagggtttgattccaaagagattaacagaattagcgaatcttcaaacacttgatttgtcttctaataatctcaccggagtgatacacgaagagttctggagaatgaatcagcttgagttcttggtattagcgaaaaatcgtctctctggttcgttaccaaagactatatgttctaacaacacaagcttgaagcaactgtttctgtctgaaactcagctttccggcgaaattccagcggaaatcagcaactgtcagtcattaaaattgcttgatttgtcgaacaatacgcttacaggtcaaatcccggattcgttgtttcagctcgtcgaactcacgaatctttatcttaacaacaatagcttggagggtacgttatcttcatcaatatcaaacctcacgaatctacaagagtttactctctatcacaataacttggaaggcaaggtacctaaagaaatcggatttcttggtaaattggagattatgtatctgtatgagaatcggttttcgggtgaaatgccggttgagattgggaattgcacgagactgcaggagattgattggtacgggaatcgtttaagtggagagattccttcttcaattggaagattgaaagatcttactcgtcttcacttgagagagaacgagcttgtaggtaacattcccgccagtttaggtaactgtcatcaaatgacggttatcgatttagcggataaccagctctcgggttcaattccttcctcgttcgggttcttaacggcattagaactgtttatgatctacaacaattctcttcaaggaaatcttccggattcacttatcaacctcaagaacctcacaagaatcaatttttcaagcaacaagttcaatggttcgataagtccattgtgcggttcaagctcgtatctctcgtttgatgtcacggaaaacggatttgagggagatatacctcttgagctaggtaagtctacgaatcttgatcggttaaggctggggaagaatcagttcacaggaagaatccctcggacatttgggaagatcagtgagctttctttattggatatttcaagaaactctctctcaggaatcataccggtggagctcggtttgtgcaagaagctgacacacattgatctcaacaataactatctttcaggggtgatacctacatggcttggaaagcttccattgttgggagagctaaagctttcttctaataagtttgttgggtctctccctactgagattttcagcttaaccaatattcttacgctatttcttgatggtaactcactcaacggctcgatcccgcaagagattggtaacttgcaagctctcaatgcgttgaacctcgaagagaatcagctttcaggtcctctgccttctacaatagggaaactgagcaagcttttcgagcttcggttatcgagaaacgctttaaccggagagattcctgttgagattggacagctgcaagatcttcaaagtgctttagatctcagctacaacaactttaccggacgtataccgtctacgatttcgacgttacctaagcttgaatctcttgatctgtctcacaatcagcttgtaggagaagttcctggccaaatcggtgacatgaaaagcttgggatatcttaacctctcttacaacaaccttgagggaaagttaaagaaacagttctctagatggcaagctgatgcgtttgtaggcaatgcaggtctttgtggaagccctcttagtcattgcaacagagctggatcaaagaatcaacgaagtcttagtccgaaaacagtggttataatctctgcgatttcatcattagcagcgattgctttgatggtacttgttatcatcctcttcttcaagcaaaaccatgatcttttcaagaaagtgcgaggcggaaacagcgcattttcatcgaactcttcttcttcacaagctcctctatttagtaatggaggtgcaaagtcagatataaagtgggatgacataatggaagctacacattaccttaacgaagagttcatgattggatcaggagggtcaggaaaagtttacaaagcggagttaaagaacggcgagacgatagctgtgaagaagattctttggaaagatgatttgatgtcaaacaagagctttaacagagaagttaagacacttggaacaatcagacatagacatttggttaagctaatgggttattgtagcagtaaagcagatggtttgaatctgttgatctacgagtatatggcgaatggaagcgtttgggattggcttcatgccaacgagaatacgaagaaaaaggaggttcttggttgggaaacaagattgaaaatagcacttgggttggctcaaggagtggagtatcttcattatgactgtgttcctccgattgttcatcgcgatattaagtctagtaatgtgcttcttgattccaacatagaagcacatttaggagatttcggactcgccaagatcctaaccgggaattatgacaccaacacagaatcaaacactatgtttgcaggctcttatggctacatcgcgccagagtatgcgtactcgttgaaggcgactgagaagagcgatgtttacagtatggggatagtgttgatggagattgtgactggtaaaatgccaaccgaagcaatgtttgatgaagagacggatatggtgagatgggtagagacagttcttgatacacctccgggttctgaagcaagagagaagctgattgattcagagcttaaatcgctgttaccttgcgaagaagaagcagcttatcaggttcttgaaatagcacttcagtgcacaaaaagttatcctcaagagagaccttcttcaagacaagctagtgaatatcttcttaatgtcttcaacaatagagctgccagttacagggagatgcaaactgataccgataaatga

SEQ ID NO: 44895 - protein, 1252 aa, Arabidopsis thaliana
  peptide (1)..(1252): Ceres Seq. ID no. 12559624
MQQNSVLLALFFLCFSSGLGSGQPGQRDDLQTLLELKNSFITNPKEEDVLRDWNSGSPSYCNWTGVTCGGREIIGLNLSGLGLTGSISPSIGRFNNLIHIDLSSNRLVGPIPTTLSNLSSSLESLHLFSNLLSGDIPSQLGSLVNLKSLKLGDNELNGTIPETFGNLVNLQMLALASCRLTGLIPSRFGRLVQLQTLILQDNELEGPIPAEIGNCTSLALFAAAFNRLNGSLPAELNRLKNLQTLNLGDNSFSGEIPSQLGDLVSIQYLNLIGNQLQGLIPKRLTELANLQTLDLSSNNLTGVIHEEFWRMNQLEFLVLAKNRLSGSLPKTICSNNTSLKQLFLSETQLSGEIPAEISNCQSLKLLDLSNNTLTGQIPDSLFQLVELTNLYLNNNSLEGTLSSSISNLTNLQEFTLYHNNLEGKVPKEIGFLGKLEIMYLYENRFSGEMPVEIGNCTRLQEIDWYGNRLSGEIPSSIGRLKDLTRLHLRENELVGNIPASLGNCHQMTVIDLADNQLSGSIPSSFGFLTALELFMIYNNSLQGNLPDSLINLKNLTRINFSSNKFNGSISPLCGSSSYLSFDVTENGFEGDIPLELGKSTNLDRLRLGKNQFTGRIPRTFGKISELSLLDISRNSLSGIIPVELGLCKKLTHIDLNNNYLSGVIPTWLGKLPLLGELKLSSNKFVGSLPTEIFSLTNILTLFLDGNSLNGSIPQEIGNLQALNALNLEENQLSGPLPSTIGKLSKLFELRLSRNALTGEIPVEIGQLQDLQSALDLSYNNFTGRIPSTISTLPKLESLDLSHNQLVGEVPGQIGDMKSLGYLNLSYNNLEGKLKKQFSRWQADAFVGNAGLCGSPLSHCNRAGSKNQRSLSPKTVVIISAISSLAAIALMVLVIILFFKQNHDLFKKVRGGNSAFSSNSSSSQAPLFSNGGAKSDIKWDDIMEATHYLNEEFMIGSGGSGKVYKAELKNGETIAVKKILWKDDLMSNKSFNREVKTLGTIRHRHLVKLMGYCSSKADGLNLLIYEYMANGSVWDWLHANENTKKKEVLGWETRLKIALGLAQGVEYLHYDCVPPIVHRDIKSSNVLLDSNIEAHLGDFGLAKILTGNYDTNTESNTMFAGSYGYIAPEYAYSLKATEKSDVYSMGIVLMEIVTGKMPTEAMFDEETDMVRWVETVLDTPPGSEAREKLIDSELKSLLPCEEEAAYQVLEIALQCTKSYPQERPSSRQASEYLLNVFNNRAASYREMQTDTDK

SEQ ID NO: 44896 - protein, 1081 aa, Arabidopsis thaliana
  peptide (1)..(1081): Ceres Seq. ID no. 12559625
MLALASCRLTGLIPSRFGRLVQLQTLILQDNELEGPIPAEIGNCTSLALFAAAFNRLNGSLPAELNRLKNLQTLNLGDNSFSGEIPSQLGDLVSIQYLNLIGNQLQGLIPKRLTELANLQTLDLSSNNLTGVIHEEFWRMNQLEFLVLAKNRLSGSLPKTICSNNTSLKQLFLSETQLSGEIPAEISNCQSLKLLDLSNNTLTGQIPDSLFQLVELTNLYLNNNSLEGTLSSSISNLTNLQEFTLYHNNLEGKVPKEIGFLGKLEIMYLYENRFSGEMPVEIGNCTRLQEIDWYGNRLSGEIPSSIGRLKDLTRLHLRENELVGNIPASLGNCHQMTVIDLADNQLSGSIPSSFGFLTALELFMIYNNSLQGNLPDSLINLKNLTRINFSSNKFNGSISPLCGSSSYLSFDVTENGFEGDIPLELGKSTNLDRLRLGKNQFTGRIPRTFGKISELSLLDISRNSLSGIIPVELGLCKKLTHIDLNNNYLSGVIPTWLGKLPLLGELKLSSNKFVGSLPTEIFSLTNILTLFLDGNSLNGSIPQEIGNLQALNALNLEENQLSGPLPSTIGKLSKLFELRLSRNALTGEIPVEIGQLQDLQSALDLSYNNFTGRIPSTISTLPKLESLDLSHNQLVGEVPGQIGDMKSLGYLNLSYNNLEGKLKKQFSRWQADAFVGNAGLCGSPLSHCNRAGSKNQRSLSPKTVVIISAISSLAAIALMVLVIILFFKQNHDLFKKVRGGNSAFSSNSSSSQAPLFSNGGAKSDIKWDDIMEATHYLNEEFMIGSGGSGKVYKAELKNGETIAVKKILWKDDLMSNKSFNREVKTLGTIRHRHLVKLMGYCSSKADGLNLLIYEYMANGSVWDWLHANENTKKKEVLGWETRLKIALGLAQGVEYLHYDCVPPIVHRDIKSSNVLLDSNIEAHLGDFGLAKILTGNYDTNTESNTMFAGSYGYIAPEYAYSLKATEKSDVYSMGIVLMEIVTGKMPTEAMFDEETDMVRWVETVLDTPPGSEAREKLIDSELKSLLPCEEEAAYQVLEIALQCTKSYPQERPSSRQASEYLLNVFNNRAASYREMQTDTDK

SEQ ID NO: 44897 - protein, 942 aa, Arabidopsis thaliana
  peptide (1)..(942): Ceres Seq. ID no. 12559626
MNQLEFLVLAKNRLSGSLPKTICSNNTSLKQLFLSETQLSGEIPAEISNCQSLKLLDLSNNTLTGQIPDSLFQLVELTNLYLNNNSLEGTLSSSISNLTNLQEFTLYHNNLEGKVPKEIGFLGKLEIMYLYENRFSGEMPVEIGNCTRLQEIDWYGNRLSGEIPSSIGRLKDLTRLHLRENELVGNIPASLGNCHQMTVIDLADNQLSGSIPSSFGFLTALELFMIYNNSLQGNLPDSLINLKNLTRINFSSNKFNGSISPLCGSSSYLSFDVTENGFEGDIPLELGKSTNLDRLRLGKNQFTGRIPRTFGKISELSLLDISRNSLSGIIPVELGLCKKLTHIDLNNNYLSGVIPTWLGKLPLLGELKLSSNKFVGSLPTEIFSLTNILTLFLDGNSLNGSIPQEIGNLQALNALNLEENQLSGPLPSTIGKLSKLFELRLSRNALTGEIPVEIGQLQDLQSALDLSYNNFTGRIPSTISTLPKLESLDLSHNQLVGEVPGQIGDMKSLGYLNLSYNNLEGKLKKQFSRWQADAFVGNAGLCGSPLSHCNRAGSKNQRSLSPKTVVIISAISSLAAIALMVLVIILFFKQNHDLFKKVRGGNSAFSSNSSSSQAPLFSNGGAKSDIKWDDIMEATHYLNEEFMIGSGGSGKVYKAELKNGETIAVKKILWKDDLMSNKSFNREVKTLGTIRHRHLVKLMGYCSSKADGLNLLIYEYMANGSVWDWLHANENTKKKEVLGWETRLKIALGLAQGVEYLHYDCVPPIVHRDIKSSNVLLDSNIEAHLGDFGLAKILTGNYDTNTESNTMFAGSYGYIAPEYAYSLKATEKSDVYSMGIVLMEIVTGKMPTEAMFDEETDMVRWVETVLDTPPGSEAREKLIDSELKSLLPCEEEAAYQVLEIALQCTKSYPQERPSSRQASEYLLNVFNNRAASYREMQTDTDK

SEQ ID NO: 44898 - DNA, 1372 bp, Arabidopsis thaliana
  misc_feature (1)..(1372): Ceres Seq. ID no. 13575618
  misc_feature (1)..(1372): Ortholog of  Ceres SEQ ID NO 14314108 as cited in SEQ ID NO 63184
gttctcatccataaaccaacgaaaaatgaaggaccaacttggattcagaattgtgctctgttctgcggttttcataattctgactcaaaacagagctctcgcagacttggacagcgagtcccatgaggttaactcagaatcggtaggagaagaacaatgggagatggtgcagaggaaagggatgcaattcactctaaatggacaaccattctatgtgaatggcttcaacacatactggatgatgactcttgcagctgacaattccacgagaggcaaagtgacggaagtgttccaacaagcctctgcggttggaatgacggtaggcaggacatgggctttcaacgatggccaatggagagctctccagaaatctccctctgtttacgatgaagaggtcttcaaggccctcgacttcgtgctgagcgaggccagaaagtacaaaatcaggcttatactgtcattggtcaacaactgggacgcctatggcggcaaagctcagtacgttaaatggggaaacgcctccggccttaatctcacttccgatgacgacttcttcaccaaccccaccctcagaaacttctaccaatcccatgtccggacagtgctgaatagagtgaacaccttcacaaacataacttacaagaacgaccccacaatcttcgcctgggaacttatgaatgagcctcgttgcccctctgatccttccggcgacaaactccagtcttggatacaagaaatggcggtgtttgtgaagagcttagacgctaaacacttggtggagatcggacttgaaggcttctatggtccctctgcccctgcgagaaccagattcaaccccaacccctacgctgcacaagtcggaactgacttcatcagaaataatcaggttcttggcattgattttgcctcggttcacgtctatccagattcctggatatctccggcagtatcaaattctttcctggaattcacaagctcttggatgcaagctcatgttgaggacgcagagatgtacttgggaatgccggttctgttcacagagtttggtgtgtctgcacatgaccctggtttcaacacgtctttccgtgacatgatgttgaacacagtgtacaagatgaccctcaactcaacaaggaaaggaggggctggtgccgggagtctggtctggcaggtcttccctcagggggcagagttcatggatgacggctatgcggtttacctcacaagagctcacacagcttcaaaaatcatatctctgcagtcaaagcgactagccatcttcaactccttgtgtagctggagatgcagatggggatgcaagaaaaagaatcagactgctcttgatgccctcctctcgcacgacgagctttaa

SEQ ID NO: 44899 - protein, 456 aa, Arabidopsis thaliana
  peptide (1)..(456): Ceres Seq. ID no. 13575619
FSSINQRKMKDQLGFRIVLCSAVFIILTQNRALADLDSESHEVNSESVGEEQWEMVQRKGMQFTLNGQPFYVNGFNTYWMMTLAADNSTRGKVTEVFQQASAVGMTVGRTWAFNDGQWRALQKSPSVYDEEVFKALDFVLSEARKYKIRLILSLVNNWDAYGGKAQYVKWGNASGLNLTSDDDFFTNPTLRNFYQSHVRTVLNRVNTFTNITYKNDPTIFAWELMNEPRCPSDPSGDKLQSWIQEMAVFVKSLDAKHLVEIGLEGFYGPSAPARTRFNPNPYAAQVGTDFIRNNQVLGIDFASVHVYPDSWISPAVSNSFLEFTSSWMQAHVEDAEMYLGMPVLFTEFGVSAHDPGFNTSFRDMMLNTVYKMTLNSTRKGGAGAGSLVWQVFPQGAEFMDDGYAVYLTRAHTASKIISLQSKRLAIFNSLCSWRCRWGCKKKNQTALDALLSHDEL

SEQ ID NO: 44900 - protein, 448 aa, Arabidopsis thaliana
  peptide (1)..(448): Ceres Seq. ID no. 13575620
MKDQLGFRIVLCSAVFIILTQNRALADLDSESHEVNSESVGEEQWEMVQRKGMQFTLNGQPFYVNGFNTYWMMTLAADNSTRGKVTEVFQQASAVGMTVGRTWAFNDGQWRALQKSPSVYDEEVFKALDFVLSEARKYKIRLILSLVNNWDAYGGKAQYVKWGNASGLNLTSDDDFFTNPTLRNFYQSHVRTVLNRVNTFTNITYKNDPTIFAWELMNEPRCPSDPSGDKLQSWIQEMAVFVKSLDAKHLVEIGLEGFYGPSAPARTRFNPNPYAAQVGTDFIRNNQVLGIDFASVHVYPDSWISPAVSNSFLEFTSSWMQAHVEDAEMYLGMPVLFTEFGVSAHDPGFNTSFRDMMLNTVYKMTLNSTRKGGAGAGSLVWQVFPQGAEFMDDGYAVYLTRAHTASKIISLQSKRLAIFNSLCSWRCRWGCKKKNQTALDALLSHDEL

SEQ ID NO: 44901 - protein, 402 aa, Arabidopsis thaliana
  peptide (1)..(402): Ceres Seq. ID no. 13575621
MVQRKGMQFTLNGQPFYVNGFNTYWMMTLAADNSTRGKVTEVFQQASAVGMTVGRTWAFNDGQWRALQKSPSVYDEEVFKALDFVLSEARKYKIRLILSLVNNWDAYGGKAQYVKWGNASGLNLTSDDDFFTNPTLRNFYQSHVRTVLNRVNTFTNITYKNDPTIFAWELMNEPRCPSDPSGDKLQSWIQEMAVFVKSLDAKHLVEIGLEGFYGPSAPARTRFNPNPYAAQVGTDFIRNNQVLGIDFASVHVYPDSWISPAVSNSFLEFTSSWMQAHVEDAEMYLGMPVLFTEFGVSAHDPGFNTSFRDMMLNTVYKMTLNSTRKGGAGAGSLVWQVFPQGAEFMDDGYAVYLTRAHTASKIISLQSKRLAIFNSLCSWRCRWGCKKKNQTALDALLSHDEL

SEQ ID NO: 44902 - DNA, 2826 bp, Arabidopsis thaliana
  misc_feature (1)..(2826): Ceres Seq. ID no. 13575622
  misc_feature (1)..(2826): Ortholog of  Ceres SEQ ID NO 15169376 as cited in SEQ ID NO 53574
atggagtcacgaatggatcagtacgagcttatggaacagatcgggagaggagcgtttggtgctgctattttagttcatcataaagctgagagaaagaagtatgttttgaagaagatcagattagctagacaaacggaacgttgccggagatctgctcatcaagagatgtctttgattgcaagagttcaacatccttatattgtggagtttaaagaagcttgggttgagaaaaaggctgagttgatgaaaaagtcaaatggtgtttattttcctgaggagaaactttgcaagtggtttactcaattattattagctgttgagtatctgcattctaactatgttctacatcgggatctaaagtgttccaacattttccttacaaaagatcaagatgttcgccttggggactttggtcttgccaaaactttgaaggcggatgacctaacttcctcggttgttggaactccaaactacatgtgcccggaactgcttgctgatatcccttatggttttaagtcagatatctggtccttaggctgttgtatatatgagatggctgcgtatcgacctgctttcaaagcttttgatatggcagggcttataagcaaggttaatcgctcctcaattggtccgttgcctccgtgctattcaccatctttaaaagcactcatcaagggaatgttaaggaagaaccccgagtatcggccaaacgcctccgagattttgaagcatccttatctgcagccatatgttgagcagtaccgtccaacgctttctgcggcgtctataactccagaaaagcctctcaattctcgcgagggtcggaggagtatggctgaaagtcagaatagcaatagttcaagtgaaaaagataacttctacgtgagtgacaaaaatatccgatatgtggttccaagtaatggtaataaagtcactgagaccgattcaggttttgtcgatgatgaagacatcttagaccatgtgcaacaatcagctgaaaatggtaatctccagagtgtttcagcaacaaaaccagatggccatgggattttaaagcccgtacacagtgaccagcgaccagacgttattcaaccaaggcacccaaaaactatcagaaacatcatgatggttttgaaagaagagaaagctcgagaaaatggttcacccatgagatctaatcgaagtagaccttctagtgttccgacacagaagaataatgttgaaactccatcaaagattcccaaacttggtgacattgctcatagctccaagactaacgcaagtacgcctattccaccatcaaagctggcctctgattccgcaaggactccaggatcatttccaccaaagcatcatatgccagtgattgactcttctccaaaacttaagcctagaaacgacagaatttcaccttctcctgctgctaaacatgaggctgaagaggcgatgtcagttaagcgtaggcaaagaacacctcctactttgccaagaagaacgtctttgatagcgcaccagtcgagacaactaggagcagatatttcaaatatggcagcaaaggaaaccgcgaagctacatccatctgtgccatcagagtctgaaactaattctcatcaatctcgtgttcatgcttctcctgtgagtacgacgccagagccaaagagaacctctgttggatctgccaaaggaatgcagagtgaaagcagcaactctatctcgtcgtcgttgtccatgcaggcatttgagctctgtgatgatgcttccaccccatatattgacatgacagaacatacaactcctgatgaccacagaagatcctgtcacagtgaatactcatattcatttccagatatctcctcagagatgatgatccgtagagatgaacatagcaccagtatgcggctgactgaaattcccgactctgtttccggtgtacaaaacaccattgcccatcatcagccagaaagagagcaaggaagctgtcccactgtgctcaaagatgatagtcctgcaacattacagagctacgagcctaacacatcacaacatcaacacggtgatgacaaattcacagtcaaagaattcgtctcctctgttcccggacccgcaccattgcctttgcatgttgaaccatcacaccaagtgaattcccactcggataacaaaacaagcgtaatgtctcagaactcagctcttgagaagaacaacagtcattcccatcctcatcccgtggttgatgatgtcatacatgttattcgccacagcagtttccgagtagggagcgaccagccggtcatggaaagtgttgaagtcggtgtccaaaacgtcgatatggggaaactcataaacgttgtgagagatgaaatggaagtgagaaaaggagccactccctcagaatcacccaccacaagatcgatcatctcagagcctgactcaagaaccgagcctcgtcctaaagaaccagaccccatcaccaattactcagaaacaaagagctttaactcctgctcggattcttcaccagctgagaccagaactaactcattcgtgcctgaagaggaaacaactccgactccacctgttaaagagacgttggacatcaagtcgttcagacagagagcagaagcgcttgaaggtctattggaactatctgcggatttgctggaacagagcaggctcgaagagctagccattgtgttgcagccgtttgggaagaacaaagtttcgcctcgagaaaccgctatttggttggccaagagtttgaaaggaatgatgatcgaagacatcaataataataatagcagtggcagctccaggaattgttcatga

SEQ ID NO: 44903 - protein, 941 aa, Arabidopsis thaliana
  peptide (1)..(941): Ceres Seq. ID no. 13575623
MESRMDQYELMEQIGRGAFGAAILVHHKAERKKYVLKKIRLARQTERCRRSAHQEMSLIARVQHPYIVEFKEAWVEKKAELMKKSNGVYFPEEKLCKWFTQLLLAVEYLHSNYVLHRDLKCSNIFLTKDQDVRLGDFGLAKTLKADDLTSSVVGTPNYMCPELLADIPYGFKSDIWSLGCCIYEMAAYRPAFKAFDMAGLISKVNRSSIGPLPPCYSPSLKALIKGMLRKNPEYRPNASEILKHPYLQPYVEQYRPTLSAASITPEKPLNSREGRRSMAESQNSNSSSEKDNFYVSDKNIRYVVPSNGNKVTETDSGFVDDEDILDHVQQSAENGNLQSVSATKPDGHGILKPVHSDQRPDVIQPRHPKTIRNIMMVLKEEKARENGSPMRSNRSRPSSVPTQKNNVETPSKIPKLGDIAHSSKTNASTPIPPSKLASDSARTPGSFPPKHHMPVIDSSPKLKPRNDRISPSPAAKHEAEEAMSVKRRQRTPPTLPRRTSLIAHQSRQLGADISNMAAKETAKLHPSVPSESETNSHQSRVHASPVSTTPEPKRTSVGSAKGMQSESSNSISSSLSMQAFELCDDASTPYIDMTEHTTPDDHRRSCHSEYSYSFPDISSEMMIRRDEHSTSMRLTEIPDSVSGVQNTIAHHQPEREQGSCPTVLKDDSPATLQSYEPNTSQHQHGDDKFTVKEFVSSVPGPAPLPLHVEPSHQVNSHSDNKTSVMSQNSALEKNNSHSHPHPVVDDVIHVIRHSSFRVGSDQPVMESVEVGVQNVDMGKLINVVRDEMEVRKGATPSESPTTRSIISEPDSRTEPRPKEPDPITNYSETKSFNSCSDSSPAETRTNSFVPEEETTPTPPVKETLDIKSFRQRAEALEGLLELSADLLEQSRLEELAIVLQPFGKNKVSPRETAIWLAKSLKGMMIEDINNNNSSGSSRNCS

SEQ ID NO: 44904 - protein, 937 aa, Arabidopsis thaliana
  peptide (1)..(937): Ceres Seq. ID no. 13575624
MDQYELMEQIGRGAFGAAILVHHKAERKKYVLKKIRLARQTERCRRSAHQEMSLIARVQHPYIVEFKEAWVEKKAELMKKSNGVYFPEEKLCKWFTQLLLAVEYLHSNYVLHRDLKCSNIFLTKDQDVRLGDFGLAKTLKADDLTSSVVGTPNYMCPELLADIPYGFKSDIWSLGCCIYEMAAYRPAFKAFDMAGLISKVNRSSIGPLPPCYSPSLKALIKGMLRKNPEYRPNASEILKHPYLQPYVEQYRPTLSAASITPEKPLNSREGRRSMAESQNSNSSSEKDNFYVSDKNIRYVVPSNGNKVTETDSGFVDDEDILDHVQQSAENGNLQSVSATKPDGHGILKPVHSDQRPDVIQPRHPKTIRNIMMVLKEEKARENGSPMRSNRSRPSSVPTQKNNVETPSKIPKLGDIAHSSKTNASTPIPPSKLASDSARTPGSFPPKHHMPVIDSSPKLKPRNDRISPSPAAKHEAEEAMSVKRRQRTPPTLPRRTSLIAHQSRQLGADISNMAAKETAKLHPSVPSESETNSHQSRVHASPVSTTPEPKRTSVGSAKGMQSESSNSISSSLSMQAFELCDDASTPYIDMTEHTTPDDHRRSCHSEYSYSFPDISSEMMIRRDEHSTSMRLTEIPDSVSGVQNTIAHHQPEREQGSCPTVLKDDSPATLQSYEPNTSQHQHGDDKFTVKEFVSSVPGPAPLPLHVEPSHQVNSHSDNKTSVMSQNSALEKNNSHSHPHPVVDDVIHVIRHSSFRVGSDQPVMESVEVGVQNVDMGKLINVVRDEMEVRKGATPSESPTTRSIISEPDSRTEPRPKEPDPITNYSETKSFNSCSDSSPAETRTNSFVPEEETTPTPPVKETLDIKSFRQRAEALEGLLELSADLLEQSRLEELAIVLQPFGKNKVSPRETAIWLAKSLKGMMIEDINNNNSSGSSRNCS

SEQ ID NO: 44905 - protein, 931 aa, Arabidopsis thaliana
  peptide (1)..(931): Ceres Seq. ID no. 13575625
MEQIGRGAFGAAILVHHKAERKKYVLKKIRLARQTERCRRSAHQEMSLIARVQHPYIVEFKEAWVEKKAELMKKSNGVYFPEEKLCKWFTQLLLAVEYLHSNYVLHRDLKCSNIFLTKDQDVRLGDFGLAKTLKADDLTSSVVGTPNYMCPELLADIPYGFKSDIWSLGCCIYEMAAYRPAFKAFDMAGLISKVNRSSIGPLPPCYSPSLKALIKGMLRKNPEYRPNASEILKHPYLQPYVEQYRPTLSAASITPEKPLNSREGRRSMAESQNSNSSSEKDNFYVSDKNIRYVVPSNGNKVTETDSGFVDDEDILDHVQQSAENGNLQSVSATKPDGHGILKPVHSDQRPDVIQPRHPKTIRNIMMVLKEEKARENGSPMRSNRSRPSSVPTQKNNVETPSKIPKLGDIAHSSKTNASTPIPPSKLASDSARTPGSFPPKHHMPVIDSSPKLKPRNDRISPSPAAKHEAEEAMSVKRRQRTPPTLPRRTSLIAHQSRQLGADISNMAAKETAKLHPSVPSESETNSHQSRVHASPVSTTPEPKRTSVGSAKGMQSESSNSISSSLSMQAFELCDDASTPYIDMTEHTTPDDHRRSCHSEYSYSFPDISSEMMIRRDEHSTSMRLTEIPDSVSGVQNTIAHHQPEREQGSCPTVLKDDSPATLQSYEPNTSQHQHGDDKFTVKEFVSSVPGPAPLPLHVEPSHQVNSHSDNKTSVMSQNSALEKNNSHSHPHPVVDDVIHVIRHSSFRVGSDQPVMESVEVGVQNVDMGKLINVVRDEMEVRKGATPSESPTTRSIISEPDSRTEPRPKEPDPITNYSETKSFNSCSDSSPAETRTNSFVPEEETTPTPPVKETLDIKSFRQRAEALEGLLELSADLLEQSRLEELAIVLQPFGKNKVSPRETAIWLAKSLKGMMIEDINNNNSSGSSRNCS

SEQ ID NO: 44906 - DNA, 2478 bp, Arabidopsis thaliana
  misc_feature (1)..(2478): Ceres Seq. ID no. 12600031
  misc_feature (1)..(2478): Ortholog of  Ceres SEQ ID NO 15173102 as cited in SEQ ID NO 61106
aagtctttcatcacatttccatttttctctcttccataaaacccaaaagaaactaggaagaggagtaaataatatttgttttaaagaaatgattctccacaaaatggcgttcttggccgttattctcttcttcttgataagcagcagcagcgtttgcgttcatagccgtgaaacgtttgcttgcgatacaaaggacgcagcaacagctacactgagattctgccagctttcagttcctataccggagagagtcagagatttgatcggacggttgacattggccgagaaagtgagcttgttagggaacactgcggcggcgataccacgtctaggaatcaaagggtacgagtggtggtcggaggctttacacggcgtttcaaatgtgggacccggtactaagttcggtggggtttaccctgcagccaccagtttccctcaagtcatcaccaccgttgcttctttcaatgcctccttgtgggaatccatcggacgggttgtgtcaaatgaggccagggccatgtacaacggtggagttggtgggcttacgtattggagcccaaacgttaacatattgagggacccacgttggggacgtggacaggaaactcccggtgaagatccagtagtagccggtaaatacgcagcgagctacgtcagagggttacagggaaacgaccgtagccggttaaaagtagctgcttgttgcaaacatttcacagcttacgatctcgataactggaacggcgtcgacagattccatttcaacgctaaggtaagcaagcaagacatagaagacacgttcgacgtaccgttccgtatgtgtgttaaagaaggtaacgttgcgagcattatgtgttcgtacaatcaagttaatggtgttcctacatgtgctgatcctaatctcctcaagaagaccatacgcaatcaatggggtctcaacgggtatatcgtgtctgattgtgactctgtcggtgttttgtacgatacccaacattacactggtactcctgaagaagctgccgctgattccatcaaagctggcttggatttagattgtgggccatttctaggagcccatacaatcgatgcggtgaagaaaaacttgttgcgtgagtccgatgttgataatgccttaatcaacacgctaacagtccaaatgagactaggaatgtttgatggcgatatagcggctcaaccgtacggacaccttggaccggcacacgtgtgtacaccggttcacaaaggactagctctcgaagcagctcaacaaggaatcgtcctactcaaaaatcacggctcgtctctacctctctcaagccaacgtcaccgaactgtcgccgtaattggacctaattcagacgctacggtcacaatgattggtaattatgcaggggttgcttgtggatataccagtccggttcaaggtattaccggttatgctcgaaccattcatcaaaagggttgcgtggacgtacactgcatggatgatagattgttcgatgccgcggttgaagcggctcgtggagctgatgcgacggttcttgtgatgggtttggatcagtctattgaagcggagttcaaggacagaaacagtttgcttttgcctgggaaacaacaagagcttgtctctagagttgctaaggccgctaaaggcccagttatcttagtattgatgtctggtgggcctatcgatatatcttttgctgagaaggatcggaaaattccagcgattgtttgggccgggtatccgggtcaagaaggtggtaccgcaatcgccgatatcttattcggcagtgctaatcccggaggaaagcttccgatgacttggtatccgcaagattatttaaccaatttaccaatgacagaaatgtcgatgcggccggtccattcgaagcggatcccgggtcggacttaccggttctacgacggtccagttgtttacccgttcgggcatggtttgagttacacgcgctttactcacaacatagccgacgcgccaaaagtgattcctatagctgttcgtggaagaaacggcaccgtttcagggaaatcaatccgtgtgacgcacgctaggtgtgatcgtctctctctcggagtccacgtggaagttactaacgttggctcgagagatgggacgcacacaatgcttgtgttctcggctccgccgggtggagaatgggctccgaagaaacagctggttgcttttgagagagtacacgtggcggttggggagaagaagcgtgtgcaggtgaatatacacgtgtgtaagtatttaagtgtagtggaccgagccgggaaccgaaggattccgatcggtgatcatgggattcatattggagatgagagtcatacggtgtcgcttcaagcttctactcttggagtcatcaagtcttgactctgtttttttcttttcacttttcttgttgttcccaaaatatttttaagagattttaatgtttctaacgaaacgaatttgaa

SEQ ID NO: 44907 - protein, 797 aa, Arabidopsis thaliana
  peptide (1)..(797): Ceres Seq. ID no. 12600032
SLSSHFHFSLFHKTQKKLGRGVNNICFKEMILHKMAFLAVILFFLISSSSVCVHSRETFACDTKDAATATLRFCQLSVPIPERVRDLIGRLTLAEKVSLLGNTAAAIPRLGIKGYEWWSEALHGVSNVGPGTKFGGVYPAATSFPQVITTVASFNASLWESIGRVVSNEARAMYNGGVGGLTYWSPNVNILRDPRWGRGQETPGEDPVVAGKYAASYVRGLQGNDRSRLKVAACCKHFTAYDLDNWNGVDRFHFNAKVSKQDIEDTFDVPFRMCVKEGNVASIMCSYNQVNGVPTCADPNLLKKTIRNQWGLNGYIVSDCDSVGVLYDTQHYTGTPEEAAADSIKAGLDLDCGPFLGAHTIDAVKKNLLRESDVDNALINTLTVQMRLGMFDGDIAAQPYGHLGPAHVCTPVHKGLALEAAQQGIVLLKNHGSSLPLSSQRHRTVAVIGPNSDATVTMIGNYAGVACGYTSPVQGITGYARTIHQKGCVDVHCMDDRLFDAAVEAARGADATVLVMGLDQSIEAEFKDRNSLLLPGKQQELVSRVAKAAKGPVILVLMSGGPIDISFAEKDRKIPAIVWAGYPGQEGGTAIADILFGSANPGGKLPMTWYPQDYLTNLPMTEMSMRPVHSKRIPGRTYRFYDGPVVYPFGHGLSYTRFTHNIADAPKVIPIAVRGRNGTVSGKSIRVTHARCDRLSLGVHVEVTNVGSRDGTHTMLVFSAPPGGEWAPKKQLVAFERVHVAVGEKKRVQVNIHVCKYLSVVDRAGNRRIPIGDHGIHIGDESHTVSLQASTLGVIKS

SEQ ID NO: 44908 - protein, 768 aa, Arabidopsis thaliana
  peptide (1)..(768): Ceres Seq. ID no. 12600033
MILHKMAFLAVILFFLISSSSVCVHSRETFACDTKDAATATLRFCQLSVPIPERVRDLIGRLTLAEKVSLLGNTAAAIPRLGIKGYEWWSEALHGVSNVGPGTKFGGVYPAATSFPQVITTVASFNASLWESIGRVVSNEARAMYNGGVGGLTYWSPNVNILRDPRWGRGQETPGEDPVVAGKYAASYVRGLQGNDRSRLKVAACCKHFTAYDLDNWNGVDRFHFNAKVSKQDIEDTFDVPFRMCVKEGNVASIMCSYNQVNGVPTCADPNLLKKTIRNQWGLNGYIVSDCDSVGVLYDTQHYTGTPEEAAADSIKAGLDLDCGPFLGAHTIDAVKKNLLRESDVDNALINTLTVQMRLGMFDGDIAAQPYGHLGPAHVCTPVHKGLALEAAQQGIVLLKNHGSSLPLSSQRHRTVAVIGPNSDATVTMIGNYAGVACGYTSPVQGITGYARTIHQKGCVDVHCMDDRLFDAAVEAARGADATVLVMGLDQSIEAEFKDRNSLLLPGKQQELVSRVAKAAKGPVILVLMSGGPIDISFAEKDRKIPAIVWAGYPGQEGGTAIADILFGSANPGGKLPMTWYPQDYLTNLPMTEMSMRPVHSKRIPGRTYRFYDGPVVYPFGHGLSYTRFTHNIADAPKVIPIAVRGRNGTVSGKSIRVTHARCDRLSLGVHVEVTNVGSRDGTHTMLVFSAPPGGEWAPKKQLVAFERVHVAVGEKKRVQVNIHVCKYLSVVDRAGNRRIPIGDHGIHIGDESHTVSLQASTLGVIKS

SEQ ID NO: 44909 - protein, 763 aa, Arabidopsis thaliana
  peptide (1)..(763): Ceres Seq. ID no. 12600034
MAFLAVILFFLISSSSVCVHSRETFACDTKDAATATLRFCQLSVPIPERVRDLIGRLTLAEKVSLLGNTAAAIPRLGIKGYEWWSEALHGVSNVGPGTKFGGVYPAATSFPQVITTVASFNASLWESIGRVVSNEARAMYNGGVGGLTYWSPNVNILRDPRWGRGQETPGEDPVVAGKYAASYVRGLQGNDRSRLKVAACCKHFTAYDLDNWNGVDRFHFNAKVSKQDIEDTFDVPFRMCVKEGNVASIMCSYNQVNGVPTCADPNLLKKTIRNQWGLNGYIVSDCDSVGVLYDTQHYTGTPEEAAADSIKAGLDLDCGPFLGAHTIDAVKKNLLRESDVDNALINTLTVQMRLGMFDGDIAAQPYGHLGPAHVCTPVHKGLALEAAQQGIVLLKNHGSSLPLSSQRHRTVAVIGPNSDATVTMIGNYAGVACGYTSPVQGITGYARTIHQKGCVDVHCMDDRLFDAAVEAARGADATVLVMGLDQSIEAEFKDRNSLLLPGKQQELVSRVAKAAKGPVILVLMSGGPIDISFAEKDRKIPAIVWAGYPGQEGGTAIADILFGSANPGGKLPMTWYPQDYLTNLPMTEMSMRPVHSKRIPGRTYRFYDGPVVYPFGHGLSYTRFTHNIADAPKVIPIAVRGRNGTVSGKSIRVTHARCDRLSLGVHVEVTNVGSRDGTHTMLVFSAPPGGEWAPKKQLVAFERVHVAVGEKKRVQVNIHVCKYLSVVDRAGNRRIPIGDHGIHIGDESHTVSLQASTLGVIKS

SEQ ID NO: 44910 - DNA, 2693 bp, Arabidopsis thaliana
  misc_feature (1)..(2693): Ceres Seq. ID no. 12559646
  misc_feature (1)..(2693): Ortholog of  Ceres SEQ ID NO 15224641 as cited in SEQ ID NO 1290
  misc_feature (1)..(2693): Ortholog of  Ceres SEQ ID NO 15169439 as cited in SEQ ID NO 55062
atggttgaaagtgctgcgttcccaggagggtattatcggaatacttttgaagcgcctgaggaatcagagggctctgggagctctgcacagattgatactgaggtcactgcgtctgagaattcaagtactcctgcacggaagtgtattatgttgaattcgaatgatgaagatccttatggtgttcagagacaagtcatttccttgtataacatgtcacaatctgagaggaaggatttgatttatcggcttaagctggagttggagcagacaaagatagttcttaaaaatgctgagttgcagagaatgaaccctgctgctgtgtcgtctactagtgatagggtgggttttagcactggtcaaaagatatcatctcgagtcagcaattcgaagaaaccatctgattttgctgtgggttcggggaagaaagttcggcatcagaatgggacttctcgtggatggaatcgtggtacctcagggaagtttgagtcttcgaaagagactatgactagcactcctaacattacactgatgaagcaatgtgacacgctactgagaaaactgtggtctcatccgcattcttgggtgtttcaggcgccagttgatgtagtgaaactgaacatacctgactatctcactactatcaagcatcccatggacttagggacagtaaagaagaacttagcgtctggtgtatactcaagcccacatgagtttgctgctgatgtgaggcttacatttaccaatgcgatgacatataaccctccaggacatgatgttcacattatgggggatatccttagtaaattatttgaagcgcggtggaaaactatcaaaaagaaattaccaccttgtagcatgcaaacgttgcctgcagtaacattggagcccaatgatgaaaggaaagctgctatatctgtacctccggcgaagaagagaaagatggcttcacccgttagagagagtgttccagaaccggtgaagccacttatgacagaagtggagaggcatagattgggcagacaactcgaatcactactcgacgaacttcctgcacatatcattgacttcttgaagaaacacaattcaaatggcggagaaattgcagaagacgaaattgagatagacattgatgttctcagtgatgaagtactggtcactcttcgaaaccttctagatgaatatatacaaaacaaagaagcaaagcagacgaatgttgaaccatgtgaaatagagcttattaatggatcacgaccgagcaattcgtcgctgcaaagaggaaatgaaatggctgatgagtatgtcgatgggaatgaaccgcctatctcaaggagctccagtgattcggattctggtagctcggaagatcaatctgatgacgctaaacccatggttcaaggggattcttccaagatgcctgaaactgcaaactctgaggcgcaaagagatgaaaatacaagaattgatgatctttttgttgggagtcaatctactggtgcgcttgagcagatggatatttgttctcagcaaaagcttagttctgatgaatcagatggccaacatgagggaaatatattagagactccagcttcatctgagaagcgctatagagctgcgctgttgaagaaccggtttgcagatatcattctaaaagcacgagagaaaccacttccacagaatggtattaagggcgatccagaaaggctgcgtaaagaaagagaagaactcgtactgcagaagaagaaagagaaagcgcgtctacaagctgaagcagaggctgctgaagatgctcgtcgccaagctgaagcagaagccgctgcagaagctgctgctgaggctaagcggaagagagaactcgaaagagaagccgctcgccaagctttattgaagatggagaaaactgtagagattaatgagaactcacggtttctcgaggacctagagatgctgagttcgagtgcacctgagcaattaccaagctcagccgaagaaaccagccccgagagacctttagacgcacttggaagtttcaacctcagaggaagcaacccacttgagcaactcggactgtacatgaaacaagatgatgatgaagaagagcccgaagctcctgctgttccaaaacctgatgaaaccagcaccgagagacctttagacgcacttggaagtttcaaactcggagaatgtaatccgctggagcaacttggactgtacatgaaacaagacgacggtgaagaagaagaacccgaggctcctgtggttccaaaacccaatgaaaccagcctcgagagacctgtagacgcatttggaagtttcaacctcaaaggaagtaaccctcttgagcaactcggactgtacatgaaacaagacgatgatgaagaagaacccgaggctcccgctgttccaaacctagccaacgacgtggaagaaggtgaaatcgattgaacaaaagaagtgtataaaatatatacatgtattatatataaaacaatagccagggcaggtacaaacagacgcaagaaatgaaggtcttagcccttcttaagagaagatccaatatgtggctcattgtttaatgagttttggaatggatctctcttaagccagtgtggtgtttaattatgtaaaacacaaagcaaacgcttagaagctttttgccacgagacttcatgaagagtcccttagtgtatgattat

SEQ ID NO: 44911 - protein, 813 aa, Arabidopsis thaliana
  peptide (1)..(813): Ceres Seq. ID no. 12559647
MVESAAFPGGYYRNTFEAPEESEGSGSSAQIDTEVTASENSSTPARKCIMLNSNDEDPYGVQRQVISLYNMSQSERKDLIYRLKLELEQTKIVLKNAELQRMNPAAVSSTSDRVGFSTGQKISSRVSNSKKPSDFAVGSGKKVRHQNGTSRGWNRGTSGKFESSKETMTSTPNITLMKQCDTLLRKLWSHPHSWVFQAPVDVVKLNIPDYLTTIKHPMDLGTVKKNLASGVYSSPHEFAADVRLTFTNAMTYNPPGHDVHIMGDILSKLFEARWKTIKKKLPPCSMQTLPAVTLEPNDERKAAISVPPAKKRKMASPVRESVPEPVKPLMTEVERHRLGRQLESLLDELPAHIIDFLKKHNSNGGEIAEDEIEIDIDVLSDEVLVTLRNLLDEYIQNKEAKQTNVEPCEIELINGSRPSNSSLQRGNEMADEYVDGNEPPISRSSSDSDSGSSEDQSDDAKPMVQGDSSKMPETANSEAQRDENTRIDDLFVGSQSTGALEQMDICSQQKLSSDESDGQHEGNILETPASSEKRYRAALLKNRFADIILKAREKPLPQNGIKGDPERLRKEREELVLQKKKEKARLQAEAEAAEDARRQAEAEAAAEAAAEAKRKRELEREAARQALLKMEKTVEINENSRFLEDLEMLSSSAPEQLPSSAEETSPERPLDALGSFNLRGSNPLEQLGLYMKQDDDEEEPEAPAVPKPDETSTERPLDALGSFKLGECNPLEQLGLYMKQDDGEEEEPEAPVVPKPNETSLERPVDAFGSFNLKGSNPLEQLGLYMKQDDDEEEPEAPAVPNLANDVEEGEID

SEQ ID NO: 44912 - protein, 764 aa, Arabidopsis thaliana
  peptide (1)..(764): Ceres Seq. ID no. 12559648
MLNSNDEDPYGVQRQVISLYNMSQSERKDLIYRLKLELEQTKIVLKNAELQRMNPAAVSSTSDRVGFSTGQKISSRVSNSKKPSDFAVGSGKKVRHQNGTSRGWNRGTSGKFESSKETMTSTPNITLMKQCDTLLRKLWSHPHSWVFQAPVDVVKLNIPDYLTTIKHPMDLGTVKKNLASGVYSSPHEFAADVRLTFTNAMTYNPPGHDVHIMGDILSKLFEARWKTIKKKLPPCSMQTLPAVTLEPNDERKAAISVPPAKKRKMASPVRESVPEPVKPLMTEVERHRLGRQLESLLDELPAHIIDFLKKHNSNGGEIAEDEIEIDIDVLSDEVLVTLRNLLDEYIQNKEAKQTNVEPCEIELINGSRPSNSSLQRGNEMADEYVDGNEPPISRSSSDSDSGSSEDQSDDAKPMVQGDSSKMPETANSEAQRDENTRIDDLFVGSQSTGALEQMDICSQQKLSSDESDGQHEGNILETPASSEKRYRAALLKNRFADIILKAREKPLPQNGIKGDPERLRKEREELVLQKKKEKARLQAEAEAAEDARRQAEAEAAAEAAAEAKRKRELEREAARQALLKMEKTVEINENSRFLEDLEMLSSSAPEQLPSSAEETSPERPLDALGSFNLRGSNPLEQLGLYMKQDDDEEEPEAPAVPKPDETSTERPLDALGSFKLGECNPLEQLGLYMKQDDGEEEEPEAPVVPKPNETSLERPVDAFGSFNLKGSNPLEQLGLYMKQDDDEEEPEAPAVPNLANDVEEGEID

SEQ ID NO: 44913 - protein, 743 aa, Arabidopsis thaliana
  peptide (1)..(743): Ceres Seq. ID no. 12559649
MSQSERKDLIYRLKLELEQTKIVLKNAELQRMNPAAVSSTSDRVGFSTGQKISSRVSNSKKPSDFAVGSGKKVRHQNGTSRGWNRGTSGKFESSKETMTSTPNITLMKQCDTLLRKLWSHPHSWVFQAPVDVVKLNIPDYLTTIKHPMDLGTVKKNLASGVYSSPHEFAADVRLTFTNAMTYNPPGHDVHIMGDILSKLFEARWKTIKKKLPPCSMQTLPAVTLEPNDERKAAISVPPAKKRKMASPVRESVPEPVKPLMTEVERHRLGRQLESLLDELPAHIIDFLKKHNSNGGEIAEDEIEIDIDVLSDEVLVTLRNLLDEYIQNKEAKQTNVEPCEIELINGSRPSNSSLQRGNEMADEYVDGNEPPISRSSSDSDSGSSEDQSDDAKPMVQGDSSKMPETANSEAQRDENTRIDDLFVGSQSTGALEQMDICSQQKLSSDESDGQHEGNILETPASSEKRYRAALLKNRFADIILKAREKPLPQNGIKGDPERLRKEREELVLQKKKEKARLQAEAEAAEDARRQAEAEAAAEAAAEAKRKRELEREAARQALLKMEKTVEINENSRFLEDLEMLSSSAPEQLPSSAEETSPERPLDALGSFNLRGSNPLEQLGLYMKQDDDEEEPEAPAVPKPDETSTERPLDALGSFKLGECNPLEQLGLYMKQDDGEEEEPEAPVVPKPNETSLERPVDAFGSFNLKGSNPLEQLGLYMKQDDDEEEPEAPAVPNLANDVEEGEID

SEQ ID NO: 44914 - DNA, 1040 bp, Arabidopsis thaliana
  misc_feature (1)..(1040): Ceres Seq. ID no. 12559650
  misc_feature (1)..(1040): Ortholog of  Ceres SEQ ID NO 13599613 as cited in SEQ ID NO 0
  misc_feature (1)..(1040): Ortholog of  Ceres SEQ ID NO 15179570 as cited in SEQ ID NO 0
acacagagcattccgtggaaaaaccccaataaaatctcaggcaaatctccggcgtaatcgatggcggaggagaatcaagaagaaaccctagaactcaaaccaagtagaaaaccaccacactttgtgctaatacatggcatgagcttaggatcatggtgctggtacaagatcaaatgtctcatggaagtctctggcttcaccgtcacttgcatcgacctcaaatcctccggcatcgattcttcatccgtggattcactcactaccttcgaccaatacaaccaaccactcatcgacttcctctcctctttccccgaacaagaacaggtgatacttgtgggtcacagtgcaggagggcttagcctaacgagtgcgatacagagattccctaagaagatctgtctcgctgtttttattggagcttcgatgctcaaaaacgggcttcagacagatgaagatatgaaagatggagtgcctgatctatcagaacatggtgatgtctacgagcttggttttggtctaggaccggagaatcctcccaccagtgctattatcaaacctgaataccgacgaaaactactttaccacatgagtcctcaacaggaatgttccttggctgcattaatgatgagaccagcaccaattttggcgttaacgacagcaaaactggaagaagaggaaaaagaaaaaggacaagaggagcaagtgccgcgcgtgtacatcaagacgttactcgaccgggtcatgaaaccggagcagcaagacgcgatgataagacggtggccacctagccaagtttacgaattggagagcgaccattctcctttcttctctaacccttttgttctctttggtttactcatcaaagctgccgtttccgtcggttctatctaaaactatttaaagaactaaaggattgccttttgttggttttaaaaccggttaagtgatcagtattgtcgagggagtgtttatttatttttgatttttgtgacattttggtattttatattaatcgttttgaaataaattatgttttgctt

SEQ ID NO: 44915 - protein, 276 aa, Arabidopsis thaliana
  peptide (1)..(276): Ceres Seq. ID no. 12559651
MAEENQEETLELKPSRKPPHFVLIHGMSLGSWCWYKIKCLMEVSGFTVTCIDLKSSGIDSSSVDSLTTFDQYNQPLIDFLSSFPEQEQVILVGHSAGGLSLTSAIQRFPKKICLAVFIGASMLKNGLQTDEDMKDGVPDLSEHGDVYELGFGLGPENPPTSAIIKPEYRRKLLYHMSPQQECSLAALMMRPAPILALTTAKLEEEEKEKGQEEQVPRVYIKTLLDRVMKPEQQDAMIRRWPPSQVYELESDHSPFFSNPFVLFGLLIKAAVSVGSI

SEQ ID NO: 44916 - protein, 250 aa, Arabidopsis thaliana
  peptide (1)..(250): Ceres Seq. ID no. 12559652
MSLGSWCWYKIKCLMEVSGFTVTCIDLKSSGIDSSSVDSLTTFDQYNQPLIDFLSSFPEQEQVILVGHSAGGLSLTSAIQRFPKKICLAVFIGASMLKNGLQTDEDMKDGVPDLSEHGDVYELGFGLGPENPPTSAIIKPEYRRKLLYHMSPQQECSLAALMMRPAPILALTTAKLEEEEKEKGQEEQVPRVYIKTLLDRVMKPEQQDAMIRRWPPSQVYELESDHSPFFSNPFVLFGLLIKAAVSVGSI

SEQ ID NO: 44917 - protein, 236 aa, Arabidopsis thaliana
  peptide (1)..(236): Ceres Seq. ID no. 12559653
MEVSGFTVTCIDLKSSGIDSSSVDSLTTFDQYNQPLIDFLSSFPEQEQVILVGHSAGGLSLTSAIQRFPKKICLAVFIGASMLKNGLQTDEDMKDGVPDLSEHGDVYELGFGLGPENPPTSAIIKPEYRRKLLYHMSPQQECSLAALMMRPAPILALTTAKLEEEEKEKGQEEQVPRVYIKTLLDRVMKPEQQDAMIRRWPPSQVYELESDHSPFFSNPFVLFGLLIKAAVSVGSI

SEQ ID NO: 44918 - DNA, 1227 bp, Arabidopsis thaliana
  misc_feature (1)..(1227): Ceres Seq. ID no. 12559662
  misc_feature (1)..(1227): Ortholog of  Ceres SEQ ID NO 15177368 as cited in SEQ ID NO 57336
aaagaagaagaatcaatggcgagaacgagaattataacgaaccgatttgaatctcgctttttgattcgtttccttgaatctccgactctattcgcctcttgtttcacgagttccagatctcttcaaaccctagcctacgaagaagtccgaacctccggtgatcgggagtctgaatctacagctctcatccttcatggcctcctcggttccggtcgcaactggagatcgttttctcgctcccttgcatcatctctctccgtctcctctgcttctgattggaagatgatattggttgatctgaggaaccatgggagatctgcggaagtggaagggcttaatccgcctcatgatcttgtgaattcagctaaggatttagctgatttggttaaagcaagtggctggaattggcctgatgtggtcattggtcactctttgggaggtaaagtggcgttgcagttcatggagagttgtgctcgtggtgattttggtgaatctgcttctcctcctaaacagctatgggtactagactctgtccctggggaagtcaaggcagaaaaaagtgatggtgaagtagagaaagttctgaagactttgcagagtttaccttcatcaatcccttctcgcaagtggcttgttgatcgtatggtcgaacttgggttttcaagatcattatccgagtggattggcagcaatctcaagagatctggagactcagagacatggacctttaaccttgacggagctgtccaaatgttcaactcttacagagagacttcttactggtctttgctagagaacccgccaaaagagacagagataaattttgtgattgcagaaaagagtgaccgatgggacaacgatacaaccaagcggcttgaaacaatagctaaccagagacagaatgtagccgaagggaaggttgcgactcatcttcttcgtaactctggccattgggtacacacagacaatccaaagggactcctagagattgtgagtcccaacttcttctccccacacgagtagacgatgcgctacgaaaatggcattagtctttgcttacaatttcactcctgttcagtatctatatgcagaaatagcaaatccaatcgcaactattttgacgatgcgcggtttttcccgtttgtgtttcctaattttgcattagcatatcctttcaacaatgtacaaacgtttaggaggatctaataacatcaataaacttatcac

SEQ ID NO: 44919 - protein, 340 aa, Arabidopsis thaliana
  peptide (1)..(340): Ceres Seq. ID no. 12559663
KEEESMARTRIITNRFESRFLIRFLESPTLFASCFTSSRSLQTLAYEEVRTSGDRESESTALILHGLLGSGRNWRSFSRSLASSLSVSSASDWKMILVDLRNHGRSAEVEGLNPPHDLVNSAKDLADLVKASGWNWPDVVIGHSLGGKVALQFMESCARGDFGESASPPKQLWVLDSVPGEVKAEKSDGEVEKVLKTLQSLPSSIPSRKWLVDRMVELGFSRSLSEWIGSNLKRSGDSETWTFNLDGAVQMFNSYRETSYWSLLENPPKETEINFVIAEKSDRWDNDTTKRLETIANQRQNVAEGKVATHLLRNSGHWVHTDNPKGLLEIVSPNFFSPHE

SEQ ID NO: 44920 - protein, 335 aa, Arabidopsis thaliana
  peptide (1)..(335): Ceres Seq. ID no. 12559664
MARTRIITNRFESRFLIRFLESPTLFASCFTSSRSLQTLAYEEVRTSGDRESESTALILHGLLGSGRNWRSFSRSLASSLSVSSASDWKMILVDLRNHGRSAEVEGLNPPHDLVNSAKDLADLVKASGWNWPDVVIGHSLGGKVALQFMESCARGDFGESASPPKQLWVLDSVPGEVKAEKSDGEVEKVLKTLQSLPSSIPSRKWLVDRMVELGFSRSLSEWIGSNLKRSGDSETWTFNLDGAVQMFNSYRETSYWSLLENPPKETEINFVIAEKSDRWDNDTTKRLETIANQRQNVAEGKVATHLLRNSGHWVHTDNPKGLLEIVSPNFFSPHE

SEQ ID NO: 44921 - protein, 246 aa, Arabidopsis thaliana
  peptide (1)..(246): Ceres Seq. ID no. 12559665
MILVDLRNHGRSAEVEGLNPPHDLVNSAKDLADLVKASGWNWPDVVIGHSLGGKVALQFMESCARGDFGESASPPKQLWVLDSVPGEVKAEKSDGEVEKVLKTLQSLPSSIPSRKWLVDRMVELGFSRSLSEWIGSNLKRSGDSETWTFNLDGAVQMFNSYRETSYWSLLENPPKETEINFVIAEKSDRWDNDTTKRLETIANQRQNVAEGKVATHLLRNSGHWVHTDNPKGLLEIVSPNFFSPHE

SEQ ID NO: 44922 - DNA, 2136 bp, Arabidopsis thaliana
  misc_feature (1)..(2136): Ceres Seq. ID no. 13575629
  misc_feature (1)..(2136): Ortholog of  Ceres SEQ ID NO 13574398 as cited in SEQ ID NO 0
attcttttttggaatcatctcagttattacacctcagttactgtacggacgaatgtggttgcttctaaagctcagattctacttgatctagtacatcgtcttctactctagatttttcctataagctcgcttcagaaattgagggacaagatggttggtgtatttaatatcatctgattaagaaggagaaacttgtttttttggcgataaagatagaaaagaacttggcttttgttcttctctctggttcaacaaaagaattcaaaagagaagaaaggatgatgctgatgagaagaaggttggcttgctgtagcagggagagggagattagtatcgatttcgatgaacatgaacaagataaaatgattacatattatggcttggaaacttgtattatcaataatcaatcatatgaagaagagagtggaacaagtcgaggagatggatgtcttacagattcgttagatgatgatgcattttcaagctgttcatcaagcaaagatgcctctagctctttttcttcgaaatggttaccgatgaagaatgatgaacacagttgcgatggtttgaacttatctggaaggtctcaacattttgatgctaaggagaagaagaaacaaggctatggcagtagccaacattttgatgctaaggagaaaccagggtatgtgtactgtcatttggatgtggaagctatgaaggagaaattttctaagttattgctcggcgaagatgtcactgggggatgtaagggtgtccaagtagctttggctttgtcaaatgctgtaacacatcttgctacgtcgatttttggcgagctctggaaattggaacctttgtgtgaagagaagaaacagaaatggagaagggaaatggattggctactttctccaactaactacatgattgagttagtcccttctaagcaaaatgatgccaatggaagatcacttgagataatgactccgaaagcccgcgcagacattcatatgaatctcccagctcttcagaagttggactcaatgctaattgagacactggattctatggtgaacacagagttttggtattctgagattggtagtagagctgaagggaagaacaagagtacaagtgagagcaaacgatggtggcttccatcgccacaagtgcctaaacctggactctctaactcaggaaggaagaaattgcttgacaaaggaaaagttgtttatcaagtcttcaaagctacaaaagccataaacgaaaacattcttcttgaaatgccagttcccattgttatcaaggaagcaatacctaaatctggaaagaacagcctcggtgatgaactgtacaagatgttggctgtggaatctgcaacagtagatgaaatctttatatcgctcaatctgggaaccgaacatgcagcactcgagacagttaacaagttagaatctgctatgtttgcttggaaagaaaggattacagaacaaggcagcaatggtaaatcccctgtaagagcatcgtggtcattcgctaaagatccgttgtctgaaattggtcgcaatgagtcactcttgaaccgagcagaagcgcttagaactcagatcaaatccaaacaccctaatctccctcactcgtttcttgatgctacaaagatccaatatgacaaggacataggtcatgcggttctcgaagcatattcccgaacacttgcgaatctagctttccggattctttcaagaatgggagaaatcttgaaagaagattctttaagcaaccctaactctcctgcaccaccgagttgcttccctagctcccgtgacccttataggacacctgagagacctctgctttcgtcccgtgtaaggcattctttaaccgatgacatgaacaaagccgatgggacagagactggtttagattttttgtttgcagatgctaaggcaagtaattcagtgaatacaactccaagtagaagcagtagactgtggtgtttgagtaaagtgccttctgatacttctccttgatttagagggtcttcctagttcgatgcgtgccacctgaagcttctcctttactttgaaggttttaaattatgaagcctgagatgttgtaaatgtattaacatattgcagttaaagtacgaattcatac

SEQ ID NO: 44923 - protein, 576 aa, Arabidopsis thaliana
  peptide (1)..(576): Ceres Seq. ID no. 13575630
MMLMRRRLACCSREREISIDFDEHEQDKMITYYGLETCIINNQSYEEESGTSRGDGCLTDSLDDDAFSSCSSSKDASSSFSSKWLPMKNDEHSCDGLNLSGRSQHFDAKEKKKQGYGSSQHFDAKEKPGYVYCHLDVEAMKEKFSKLLLGEDVTGGCKGVQVALALSNAVTHLATSIFGELWKLEPLCEEKKQKWRREMDWLLSPTNYMIELVPSKQNDANGRSLEIMTPKARADIHMNLPALQKLDSMLIETLDSMVNTEFWYSEIGSRAEGKNKSTSESKRWWLPSPQVPKPGLSNSGRKKLLDKGKVVYQVFKATKAINENILLEMPVPIVIKEAIPKSGKNSLGDELYKMLAVESATVDEIFISLNLGTEHAALETVNKLESAMFAWKERITEQGSNGKSPVRASWSFAKDPLSEIGRNESLLNRAEALRTQIKSKHPNLPHSFLDATKIQYDKDIGHAVLEAYSRTLANLAFRILSRMGEILKEDSLSNPNSPAPPSCFPSSRDPYRTPERPLLSSRVRHSLTDDMNKADGTETGLDFLFADAKASNSVNTTPSRSSRLWCLSKVPSDTSP

SEQ ID NO: 44924 - protein, 575 aa, Arabidopsis thaliana
  peptide (1)..(575): Ceres Seq. ID no. 13575631
MLMRRRLACCSREREISIDFDEHEQDKMITYYGLETCIINNQSYEEESGTSRGDGCLTDSLDDDAFSSCSSSKDASSSFSSKWLPMKNDEHSCDGLNLSGRSQHFDAKEKKKQGYGSSQHFDAKEKPGYVYCHLDVEAMKEKFSKLLLGEDVTGGCKGVQVALALSNAVTHLATSIFGELWKLEPLCEEKKQKWRREMDWLLSPTNYMIELVPSKQNDANGRSLEIMTPKARADIHMNLPALQKLDSMLIETLDSMVNTEFWYSEIGSRAEGKNKSTSESKRWWLPSPQVPKPGLSNSGRKKLLDKGKVVYQVFKATKAINENILLEMPVPIVIKEAIPKSGKNSLGDELYKMLAVESATVDEIFISLNLGTEHAALETVNKLESAMFAWKERITEQGSNGKSPVRASWSFAKDPLSEIGRNESLLNRAEALRTQIKSKHPNLPHSFLDATKIQYDKDIGHAVLEAYSRTLANLAFRILSRMGEILKEDSLSNPNSPAPPSCFPSSRDPYRTPERPLLSSRVRHSLTDDMNKADGTETGLDFLFADAKASNSVNTTPSRSSRLWCLSKVPSDTSP

SEQ ID NO: 44925 - protein, 573 aa, Arabidopsis thaliana
  peptide (1)..(573): Ceres Seq. ID no. 13575632
MRRRLACCSREREISIDFDEHEQDKMITYYGLETCIINNQSYEEESGTSRGDGCLTDSLDDDAFSSCSSSKDASSSFSSKWLPMKNDEHSCDGLNLSGRSQHFDAKEKKKQGYGSSQHFDAKEKPGYVYCHLDVEAMKEKFSKLLLGEDVTGGCKGVQVALALSNAVTHLATSIFGELWKLEPLCEEKKQKWRREMDWLLSPTNYMIELVPSKQNDANGRSLEIMTPKARADIHMNLPALQKLDSMLIETLDSMVNTEFWYSEIGSRAEGKNKSTSESKRWWLPSPQVPKPGLSNSGRKKLLDKGKVVYQVFKATKAINENILLEMPVPIVIKEAIPKSGKNSLGDELYKMLAVESATVDEIFISLNLGTEHAALETVNKLESAMFAWKERITEQGSNGKSPVRASWSFAKDPLSEIGRNESLLNRAEALRTQIKSKHPNLPHSFLDATKIQYDKDIGHAVLEAYSRTLANLAFRILSRMGEILKEDSLSNPNSPAPPSCFPSSRDPYRTPERPLLSSRVRHSLTDDMNKADGTETGLDFLFADAKASNSVNTTPSRSSRLWCLSKVPSDTSP

SEQ ID NO: 44926 - DNA, 1809 bp, Arabidopsis thaliana
  misc_feature (1)..(1809): Ceres Seq. ID no. 12559702
  misc_feature (1)..(1809): Ortholog of  Ceres SEQ ID NO 15169350 as cited in SEQ ID NO 53271
gagagattatttttctgttaatttcccttaatcatcatcatcgtcttcatcatcatctctctctcttctcttcgttcctctttctttacacgcttgaaaccctagcaatttcaatttcgtttcctctaatagaatcttcatctttttatggcgtaacgttacacgaatttcaacgatttaggttttttttttttttttttgaagaatcaaacacaaagatagaaacaatgtcaacggagactaccacgggaaattcctcgttaattccagcatcatcatcatcgtcatcctccgacgcaatcgatccagctccgttgctttttaacggcgacgataatgaaggaaacaacggaggaggaggtggggaacggagatctgtcaggagacaagggttgagagaagctgcgaggtttcttagtcgtgctagtagcggacgcgtgatgcgtgagccatctatgcttgtgagagaagccgcggcggagcagctcgaggagaggcagagcgattgggcttattcgaagcctgtggtggtgcttgatatcgtttggaatctggcttttgtttctgttgctacggctattttggtgatgagcaggaaagaacatccgattatgccgcttagagtttggcttttggggtatgctttgcaatgcgtgttgcatatggtttgtgtctgtgttgagtatcggaggaggaacaggaggagaaccaataggacgacgacgacgactcctccacggtcacgttcttcttcttcctcttcatcttcttcttccttggaggaagaagctttgggttccaggaggaattcaggtgtgcaggacttgtcgcttggccacttggataccgaaagcagcagtgttgctaagcatctggaatctgccaatacgatgttttcttttatatggtggatcattggattctactgggtatctgctggtggccaagagttggcacaagaatcccctcggatttactggctgtctattgtctttcttggtttcgatgtgttctttgttgtcttctgtgttgcgttggcctgcgttattggaattgcggtttgctgttgcctgccatgcatcattgcagttttgtacgctgttgctgatcaggaaggggcttcaaaagaagacattgagcagctcaccaaattcaagtttcgcaaactaggtgatgccaacaaacacactaatgatgaagcccaaggaactaccgagggaataatgactgagtgtggtacagattcacccattgaacatactcttttgcaagaagatgcagaatgttgcatctgtctctctgcatatgaagacggaacagagctaagggaactaccttgtggacaccatttccactgttcatgcgtagacaaatggctatacatcaacgcgacttgcccactctgcaaatacaacatcctcaagagtagcaacttggatcgagaggaagtctagaggaaacaactttacgtgttcatgacccacgacatttgatcaggagactttgggttaaggtaaaaaacaagactggtttgtttttttagatacgatgcattgtttgtgaaatgataatgatatctatacgaaattattacacttttgtttgtttttgatttttggtttggaaactaatcaggtctgtacatctatctgtatctatcttcttttacttgaaaccaatgttttgtagtttgtattacctctttctttctcagtcgacctcgaattgttagagatttccatcatcgtagatctttagtcatgtctcaatgacgattttgattgttactttaaagtttttccaatttgt

SEQ ID NO: 44927 - protein, 483 aa, Arabidopsis thaliana
  peptide (1)..(483): Ceres Seq. ID no. 12559703
EIIFLLISLNHHHRLHHHLSLFSSFLFLYTLETLAISISFPLIESSSFYGVTLHEFQRFRFFFFFFEESNTKIETMSTETTTGNSSLIPASSSSSSSDAIDPAPLLFNGDDNEGNNGGGGGERRSVRRQGLREAARFLSRASSGRVMREPSMLVREAAAEQLEERQSDWAYSKPVVVLDIVWNLAFVSVATAILVMSRKEHPIMPLRVWLLGYALQCVLHMVCVCVEYRRRNRRRTNRTTTTTPPRSRSSSSSSSSSSLEEEALGSRRNSGVQDLSLGHLDTESSSVAKHLESANTMFSFIWWIIGFYWVSAGGQELAQESPRIYWLSIVFLGFDVFFVVFCVALACVIGIAVCCCLPCIIAVLYAVADQEGASKEDIEQLTKFKFRKLGDANKHTNDEAQGTTEGIMTECGTDSPIEHTLLQEDAECCICLSAYEDGTELRELPCGHHFHCSCVDKWLYINATCPLCKYNILKSSNLDREEV

SEQ ID NO: 44928 - protein, 408 aa, Arabidopsis thaliana
  peptide (1)..(408): Ceres Seq. ID no. 12559704
MSTETTTGNSSLIPASSSSSSSDAIDPAPLLFNGDDNEGNNGGGGGERRSVRRQGLREAARFLSRASSGRVMREPSMLVREAAAEQLEERQSDWAYSKPVVVLDIVWNLAFVSVATAILVMSRKEHPIMPLRVWLLGYALQCVLHMVCVCVEYRRRNRRRTNRTTTTTPPRSRSSSSSSSSSSLEEEALGSRRNSGVQDLSLGHLDTESSSVAKHLESANTMFSFIWWIIGFYWVSAGGQELAQESPRIYWLSIVFLGFDVFFVVFCVALACVIGIAVCCCLPCIIAVLYAVADQEGASKEDIEQLTKFKFRKLGDANKHTNDEAQGTTEGIMTECGTDSPIEHTLLQEDAECCICLSAYEDGTELRELPCGHHFHCSCVDKWLYINATCPLCKYNILKSSNLDREEV

SEQ ID NO: 44929 - protein, 337 aa, Arabidopsis thaliana
  peptide (1)..(337): Ceres Seq. ID no. 12559705
MREPSMLVREAAAEQLEERQSDWAYSKPVVVLDIVWNLAFVSVATAILVMSRKEHPIMPLRVWLLGYALQCVLHMVCVCVEYRRRNRRRTNRTTTTTPPRSRSSSSSSSSSSLEEEALGSRRNSGVQDLSLGHLDTESSSVAKHLESANTMFSFIWWIIGFYWVSAGGQELAQESPRIYWLSIVFLGFDVFFVVFCVALACVIGIAVCCCLPCIIAVLYAVADQEGASKEDIEQLTKFKFRKLGDANKHTNDEAQGTTEGIMTECGTDSPIEHTLLQEDAECCICLSAYEDGTELRELPCGHHFHCSCVDKWLYINATCPLCKYNILKSSNLDREEV

SEQ ID NO: 44930 - DNA, 1765 bp, Arabidopsis thaliana
  misc_feature (1)..(1765): Ceres Seq. ID no. 12600050
  misc_feature (1)..(1765): Ortholog of  Ceres SEQ ID NO 13594380 as cited in SEQ ID NO 58039
  misc_feature (1)..(1765): Ortholog of  Ceres SEQ ID NO 13597407 as cited in SEQ ID NO 64106
cttttacagaggactgcaagaacgatcaagaagcaagaaagacgtttcagaagaacaaacgtcttcttcttgttcttcttcttcctcctcttcttttttttgttttcattacgacgagaaaatttgagttcgtgatcgcttgaacaaccatcatcatcatctagagccccaaaaaagaagaagctgcgggccggttattttggttaattagtctaaatccatggcaggaggggcatttatagacgagagtggccatggaggagactacgaaggtcgtgtaaccgcgtttgtcatgataacctgcattgtagctgcaatgggtggtctcctctttggttacgacattggtatctcaggaggagtgatatcaatggaggactttctaacgaaattcttccctgacgtgcttcgtcaaatgcaaaacaaaagagggcgtgaaacagaatattgtaaatatgacaatgagcttcttactctcttcacttcctctctttacctcgctgctttgttcgcttctttccttgcctccaccattacaaggctttttggccggaaggtctcaatggttatcgggtctctcgcttttctctctggagctcttctcaacggtttagctatcaacctcgagatgttgatcatcgggcggttatttctcggtgtaggtgtcggattcgctaaccaatctgttcctctttacctctctgagatggctcctgctaagatcagaggagctctcaacattggttttcaattagcaatcacgatcgggatcttagccgcgaacattgtcaattacgtgaccccaaagctccagaacgggatcggatggagattatctctcggtttagctggagttccggccgttatgatgcttgtcggatgctttttcttgccagatacgccaaactcaatccttgaacgtggaaacaaagaaaaggctaaggagatgctgcagaagatcagaggaaccatggaggttgagcatgagtttaatgaactttgcaacgcgtgtgaagccgcgaagaaagttaagcatccatggacgaacataatgcaagctcgttatcgaccgcagctcacgttttgtaccttcatcccattcttccagcagctaaccgggatcaatgtcattatgttctatgcacctgttctgtttaagaccatcggttttggaaatgacgcctctctcatatccgcagttatcaccggtcttgtcaatgtcctttccaccattgtctccatctactccgttgacaaattcggacgaagagctttgtttcttcaaggtggttttcagatgatcgtgacccagatcgcggtcgggtcgatgatcggatggaaatttggattcaacggggaaggaaatttgtcaggggttgatgcggatataatcttggcactgatatgtctctatgtggcgggtttcgcgtggtcatggggaccgttgggatggttagtgccgagtgagatatgtccattggaaattagatcagcaggacaatcgttaaacgtttcggtgaacatgttctttacattcttcattggacaattcttcttgacgatgctttgccatatgaagtttggtttgttctatttcttcgcgggtatggtcttgatcatgaccattttcatttacttcttgttgccggagacaaaaggtgttccgattgaggagatggggaaagtgtggaaagagcatagatattgggggaaatatagtaataatgatgatggtgatgatgttgatgatgatgcttatttttag

SEQ ID NO: 44931 - protein, 514 aa, Arabidopsis thaliana
  peptide (1)..(514): Ceres Seq. ID no. 12600051
MAGGAFIDESGHGGDYEGRVTAFVMITCIVAAMGGLLFGYDIGISGGVISMEDFLTKFFPDVLRQMQNKRGRETEYCKYDNELLTLFTSSLYLAALFASFLASTITRLFGRKVSMVIGSLAFLSGALLNGLAINLEMLIIGRLFLGVGVGFANQSVPLYLSEMAPAKIRGALNIGFQLAITIGILAANIVNYVTPKLQNGIGWRLSLGLAGVPAVMMLVGCFFLPDTPNSILERGNKEKAKEMLQKIRGTMEVEHEFNELCNACEAAKKVKHPWTNIMQARYRPQLTFCTFIPFFQQLTGINVIMFYAPVLFKTIGFGNDASLISAVITGLVNVLSTIVSIYSVDKFGRRALFLQGGFQMIVTQIAVGSMIGWKFGFNGEGNLSGVDADIILALICLYVAGFAWSWGPLGWLVPSEICPLEIRSAGQSLNVSVNMFFTFFIGQFFLTMLCHMKFGLFYFFAGMVLIMTIFIYFLLPETKGVPIEEMGKVWKEHRYWGKYSNNDDGDDVDDDAYF

SEQ ID NO: 44932 - protein, 490 aa, Arabidopsis thaliana
  peptide (1)..(490): Ceres Seq. ID no. 12600052
MITCIVAAMGGLLFGYDIGISGGVISMEDFLTKFFPDVLRQMQNKRGRETEYCKYDNELLTLFTSSLYLAALFASFLASTITRLFGRKVSMVIGSLAFLSGALLNGLAINLEMLIIGRLFLGVGVGFANQSVPLYLSEMAPAKIRGALNIGFQLAITIGILAANIVNYVTPKLQNGIGWRLSLGLAGVPAVMMLVGCFFLPDTPNSILERGNKEKAKEMLQKIRGTMEVEHEFNELCNACEAAKKVKHPWTNIMQARYRPQLTFCTFIPFFQQLTGINVIMFYAPVLFKTIGFGNDASLISAVITGLVNVLSTIVSIYSVDKFGRRALFLQGGFQMIVTQIAVGSMIGWKFGFNGEGNLSGVDADIILALICLYVAGFAWSWGPLGWLVPSEICPLEIRSAGQSLNVSVNMFFTFFIGQFFLTMLCHMKFGLFYFFAGMVLIMTIFIYFLLPETKGVPIEEMGKVWKEHRYWGKYSNNDDGDDVDDDAYF

SEQ ID NO: 44933 - protein, 482 aa, Arabidopsis thaliana
  peptide (1)..(482): Ceres Seq. ID no. 12600053
MGGLLFGYDIGISGGVISMEDFLTKFFPDVLRQMQNKRGRETEYCKYDNELLTLFTSSLYLAALFASFLASTITRLFGRKVSMVIGSLAFLSGALLNGLAINLEMLIIGRLFLGVGVGFANQSVPLYLSEMAPAKIRGALNIGFQLAITIGILAANIVNYVTPKLQNGIGWRLSLGLAGVPAVMMLVGCFFLPDTPNSILERGNKEKAKEMLQKIRGTMEVEHEFNELCNACEAAKKVKHPWTNIMQARYRPQLTFCTFIPFFQQLTGINVIMFYAPVLFKTIGFGNDASLISAVITGLVNVLSTIVSIYSVDKFGRRALFLQGGFQMIVTQIAVGSMIGWKFGFNGEGNLSGVDADIILALICLYVAGFAWSWGPLGWLVPSEICPLEIRSAGQSLNVSVNMFFTFFIGQFFLTMLCHMKFGLFYFFAGMVLIMTIFIYFLLPETKGVPIEEMGKVWKEHRYWGKYSNNDDGDDVDDDAYF

SEQ ID NO: 44934 - DNA, 2325 bp, Arabidopsis thaliana; identical to SEQ ID NO: 40668
  misc_feature (1)..(2325): Ceres Seq. ID no. 12600038
  misc_feature (1)..(2325): Ortholog of  Ceres SEQ ID NO 14302243 as cited in SEQ ID NO 64663

SEQ ID NO: 44935 - protein, 634 aa, Arabidopsis thaliana; identical to SEQ ID NO: 40669
  peptide (1)..(634): Ceres Seq. ID no. 12600039

SEQ ID NO: 44936 - protein, 533 aa, Arabidopsis thaliana; identical to SEQ ID NO: 40670
  peptide (1)..(533): Ceres Seq. ID no. 12600040

SEQ ID NO: 44937 - protein, 524 aa, Arabidopsis thaliana; identical to SEQ ID NO: 40671
  peptide (1)..(524): Ceres Seq. ID no. 12600041

SEQ ID NO: 44938 - DNA, 2828 bp, Arabidopsis thaliana
  misc_feature (1)..(2828): Ceres Seq. ID no. 13646314
  misc_feature (1)..(2828): Ortholog of  Ceres SEQ ID NO 13598023 as cited in SEQ ID NO 66487
gatcgcgacgactctttgaagcttccgttgctgacgtggatcactcctctccgccacaaaaacaaaacagaaaaacaaactcagacatgagcaagagctagccgtcactctcactctctgatgtctcacgaattccgatttcaattctaacttaaaccatatttctccgatcaaacatggcgtccgtatctccatctccgtcgtgttccactatacccataccacttcgacgaacatctttcgccgttgctgagttgagacgattaaaacaaagaagagcgatcccacctgtgtccgtcggtctcggacacttcgctgatgttgtacgcaatgacgttgatttcctgaagaacaaaatcggtatcggactccgttgggctaacgaggcttttcgtgtaccggaagtgactaaatccgctgaggaactgttttggcttaggcatcttgaggatcatacttctcagaatttgaagtcacaatcttggcctcagccttcctactcagggctcactggggtggatttgttcatggctgatgtcaaagccttggagacatatgctggttacttttacagtctttctaagatgtggtcaagaccacttcctgaagtttatgattcacaagctgttgcagattactttaattgcaggcctcatgtcgttgcctttaggcttctcgaggtattttctgcgttcacgattgctgccatcagattacgaacatcagcatcagttaagggcaaaagtttagaagcttcagagcagatttttgggatggtgttgaaagaaaccatgctacatttgggcccaacttttatcaaagttggtcaatcgctttccacgaggccagatatcattgggactgaaatctccaaggcactatctgaactgcatgaccgaatccctccctttccctggcctgaggctgtaaaaatccttgaaggggaattaggtggtcctgtcgaatcattctttagtcagttttcgcaagaaactgtagcagcagcatcctttggtcaggtctaccgaggaaggaccctcgatggtgcagatgttgcagtgaaagttcagcgccctgatctgagacatgcagtgctacgcgacatctacattctgcgacttgggttaggtgtattgcgaaaggtagcaaagagagaaaatgacattcgtgtatatgctgatgagcttggaatgggtttggctggagaattggactttactttagaggctgccaatgcctctgaatttcaggaagctcacgcacgattttcctatatccgggttccaaaagtatatcagcatctaacgcgcaaaagagttttgaccatggaatggatggttggtgaaagcccaaccgatctactcgcaatatcttctggttactctgatcatgacaatgagagtcatgagaaacaaaaaattgaagcgagaaggcgtcttcttgatctggtgaacaaaggggtagaggcaactctagttcaactccttgatacaggtattttgcatgcagatccgcatcctggaaaccttcgttacacaacatcaagacaaatagggtttttggactttggtttagtttgtcggatgcaaagaaaacatcagcttgccatgctcgcatcaattgtgcatatcgtaaatggtgattgggcctgtcttgttgaatcgttgattgatatggatgtcatcacgccaggcgttaatacccgtcgttttactctggatctggaatatgcattgggagaggttaaacttataaacgggattcctgatatcgagttcaccaaggtgcttagtaaaatagtcaatgtggccctgaagtatcagctacgcatgccaccatacttcacacttgtcctccgttctcttgcttgcttggaaggtctggctgcagctggagatccaaattttaagacatttgaggcagcatacccttttgtggttcaaaagctcatcactgaaaattcagctgcaacaaggaagattcttcattcggcagtccttaaccgaaagaaggaattccgatgggaaagggttgctcttttcctgagtaaaagttctacgaggaaacaatcgccactgctaaagttatcaagggatgaaacttctgttgatagtagttccaatctaacggacaaagatgctgacaatgtaagtttggtcttgagacttttggcatccaaaaatggtgtggttcttagaagactcttgatggctgcgaacgggacttcactgatccggacatttatttcaagagaggcacttgtcatacgccagaaactttgcatgacgattgcaactacgatgtaccaatggatggttggaagccttggaattgaatcccttaaattcatttctctttcagacccaccaccatcttcaggaatcaacattacagtcaaagacttcaagattctaatcaatgacaagcgggtcagagtaatactgagaaagatactggagtctgcaaagagtgaccgagttttgatgctcagattctgctggacttcctttgtcatgtctctcaccaccactgcgcttgcttgccatcggtttgtgatctcggtctctgaaggttacgtcaactacttatctctgtctgctccagtcgcacttcgtacctgattacctgaacatcctacaccaacacagaaccagaatcactaatgtatattgttgtcaagacccaaagcaaagggttccttagtaagagggatagattctacagaaagactaaatattttcgtgtatagagtcgttccatatctaatactatcagacgatcaatgcctgtcgtaacgatatatgactaatcataatatccgagacctc

SEQ ID NO: 44939 - protein, 814 aa, Arabidopsis thaliana
  peptide (1)..(814): Ceres Seq. ID no. 13646315
MASVSPSPSCSTIPIPLRRTSFAVAELRRLKQRRAIPPVSVGLGHFADVVRNDVDFLKNKIGIGLRWANEAFRVPEVTKSAEELFWLRHLEDHTSQNLKSQSWPQPSYSGLTGVDLFMADVKALETYAGYFYSLSKMWSRPLPEVYDSQAVADYFNCRPHVVAFRLLEVFSAFTIAAIRLRTSASVKGKSLEASEQIFGMVLKETMLHLGPTFIKVGQSLSTRPDIIGTEISKALSELHDRIPPFPWPEAVKILEGELGGPVESFFSQFSQETVAAASFGQVYRGRTLDGADVAVKVQRPDLRHAVLRDIYILRLGLGVLRKVAKRENDIRVYADELGMGLAGELDFTLEAANASEFQEAHARFSYIRVPKVYQHLTRKRVLTMEWMVGESPTDLLAISSGYSDHDNESHEKQKIEARRRLLDLVNKGVEATLVQLLDTGILHADPHPGNLRYTTSRQIGFLDFGLVCRMQRKHQLAMLASIVHIVNGDWACLVESLIDMDVITPGVNTRRFTLDLEYALGEVKLINGIPDIEFTKVLSKIVNVALKYQLRMPPYFTLVLRSLACLEGLAAAGDPNFKTFEAAYPFVVQKLITENSAATRKILHSAVLNRKKEFRWERVALFLSKSSTRKQSPLLKLSRDETSVDSSSNLTDKDADNVSLVLRLLASKNGVVLRRLLMAANGTSLIRTFISREALVIRQKLCMTIATTMYQWMVGSLGIESLKFISLSDPPPSSGINITVKDFKILINDKRVRVILRKILESAKSDRVLMLRFCWTSFVMSLTTTALACHRFVISVSEGYVNYLSLSAPVALRT

SEQ ID NO: 44940 - protein, 697 aa, Arabidopsis thaliana
  peptide (1)..(697): Ceres Seq. ID no. 13646316
MADVKALETYAGYFYSLSKMWSRPLPEVYDSQAVADYFNCRPHVVAFRLLEVFSAFTIAAIRLRTSASVKGKSLEASEQIFGMVLKETMLHLGPTFIKVGQSLSTRPDIIGTEISKALSELHDRIPPFPWPEAVKILEGELGGPVESFFSQFSQETVAAASFGQVYRGRTLDGADVAVKVQRPDLRHAVLRDIYILRLGLGVLRKVAKRENDIRVYADELGMGLAGELDFTLEAANASEFQEAHARFSYIRVPKVYQHLTRKRVLTMEWMVGESPTDLLAISSGYSDHDNESHEKQKIEARRRLLDLVNKGVEATLVQLLDTGILHADPHPGNLRYTTSRQIGFLDFGLVCRMQRKHQLAMLASIVHIVNGDWACLVESLIDMDVITPGVNTRRFTLDLEYALGEVKLINGIPDIEFTKVLSKIVNVALKYQLRMPPYFTLVLRSLACLEGLAAAGDPNFKTFEAAYPFVVQKLITENSAATRKILHSAVLNRKKEFRWERVALFLSKSSTRKQSPLLKLSRDETSVDSSSNLTDKDADNVSLVLRLLASKNGVVLRRLLMAANGTSLIRTFISREALVIRQKLCMTIATTMYQWMVGSLGIESLKFISLSDPPPSSGINITVKDFKILINDKRVRVILRKILESAKSDRVLMLRFCWTSFVMSLTTTALACHRFVISVSEGYVNYLSLSAPVALRT

SEQ ID NO: 44941 - protein, 678 aa, Arabidopsis thaliana
  peptide (1)..(678): Ceres Seq. ID no. 13646317
MWSRPLPEVYDSQAVADYFNCRPHVVAFRLLEVFSAFTIAAIRLRTSASVKGKSLEASEQIFGMVLKETMLHLGPTFIKVGQSLSTRPDIIGTEISKALSELHDRIPPFPWPEAVKILEGELGGPVESFFSQFSQETVAAASFGQVYRGRTLDGADVAVKVQRPDLRHAVLRDIYILRLGLGVLRKVAKRENDIRVYADELGMGLAGELDFTLEAANASEFQEAHARFSYIRVPKVYQHLTRKRVLTMEWMVGESPTDLLAISSGYSDHDNESHEKQKIEARRRLLDLVNKGVEATLVQLLDTGILHADPHPGNLRYTTSRQIGFLDFGLVCRMQRKHQLAMLASIVHIVNGDWACLVESLIDMDVITPGVNTRRFTLDLEYALGEVKLINGIPDIEFTKVLSKIVNVALKYQLRMPPYFTLVLRSLACLEGLAAAGDPNFKTFEAAYPFVVQKLITENSAATRKILHSAVLNRKKEFRWERVALFLSKSSTRKQSPLLKLSRDETSVDSSSNLTDKDADNVSLVLRLLASKNGVVLRRLLMAANGTSLIRTFISREALVIRQKLCMTIATTMYQWMVGSLGIESLKFISLSDPPPSSGINITVKDFKILINDKRVRVILRKILESAKSDRVLMLRFCWTSFVMSLTTTALACHRFVISVSEGYVNYLSLSAPVALRT

SEQ ID NO: 44942 - DNA, 807 bp, Arabidopsis thaliana
  misc_feature (1)..(807): Ceres Seq. ID no. 13575668
  misc_feature (1)..(807): Ortholog of  Ceres SEQ ID NO 15226473 as cited in SEQ ID NO 50919
  misc_feature (1)..(807): Ortholog of  Ceres SEQ ID NO 13639704 as cited in SEQ ID NO 51325
  misc_feature (1)..(807): Ortholog of  Ceres SEQ ID NO 13661747 as cited in SEQ ID NO 60578
  misc_feature (1)..(807): Ortholog of  Ceres SEQ ID NO 13661672 as cited in SEQ ID NO 61462
  misc_feature (1)..(807): Ortholog of  Ceres SEQ ID NO 13599646 as cited in SEQ ID NO 0
ttcaggttgcaacaagaaagagaaaaaaagagaatggcgtacagcccgagcttcttacaccagagtgcacttgcctcctctgccggacgatcatcatcttcatcttcatcgtcgtttcgtcatgtgtccctctcgagacccgtccatttagtatgtagagctcaacagtctcaggaaaacaataactctgctgttttccgccgtcttgcccttaccttactcgttggtgctgcagccatcggatccaaagtctctcctgcgccgcctatggtgaagccgccaaagaagaacacagatttcctgccatacacaggagaaggattcaaaatccagatcccatcaaagtggaacccaagtaaagaaattgagtatccaggacaagtactaagattcgaggacaactttgacgccaccagcaatgtctctgtcatgatcactcctacagacaagaaatccatcactgattacggttctcctgaacagttcctctctcaggtgaattatctcctcgggaagcaagcttacgtcggcgaaacagcctctgagggagggtttgatgcaaatgcagtagcaactgcaaacattttggaaacatctacacaagaaatcggagggaaagaatactattacttgtcggttctgacaagaacagctgatggagatgaaggtgggaagcaccaactgataacagccactgtgaatggtggaaagctttacatttgcaaagctcaagcaggagacaagaggtggttcaaaggagctaggaagttcgttgagaatgctgctacgtccttcagtgttgcttga

SEQ ID NO: 44943 - protein, 268 aa, Arabidopsis thaliana
  peptide (1)..(268): Ceres Seq. ID no. 13575669
FRLQQEREKKRMAYSPSFLHQSALASSAGRSSSSSSSSFRHVSLSRPVHLVCRAQQSQENNNSAVFRRLALTLLVGAAAIGSKVSPAPPMVKPPKKNTDFLPYTGEGFKIQIPSKWNPSKEIEYPGQVLRFEDNFDATSNVSVMITPTDKKSITDYGSPEQFLSQVNYLLGKQAYVGETASEGGFDANAVATANILETSTQEIGGKEYYYLSVLTRTADGDEGGKHQLITATVNGGKLYICKAQAGDKRWFKGARKFVENAATSFSVA

SEQ ID NO: 44944 - protein, 257 aa, Arabidopsis thaliana
  peptide (1)..(257): Ceres Seq. ID no. 13575670
MAYSPSFLHQSALASSAGRSSSSSSSSFRHVSLSRPVHLVCRAQQSQENNNSAVFRRLALTLLVGAAAIGSKVSPAPPMVKPPKKNTDFLPYTGEGFKIQIPSKWNPSKEIEYPGQVLRFEDNFDATSNVSVMITPTDKKSITDYGSPEQFLSQVNYLLGKQAYVGETASEGGFDANAVATANILETSTQEIGGKEYYYLSVLTRTADGDEGGKHQLITATVNGGKLYICKAQAGDKRWFKGARKFVENAATSFSVA

SEQ ID NO: 44945 - protein, 179 aa, Arabidopsis thaliana
  peptide (1)..(179): Ceres Seq. ID no. 13575671
MVKPPKKNTDFLPYTGEGFKIQIPSKWNPSKEIEYPGQVLRFEDNFDATSNVSVMITPTDKKSITDYGSPEQFLSQVNYLLGKQAYVGETASEGGFDANAVATANILETSTQEIGGKEYYYLSVLTRTADGDEGGKHQLITATVNGGKLYICKAQAGDKRWFKGARKFVENAATSFSVA

SEQ ID NO: 44946 - DNA, 2049 bp, Arabidopsis thaliana
  misc_feature (1)..(2049): Ceres Seq. ID no. 12559824
  misc_feature (1)..(2049): Ortholog of  Ceres SEQ ID NO 14309384 as cited in SEQ ID NO 52806
  misc_feature (1)..(2049): Ortholog of  Ceres SEQ ID NO 15178173 as cited in SEQ ID NO 54139
  misc_feature (1)..(2049): Ortholog of  Ceres SEQ ID NO 14304136 as cited in SEQ ID NO 59024
  misc_feature (1)..(2049): Ortholog of  Ceres SEQ ID NO 14301836 as cited in SEQ ID NO 67386
gtcatcaccaacttcttcaccatcatcatgaatgttaaaacttccataaacaaatccttccttgtccccttgtatttttctatctaaatccctaaaaccactcaaaatcatccctctttctctcctccccattttccccaacgcttgattcgaattcgtctctctcgttttctgttgttctaccaattgagcaaccctagaatcattcttgtgtacctaccggaaccgagtcttctcttcttccgtggcacatctttcaaagttttaaaccccttttcccctaacttcttttcatttttctgtttttttcccgggaaattttctctctctctctctattttttgtttctctcgtcatgatcattacttgtcaagtatgatcctttattaggtttctttggggccgatctcactttttctgtttctcaccctcttctcttcgaaggcccttgtaaaccctagaatctcctcttttcaaatttatatgttctgtttcttcatcttcaggtttaatcattcaatctatctctagggtttaccgggtcaagtcttaggatctgtctctatccatacttcatcaaagtttccgtctttggttctaatccatggcgtatcattcgattccgagctctgggtttcattacttgaattctccttttggtgacacaacctttactaaagtctttgttggtggccttgcctgggagactcaaagcgagactcttcgtcggcatttcgatcaatatggtgatatccttgaggctgtcgttattactgataagaacactggtcgatccaaaggttatggctttgtgactttccgagatccagaggctgctaggagagcctgtgtcgatccaacacctattatagatggcagacgagcgaattgtaatctcgcttctcttgggagatctaggcctccaatgcaatatgcagtgataccccatgctcctggacgggtaagacctccttccccatatgttggaagtgtgcagagtcctcgcggtttgcattttggaagccatccgtatcaccaaccccctacttataactaccaacaaggagtggtgtacccttatggggttacaccatatggacctgactacatgtactcacagtctcagggtttctatggtccttacatgggtcaacagtaccttcaggtttatggagtacctggggcagttaactcaccgggttatcaatatgggcaactgagccatactattcctggtgctcacggttatacagcgggtcaaggttattcacatccaggaagtcatgttctacagcttggtgccacttcacctatgtctgctattcaatctccatacccttctccttcagctccaacgcaccaacgtgtcatcgtccagactcctcctcagtatatacagagtagcggttctgatcagacaacagggtgatcaacttagtaatccttaaagattgcagaaaagggaagaagtccaggacaaatgctactctggcaggcttcctgtttaagcttagcacattatttattttcgcattctagaggtattaagtagtcttgctcactgaagaagtcaaaaaagggggaaaggagaatggaagtttcagggtttgtgcttctgttatctttaaccctctcatcctatgtatatagcccacaacaagcttgatggcataaactatatgaatagtttcaccccggaaacaagggttttcgcggtaaactggtaggaataagtttggtgtacaaagaaagttcatatatatataaacacatacataaatgcatatagaatggtggaatcaacatctgattcttttgggtggtaaaagtagtcttcttactacacactctcttaaggcatatgagtgttggtaatattactaggtagattctcacgtcctcttgagtcaagtcctctgcattgtaagtaaaaaattaatgactatggagctcacttcagcttctttgtctgtgcataaattttagctccaggattcttctcttttctatgtctgtacagtttctagactgataaattgttcttctcaa

SEQ ID NO: 44947 - protein, 274 aa, Arabidopsis thaliana
  peptide (1)..(274): Ceres Seq. ID no. 12559825
MAYHSIPSSGFHYLNSPFGDTTFTKVFVGGLAWETQSETLRRHFDQYGDILEAVVITDKNTGRSKGYGFVTFRDPEAARRACVDPTPIIDGRRANCNLASLGRSRPPMQYAVIPHAPGRVRPPSPYVGSVQSPRGLHFGSHPYHQPPTYNYQQGVVYPYGVTPYGPDYMYSQSQGFYGPYMGQQYLQVYGVPGAVNSPGYQYGQLSHTIPGAHGYTAGQGYSHPGSHVLQLGATSPMSAIQSPYPSPSAPTHQRVIVQTPPQYIQSSGSDQTTG

SEQ ID NO: 44948 - protein, 167 aa, Arabidopsis thaliana
  peptide (1)..(167): Ceres Seq. ID no. 12559826
MQYAVIPHAPGRVRPPSPYVGSVQSPRGLHFGSHPYHQPPTYNYQQGVVYPYGVTPYGPDYMYSQSQGFYGPYMGQQYLQVYGVPGAVNSPGYQYGQLSHTIPGAHGYTAGQGYSHPGSHVLQLGATSPMSAIQSPYPSPSAPTHQRVIVQTPPQYIQSSGSDQTTG

SEQ ID NO: 44949 - DNA, 2193 bp, Arabidopsis thaliana
  misc_feature (1)..(2193): Ceres Seq. ID no. 12559827
  misc_feature (1)..(2193): Ortholog of  Ceres SEQ ID NO 15175762 as cited in SEQ ID NO 60346
aaagtagtaaccagagacactgtgccgtcgcccgtcgccgccgccgccacactatcatctctctcaggtttttgattttccacggcaatggagtcttcgattctcaaaagccctaatctctcttcaccatcgttcggtgtaccttcaattcccgccttatcctcctcctccacctcaccattttcatctcttcatctccgatcacagaaccaccgtaccatctctcttaccaccgccggaaaattccgtgtctcgtattctctctccgcttcttcacctctaccacctcatgctcctcgccgtcgtcccaattacatccctaaccgtatatccgatcccaattacgtcagaatcttcgatacaactctccgagacggtgaacagtctcccggagctacactaacctccaaggaaaagctcgatatcgctcgtcaattagccaagctcggagtcgacatcatcgaagctggatttcccgctgcttcaaaagacgatttcgaagctgttaaaaccatagctgagactgttggcaataccgtcgacgaaaatggctatgtccctgtaatctgtggtctctcgagatgtaacaagaaggatattgagacggcttgggaagctgtgaagtacgctaagcggccaagaatccatacgtttattgccactagtgatattcatctgaagtataagttgaagaagagtaaagaagaagttattgagatcgctaggaacatggttagattcgccagaagcttgggatgtgaagatgttgaatttagtccagaagatgccggaagatcggagagagagtacttatacgagattcttggtgaagtgatcaaagctggagcaaccactcttaacatacctgacactgttggtataaccttgcctagtgagtttggtcagttgattgctgatattaaagctaatactcctgggatccaaaatgttataatctctacacattgtcagaatgatcttggactctccaccgccaacactttatctggtgcacattcgggcgcgaggcaagtggaagtgactatcaatggaattggcgaaagagctggaaacgcttcattggaagaggttgtcatggccataaaatgccgtggagatcatgtcttaggaggcctatttactggaatcgatacccggcacattgttatgacaagcaagatggttgaggagtacactggtatgcaaacgcagccccataaggctattgtaggagcaaacgcctttgcgcatgaaagtggtattcatcaggatggaatgctgaagcacaagggtacctatgaaattatgtcccccgaagagattgggcttgagcgatcaaatgatgctggcatcgtgctgggaaagcttagtgggcgtcacgcactgaaagaccgtttaaatgagctcggttatgtcctggatgatgggcagctaagcaaccttttctggcgtttcaaagctgtggcagagcaaaaaaagagagttaccgatgctgacttaatagctttagtatctgatgaagtgtttcagccagaggctgtctggaaactcctggacatgcagataacttgtggaactctcggtctctcaacatctactgtaaaacttgctgactccgatggcaaagagcatgtagcttgttctgttggaaccggacctgtagatgcagcttacaaggcagttgatcttatcgttaaggaacctgcgactctgcttgagtactcgatgaatgcagtaacagaaggcattgatgctattgcaaccacacgggttctaatccgcggagacaacaactactcatcaacaaacgcggtaacgggtgaatctgttgaaagaacttttagtggaaccggagcaggaatggacattgttgtgtcgagcgttaaagcttatgttggagctttgaacaaaatgttgggtttcaaagaacacacctccactttaagtaaaacccctttggagaccaacgaagtccctgcctgaagaaaatcttacctgcaaatctcagagatcaaatcacaatttagatgagtaaacgtctaaaagatttttattttttgttaccgttattgtttgtataaaaagaatatgagttttggtttactaaaataactatgatataaaacagagtatttggttaaaacattgaaacaagaacaaattttctataaatagtgaaggcatttgccctaa

SEQ ID NO: 44950 - protein, 631 aa, Arabidopsis thaliana
  peptide (1)..(631): Ceres Seq. ID no. 12559828
MESSILKSPNLSSPSFGVPSIPALSSSSTSPFSSLHLRSQNHRTISLTTAGKFRVSYSLSASSPLPPHAPRRRPNYIPNRISDPNYVRIFDTTLRDGEQSPGATLTSKEKLDIARQLAKLGVDIIEAGFPAASKDDFEAVKTIAETVGNTVDENGYVPVICGLSRCNKKDIETAWEAVKYAKRPRIHTFIATSDIHLKYKLKKSKEEVIEIARNMVRFARSLGCEDVEFSPEDAGRSEREYLYEILGEVIKAGATTLNIPDTVGITLPSEFGQLIADIKANTPGIQNVIISTHCQNDLGLSTANTLSGAHSGARQVEVTINGIGERAGNASLEEVVMAIKCRGDHVLGGLFTGIDTRHIVMTSKMVEEYTGMQTQPHKAIVGANAFAHESGIHQDGMLKHKGTYEIMSPEEIGLERSNDAGIVLGKLSGRHALKDRLNELGYVLDDGQLSNLFWRFKAVAEQKKRVTDADLIALVSDEVFQPEAVWKLLDMQITCGTLGLSTSTVKLADSDGKEHVACSVGTGPVDAAYKAVDLIVKEPATLLEYSMNAVTEGIDAIATTRVLIRGDNNYSSTNAVTGESVERTFSGTGAGMDIVVSSVKAYVGALNKMLGFKEHTSTLSKTPLETNEVPA

SEQ ID NO: 44951 - protein, 417 aa, Arabidopsis thaliana
  peptide (1)..(417): Ceres Seq. ID no. 12559829
MVRFARSLGCEDVEFSPEDAGRSEREYLYEILGEVIKAGATTLNIPDTVGITLPSEFGQLIADIKANTPGIQNVIISTHCQNDLGLSTANTLSGAHSGARQVEVTINGIGERAGNASLEEVVMAIKCRGDHVLGGLFTGIDTRHIVMTSKMVEEYTGMQTQPHKAIVGANAFAHESGIHQDGMLKHKGTYEIMSPEEIGLERSNDAGIVLGKLSGRHALKDRLNELGYVLDDGQLSNLFWRFKAVAEQKKRVTDADLIALVSDEVFQPEAVWKLLDMQITCGTLGLSTSTVKLADSDGKEHVACSVGTGPVDAAYKAVDLIVKEPATLLEYSMNAVTEGIDAIATTRVLIRGDNNYSSTNAVTGESVERTFSGTGAGMDIVVSSVKAYVGALNKMLGFKEHTSTLSKTPLETNEVPA

SEQ ID NO: 44952 - DNA, 2714 bp, Arabidopsis thaliana
  misc_feature (1)..(2714): Ceres Seq. ID no. 12600111
  misc_feature (1)..(2714): Ortholog of  Ceres SEQ ID NO 14310206 as cited in SEQ ID NO 20650
agccaaacacaccgttctgattactgattcttcattgacggtaggagtcaccacttttggcggcgattccttgttctctattttttttgcacaagcaacatttagcttctgcaaactccagttcatctctcaaccctcatatcgccgtgttttctcgctctagtaccgcgagctcggacgaaccaggaagcaatccgttaatctagaagcggtgttgagaagatgacgattacatcaaatatctctgtacagaacgataacctcgttgttcaagggaagactatccttaccaaaatccctgacaacattatcctaactccggttaccggtaatggattcgtttccggttcatttataggcgcgacgtttgaacaaagcaagagtcttcatgtgttccccatcggtgtattggagggtcttcggttcatgtgctgtttccggtttaagctatggtggatgactcagagaatgggaagctgtggaaaagacattcctttggagacacagttcatgctactggaaagcaaggatgaggttgaagggaatggggatgatgctcctactgtttataccgtctttctccctctccttgaaggccagttcagagctgttctgcaaggaaatgagaagaatgagattgagatttgttttgagagtggagataaggcggtggaaactagccagggaactcaccttgtttatgttcatgctggaaccaatccctttgaagttatcagacaatccgtaaaggctgtggagagacacatgcagacatttcatcatcgtgagaagaagaagcttccttctttcctagactggtttggctggtgcacatgggacgctttctacacagatgtgactgccgagggtgttgatgaaggccttaaaagtctttctgaaggaggtacccctccgaagtttctgatcatagacgatggttggcaacaaatagaaaacaaagagaaagatgaaaactgcgttgttcaggaaggagcacagtttgctactaggcttgttggtatcaaggagaatgcaaaatttcagaagagtgatcagaaggatacgcaagtgtcaggactaaagagtgtagttgacaatgcgaagcagcgccataatgtgaagcaagtttatgcatggcatgctttagctggatactggggtggagtaaaacccgctgcttctggaatggaacactatgatagtgcattagcatacccagttcagtctccaggtgtcttagggaaccaaccagatatagtaatggacagccttgctgttcatggtctcggacttgtcaatccgaagaaagttttcaacttctacaacgaactgcattcatacttggcttcatgtggtatagatggagtcaaagttgacgtccagaacatcattgaaaccctaggtgctggtcttggcgggagagtctctctcactcgtagctaccagcaagctttagaagcttcaattgcccggaacttcacagataatggttgcatatcttgcatgtgtcacaacacagacggactttacagcgcaaaacaaaccgctattgttagagcttccgatgatttctacccaagagatcctgcttctcacaccatccacattgcatcggttgcatacaacagccttttccttggagagttcatgcaacctgactgggatatgttccatagtctacacccaactgcagagtaccatgctgcagcgcgtgcagtgggtggatgcgcaatctatgtcagtgataagccaggcaaccacaactttgatctattgaggaagctggttcttcctgatggttcagttcttcgggctaagctcccgggtaggcctacccgtgactgcttattcgctgatccagctagagatggaatcagcttgctcaagatctggaacatgaataagtttactggtattgttggtgtattcaattgtcaaggtgctggttggtgcaaggaaacgaagaagaaccagatccatgatacttctcctggcacactcacgggttcaatccgtgcggatgatgctgatctaatctctcaagtggctggtgaagattggagtggagattcaatagtctatgcatacagatcaggtgaggtggtaagactacctaaaggtgcttcaattcctctcaccctcaaagtccttgaatatgaactcttccacatctctcctttgaaggaaatcactgaaaacatttcgttcgcaccaataggacttgtagacatgttcaactcaagtggagcaatcgagtcgattgatatcaatcacgtgaccgacaagaatcctgaattcttcgatggagagatctcctcggcttctcccgcgctcagcgataaccgttctccaacagctctggtatctgtcagtgtcagaggctgtggtcgttttggagcttactcttctcagcgtcctctaaaatgcgccgttgaaagcacagagactgatttcacgtacgacgccgaggttgggcttgtgactttgaatctgccggtgacgagggaggaaatgttcagatggcatgttgagattctggtctagaccaccaataagttattttttttcaccaatttgtcattcatcattttgtagtataaaggcatcaataaattaggaaattaatggtcattcttcgctttgtaataatgtaatctcgtcaagttggggaagcaccgtccccttgtagtttcgttctaataatatagtacctt

SEQ ID NO: 44953 - protein, 773 aa, Arabidopsis thaliana
  peptide (1)..(773): Ceres Seq. ID no. 12600112
MTITSNISVQNDNLVVQGKTILTKIPDNIILTPVTGNGFVSGSFIGATFEQSKSLHVFPIGVLEGLRFMCCFRFKLWWMTQRMGSCGKDIPLETQFMLLESKDEVEGNGDDAPTVYTVFLPLLEGQFRAVLQGNEKNEIEICFESGDKAVETSQGTHLVYVHAGTNPFEVIRQSVKAVERHMQTFHHREKKKLPSFLDWFGWCTWDAFYTDVTAEGVDEGLKSLSEGGTPPKFLIIDDGWQQIENKEKDENCVVQEGAQFATRLVGIKENAKFQKSDQKDTQVSGLKSVVDNAKQRHNVKQVYAWHALAGYWGGVKPAASGMEHYDSALAYPVQSPGVLGNQPDIVMDSLAVHGLGLVNPKKVFNFYNELHSYLASCGIDGVKVDVQNIIETLGAGLGGRVSLTRSYQQALEASIARNFTDNGCISCMCHNTDGLYSAKQTAIVRASDDFYPRDPASHTIHIASVAYNSLFLGEFMQPDWDMFHSLHPTAEYHAAARAVGGCAIYVSDKPGNHNFDLLRKLVLPDGSVLRAKLPGRPTRDCLFADPARDGISLLKIWNMNKFTGIVGVFNCQGAGWCKETKKNQIHDTSPGTLTGSIRADDADLISQVAGEDWSGDSIVYAYRSGEVVRLPKGASIPLTLKVLEYELFHISPLKEITENISFAPIGLVDMFNSSGAIESIDINHVTDKNPEFFDGEISSASPALSDNRSPTALVSVSVRGCGRFGAYSSQRPLKCAVESTETDFTYDAEVGLVTLNLPVTREEMFRWHVEILV

SEQ ID NO: 44954 - protein, 705 aa, Arabidopsis thaliana
  peptide (1)..(705): Ceres Seq. ID no. 12600113
MCCFRFKLWWMTQRMGSCGKDIPLETQFMLLESKDEVEGNGDDAPTVYTVFLPLLEGQFRAVLQGNEKNEIEICFESGDKAVETSQGTHLVYVHAGTNPFEVIRQSVKAVERHMQTFHHREKKKLPSFLDWFGWCTWDAFYTDVTAEGVDEGLKSLSEGGTPPKFLIIDDGWQQIENKEKDENCVVQEGAQFATRLVGIKENAKFQKSDQKDTQVSGLKSVVDNAKQRHNVKQVYAWHALAGYWGGVKPAASGMEHYDSALAYPVQSPGVLGNQPDIVMDSLAVHGLGLVNPKKVFNFYNELHSYLASCGIDGVKVDVQNIIETLGAGLGGRVSLTRSYQQALEASIARNFTDNGCISCMCHNTDGLYSAKQTAIVRASDDFYPRDPASHTIHIASVAYNSLFLGEFMQPDWDMFHSLHPTAEYHAAARAVGGCAIYVSDKPGNHNFDLLRKLVLPDGSVLRAKLPGRPTRDCLFADPARDGISLLKIWNMNKFTGIVGVFNCQGAGWCKETKKNQIHDTSPGTLTGSIRADDADLISQVAGEDWSGDSIVYAYRSGEVVRLPKGASIPLTLKVLEYELFHISPLKEITENISFAPIGLVDMFNSSGAIESIDINHVTDKNPEFFDGEISSASPALSDNRSPTALVSVSVRGCGRFGAYSSQRPLKCAVESTETDFTYDAEVGLVTLNLPVTREEMFRWHVEILV

SEQ ID NO: 44955 - protein, 695 aa, Arabidopsis thaliana
  peptide (1)..(695): Ceres Seq. ID no. 12600114
MTQRMGSCGKDIPLETQFMLLESKDEVEGNGDDAPTVYTVFLPLLEGQFRAVLQGNEKNEIEICFESGDKAVETSQGTHLVYVHAGTNPFEVIRQSVKAVERHMQTFHHREKKKLPSFLDWFGWCTWDAFYTDVTAEGVDEGLKSLSEGGTPPKFLIIDDGWQQIENKEKDENCVVQEGAQFATRLVGIKENAKFQKSDQKDTQVSGLKSVVDNAKQRHNVKQVYAWHALAGYWGGVKPAASGMEHYDSALAYPVQSPGVLGNQPDIVMDSLAVHGLGLVNPKKVFNFYNELHSYLASCGIDGVKVDVQNIIETLGAGLGGRVSLTRSYQQALEASIARNFTDNGCISCMCHNTDGLYSAKQTAIVRASDDFYPRDPASHTIHIASVAYNSLFLGEFMQPDWDMFHSLHPTAEYHAAARAVGGCAIYVSDKPGNHNFDLLRKLVLPDGSVLRAKLPGRPTRDCLFADPARDGISLLKIWNMNKFTGIVGVFNCQGAGWCKETKKNQIHDTSPGTLTGSIRADDADLISQVAGEDWSGDSIVYAYRSGEVVRLPKGASIPLTLKVLEYELFHISPLKEITENISFAPIGLVDMFNSSGAIESIDINHVTDKNPEFFDGEISSASPALSDNRSPTALVSVSVRGCGRFGAYSSQRPLKCAVESTETDFTYDAEVGLVTLNLPVTREEMFRWHVEILV

SEQ ID NO: 44956 - DNA, 2611 bp, Arabidopsis thaliana
  misc_feature (1)..(2611): Ceres Seq. ID no. 13591498
  misc_feature (1)..(2611): Ortholog of  Ceres SEQ ID NO 15176095 as cited in SEQ ID NO 59699
agtctctctaatgattccttcgtacgcatcctcatcttcttcttcttctctcttctactgtatttaaacactctctcgtcttctccttggatccagagagagacacaacacaccatctcaatcatgtcttcttcgtttctctcctccactgctttcttcctcctcctttgtctaggattctgccacgtgtcctcttcctcctccgaccaaggaacttacatcgttcacatggctaaatctcagatgccgtcgtctttcgacctccactctaactggtacgattcatctctcagatctatctccgactcagccgaattgctctacacttacgagaacgcgattcatggattctcaacacggctaactcaagaagaagccgactcgctcatgactcaacctggtgttatctccgttttaccggagcaccgttacgagctacacaccactcgtactcctctcttcctcggtctcgacgaacacaccgcagatctgttccctgaagccggctcttacagcgacgtcgtcgtcggagttctcgataccggagtttggcccgagagtaaaagctactccgacgaaggattcggtcctattccttcctcctggaaaggcggatgcgaggccggaaccaatttcaccgcttctctctgtaaccgtaaactaatcggagcaagattcttcgctcgtggttacgaatcaacgatgggaccaatcgatgaatctaaagaatcaagatctcctagagacgacgacggtcacggaactcacacctcatcgaccgccgctggatccgtcgttgaaggagctagcttattaggctacgcttcaggaacagctcgtggtatggctccacgcgctcgtgtcgctgtttacaaagtctgttggctcggtggttgtttcagctcagatattttagctgcaatcgataaagccatcgccgataacgtcaatgtcctgtcgatgtcactcggcggtggaatgtcggattattatagagacggtgttgcgatcggagcattcgccgccatggaaagagggattttagtatcttgctcagctggtaatgctggtccgagtagttctagtttatcaaacgtagctccatggatcacaactgttggtgctggtactttagatcgtgattttccggcgcttgcgattctcggtaacggcaagaatttcaccggagtttctttgtttaaaggagaagctttaccggataaattgttgccgtttatttacgctgggaatgctagtaatgctactaatggtaatctctgtatgaccggaactttgatcccggagaaagtaaaggggaagattgtgatgtgtgatagaggaattaatgctagagttcagaaaggtgatgtggttaaagcagcaggtggagttggaatgattctggctaacactgcggcgaatggtgaagagcttgttgcggatgctcatttgttaccggcgaccaccgttggtgaaaaagccggtgatataatccggcattacgtgactactgatcctaatcccaccgcttcgatttcaatcttaggaacagtcgtcggtgttaaaccatctccggttgtcgcagcgtttagctcacgtggaccgaattcgattacaccgaatattcttaaaccggatctgatcgctcctggagtaaacatcctcgccgcgtggaccggtgctgctggaccaaccggactcgcttccgattctcgccgcgtggagttcaatatcatctctgggacgtcgatgtcttgccctcacgttagtggtttagcggcgcttctcaagtcggtgcatcctgaatggagcccggcggcgattagatcggcgcttatgaccaccgcttacaaaacctacaaagacggtaaaccgttactcgacatcgcgacagggaagccttcgacgccgttcgatcacggtgcaggacacgtgtcaccaacaactgccactaatccaggactcatctacgatctaacgacggaggattacttaggcttcctctgcgcattgaattacacatcgccgcaaattcgaagtgtctcgagacgtaattacacttgcgatccgagtaaatcgtactcggtcgctgatttgaactacccgtcgttcgccgttaacgttgatggagtcggtgcgtataagtacacgcgcacggtgacgagcgtgggaggagctgggacttactcggttaaagtaacttcggagacgacaggagtcaagatttcggttgaaccggcggttttgaatttcaaggaagctaacgagaaaaaatcgtatacggtgacgtttactgtagactcgtcgaagccgtctggatctaacagctttgggagtattgaatggtcggatgggaaacacgtggtgggaagtcccgtggcgattagctggacatagtcgtaaattatgagaaatgaaaggggttttatggaaaagaaaaggtgtttacagatttattgtaatgccgtttttagatacgaagaaacctctgtttagcaaaaacgacatgcagtctgttaagacttgcctagtttgtttttgggatgtcttgctgtttttaattttaaaaagaaatatattctccggctacaacagtagctgggtctctcta

SEQ ID NO: 44957 - protein, 798 aa, Arabidopsis thaliana
  peptide (1)..(798): Ceres Seq. ID no. 13591499
SLSNDSFVRILIFFFFSLLLYLNTLSSSPWIQRETQHTISIMSSSFLSSTAFFLLLCLGFCHVSSSSSDQGTYIVHMAKSQMPSSFDLHSNWYDSSLRSISDSAELLYTYENAIHGFSTRLTQEEADSLMTQPGVISVLPEHRYELHTTRTPLFLGLDEHTADLFPEAGSYSDVVVGVLDTGVWPESKSYSDEGFGPIPSSWKGGCEAGTNFTASLCNRKLIGARFFARGYESTMGPIDESKESRSPRDDDGHGTHTSSTAAGSVVEGASLLGYASGTARGMAPRARVAVYKVCWLGGCFSSDILAAIDKAIADNVNVLSMSLGGGMSDYYRDGVAIGAFAAMERGILVSCSAGNAGPSSSSLSNVAPWITTVGAGTLDRDFPALAILGNGKNFTGVSLFKGEALPDKLLPFIYAGNASNATNGNLCMTGTLIPEKVKGKIVMCDRGINARVQKGDVVKAAGGVGMILANTAANGEELVADAHLLPATTVGEKAGDIIRHYVTTDPNPTASISILGTVVGVKPSPVVAAFSSRGPNSITPNILKPDLIAPGVNILAAWTGAAGPTGLASDSRRVEFNIISGTSMSCPHVSGLAALLKSVHPEWSPAAIRSALMTTAYKTYKDGKPLLDIATGKPSTPFDHGAGHVSPTTATNPGLIYDLTTEDYLGFLCALNYTSPQIRSVSRRNYTCDPSKSYSVADLNYPSFAVNVDGVGAYKYTRTVTSVGGAGTYSVKVTSETTGVKISVEPAVLNFKEANEKKSYTVTFTVDSSKPSGSNSFGSIEWSDGKHVVGSPVAISWT

SEQ ID NO: 44958 - protein, 757 aa, Arabidopsis thaliana
  peptide (1)..(757): Ceres Seq. ID no. 13591500
MSSSFLSSTAFFLLLCLGFCHVSSSSSDQGTYIVHMAKSQMPSSFDLHSNWYDSSLRSISDSAELLYTYENAIHGFSTRLTQEEADSLMTQPGVISVLPEHRYELHTTRTPLFLGLDEHTADLFPEAGSYSDVVVGVLDTGVWPESKSYSDEGFGPIPSSWKGGCEAGTNFTASLCNRKLIGARFFARGYESTMGPIDESKESRSPRDDDGHGTHTSSTAAGSVVEGASLLGYASGTARGMAPRARVAVYKVCWLGGCFSSDILAAIDKAIADNVNVLSMSLGGGMSDYYRDGVAIGAFAAMERGILVSCSAGNAGPSSSSLSNVAPWITTVGAGTLDRDFPALAILGNGKNFTGVSLFKGEALPDKLLPFIYAGNASNATNGNLCMTGTLIPEKVKGKIVMCDRGINARVQKGDVVKAAGGVGMILANTAANGEELVADAHLLPATTVGEKAGDIIRHYVTTDPNPTASISILGTVVGVKPSPVVAAFSSRGPNSITPNILKPDLIAPGVNILAAWTGAAGPTGLASDSRRVEFNIISGTSMSCPHVSGLAALLKSVHPEWSPAAIRSALMTTAYKTYKDGKPLLDIATGKPSTPFDHGAGHVSPTTATNPGLIYDLTTEDYLGFLCALNYTSPQIRSVSRRNYTCDPSKSYSVADLNYPSFAVNVDGVGAYKYTRTVTSVGGAGTYSVKVTSETTGVKISVEPAVLNFKEANEKKSYTVTFTVDSSKPSGSNSFGSIEWSDGKHVVGSPVAISWT

SEQ ID NO: 44959 - protein, 722 aa, Arabidopsis thaliana
  peptide (1)..(722): Ceres Seq. ID no. 13591501
MAKSQMPSSFDLHSNWYDSSLRSISDSAELLYTYENAIHGFSTRLTQEEADSLMTQPGVISVLPEHRYELHTTRTPLFLGLDEHTADLFPEAGSYSDVVVGVLDTGVWPESKSYSDEGFGPIPSSWKGGCEAGTNFTASLCNRKLIGARFFARGYESTMGPIDESKESRSPRDDDGHGTHTSSTAAGSVVEGASLLGYASGTARGMAPRARVAVYKVCWLGGCFSSDILAAIDKAIADNVNVLSMSLGGGMSDYYRDGVAIGAFAAMERGILVSCSAGNAGPSSSSLSNVAPWITTVGAGTLDRDFPALAILGNGKNFTGVSLFKGEALPDKLLPFIYAGNASNATNGNLCMTGTLIPEKVKGKIVMCDRGINARVQKGDVVKAAGGVGMILANTAANGEELVADAHLLPATTVGEKAGDIIRHYVTTDPNPTASISILGTVVGVKPSPVVAAFSSRGPNSITPNILKPDLIAPGVNILAAWTGAAGPTGLASDSRRVEFNIISGTSMSCPHVSGLAALLKSVHPEWSPAAIRSALMTTAYKTYKDGKPLLDIATGKPSTPFDHGAGHVSPTTATNPGLIYDLTTEDYLGFLCALNYTSPQIRSVSRRNYTCDPSKSYSVADLNYPSFAVNVDGVGAYKYTRTVTSVGGAGTYSVKVTSETTGVKISVEPAVLNFKEANEKKSYTVTFTVDSSKPSGSNSFGSIEWSDGKHVVGSPVAISWT

SEQ ID NO: 44960 - DNA, 2809 bp, Arabidopsis thaliana
  misc_feature (1)..(2809): Ceres Seq. ID no. 12559536
  misc_feature (1)..(2809): Ortholog of  Ceres SEQ ID NO 15176051 as cited in SEQ ID NO 53434
  misc_feature (1)..(2809): Ortholog of  Ceres SEQ ID NO 15170306 as cited in SEQ ID NO 58219
  misc_feature (1)..(2809): Ortholog of  Ceres SEQ ID NO 12465091 as cited in SEQ ID NO 65947
aagccttatagaagagaaaaaaaatatgtattgtagagagtccttgtcgagtctccagactttgaacgtagcaaagagtctcagctctttgttccctaaacaatcagctctcatcaacccgatctccgctggacgtcgaaacaacctgcctcgtccaaacctcagaagacgatgtaaggtcaccgcttcacgggctaatattgaacaagaaggtaacacagtgaaagaacccattcagaatattaaagtaaagggatacataacggcccaagaagagtttctggagggcataacttggtcgagaggtctcgatgacattgctgatatccgcggcagatcattgctcgtcgagcttattagcgccaagactgaccagcggattacggtagaagactacgcacaacgtgtatgggccgaagcccctgatgagaagtacgagtgcgagtttgagatgcctgaagactttggaccagtgggagccatcaagattcagaaccaataccatcgacagttgttcctcaagggggtagagcttaaattacccggcgggtcgataacgtttacatgtgagtcatgggtggcccccaagtccgttgacccaaccaagcggatattcttctccgacaagtcctacttgccttcccaaacaccagagcctcttaaaaagtatcgaaaagaggagctcgagaccttacaaggcaagaaccgcgaggaagttggtgaatttaccaagtttgagcgcatttacgactatgatgtgtacaacgatgttggtgaccctgacaatgatcctgaacttgctcgtccggtaattggaggcctcacacatccatatccaaggcgttgcaagaccggtcgaaaaccttgtgagactgacccctcttcagagcaacgctacgggggagagttctatgtaccaagagacgaggagttctctacagccaagggcacttcattcacaggcaaggccgtactggcagctcttccctccatcttccctcagatcgagtctgttctattgagtccccaagaaccttttccacacttcaaggccatacaaaatctctttgaagaaggcattcagcttcccaaggatgctggcctcttacctctgctccccagaatcatcaaagctcttggcgaagctcaagatgatattctccagtttgatgccccagttctcattaacagggatagattttcatggttacgagacgacgagtttgctcgccagacacttgccggccttaatccttatagcattcagctagttgaagagtggccgttaataagcaaactagacccggccgtttatggtgatcccacctcactcattacttgggaaattgtggaaagagaagttaaaggaaacatgacagttgatgaggctctaaagaataagagattgttcgtgttggattatcatgatttgcttctaccatatgtgaacaaagtgagagagttaaacaataccacattatatgcttctagaacactattcttcctcagcgatgatagcacattgaggcctgttgccattgagttgacttgtccaccaaatatcaacaagccccaatggaaacaagtcttcacgccaggctatgatgctacgtcatgctggctatggaatcttgctaagactcatgctatctctcatgacgccggttatcatcagcttatttcccattggttgaggactcatgcctgtacggagccatacataatagcggcaaatagacaactaagtgccatgcatcccatttataggcttttgcatcctcatttccgctacaccatggaaatcaacgctcgtgcacgccaaagtcttgtcaacggaggtggaatcattgagacttgtttctggcccgggaagtatgcattagagctaagttcagccgtctatggtaaactatggaggtttgaccaggaaggcttacccgcggatctcatcaaaagggggttggctgaggaagataagaccgcagaacatggagtacgtctgacgataccagactatccatttgcaaatgatggtctaatattgtgggatgcaattaaagaatgggtgacagactatgtgaaacattactatcctgatgaagaactgatcacatcggacgaggaactccaaggatggtggagtgaagtgcggaacataggccacggagacaagaaagacgaaccttggtggcctgtcctcaaaacacaagatgacttgattggtgtggtaactacgattgcatgggtcacctcaggtcaccatgcagctgtaaactttggacagtacggatatggaggatactttcccaaccgaccaacgacaacaaggataagaatgccaacggaagatccgacagatgaagccttaaaagagttctatgagtcgccagaaaaagtgttgcttaagacatacccatcgcagaaacaggcgaccctagtgatggtcacgttggatcttttatcaacacattcacctgacgaagagtacattggagaacaacaagaagcatcttgggccaatgagcctgttatcaatgctgcatttgaaagattcaaaggcaagctccaatatctagaaggagtgatagatgagagaaacgtgaacattactctaaagaatagagctggagctggtgttgttaagtatgagcttttgaagcctacctctgagcatggtgttaccggaatgggtgttccttatagtatttctatttgatctatgcattttctttctcaaaaatgctttcattaattttctgtatctctgtcttcttgataaaatgaataaaacaaatgctcctttgtctcc

SEQ ID NO: 44961 - protein, 904 aa, Arabidopsis thaliana
  peptide (1)..(904): Ceres Seq. ID no. 12559537
SLIEEKKNMYCRESLSSLQTLNVAKSLSSLFPKQSALINPISAGRRNNLPRPNLRRRCKVTASRANIEQEGNTVKEPIQNIKVKGYITAQEEFLEGITWSRGLDDIADIRGRSLLVELISAKTDQRITVEDYAQRVWAEAPDEKYECEFEMPEDFGPVGAIKIQNQYHRQLFLKGVELKLPGGSITFTCESWVAPKSVDPTKRIFFSDKSYLPSQTPEPLKKYRKEELETLQGKNREEVGEFTKFERIYDYDVYNDVGDPDNDPELARPVIGGLTHPYPRRCKTGRKPCETDPSSEQRYGGEFYVPRDEEFSTAKGTSFTGKAVLAALPSIFPQIESVLLSPQEPFPHFKAIQNLFEEGIQLPKDAGLLPLLPRIIKALGEAQDDILQFDAPVLINRDRFSWLRDDEFARQTLAGLNPYSIQLVEEWPLISKLDPAVYGDPTSLITWEIVEREVKGNMTVDEALKNKRLFVLDYHDLLLPYVNKVRELNNTTLYASRTLFFLSDDSTLRPVAIELTCPPNINKPQWKQVFTPGYDATSCWLWNLAKTHAISHDAGYHQLISHWLRTHACTEPYIIAANRQLSAMHPIYRLLHPHFRYTMEINARARQSLVNGGGIIETCFWPGKYALELSSAVYGKLWRFDQEGLPADLIKRGLAEEDKTAEHGVRLTIPDYPFANDGLILWDAIKEWVTDYVKHYYPDEELITSDEELQGWWSEVRNIGHGDKKDEPWWPVLKTQDDLIGVVTTIAWVTSGHHAAVNFGQYGYGGYFPNRPTTTRIRMPTEDPTDEALKEFYESPEKVLLKTYPSQKQATLVMVTLDLLSTHSPDEEYIGEQQEASWANEPVINAAFERFKGKLQYLEGVIDERNVNITLKNRAGAGVVKYELLKPTSEHGVTGMGVPYSISI

SEQ ID NO: 44962 - protein, 896 aa, Arabidopsis thaliana
  peptide (1)..(896): Ceres Seq. ID no. 12559538
MYCRESLSSLQTLNVAKSLSSLFPKQSALINPISAGRRNNLPRPNLRRRCKVTASRANIEQEGNTVKEPIQNIKVKGYITAQEEFLEGITWSRGLDDIADIRGRSLLVELISAKTDQRITVEDYAQRVWAEAPDEKYECEFEMPEDFGPVGAIKIQNQYHRQLFLKGVELKLPGGSITFTCESWVAPKSVDPTKRIFFSDKSYLPSQTPEPLKKYRKEELETLQGKNREEVGEFTKFERIYDYDVYNDVGDPDNDPELARPVIGGLTHPYPRRCKTGRKPCETDPSSEQRYGGEFYVPRDEEFSTAKGTSFTGKAVLAALPSIFPQIESVLLSPQEPFPHFKAIQNLFEEGIQLPKDAGLLPLLPRIIKALGEAQDDILQFDAPVLINRDRFSWLRDDEFARQTLAGLNPYSIQLVEEWPLISKLDPAVYGDPTSLITWEIVEREVKGNMTVDEALKNKRLFVLDYHDLLLPYVNKVRELNNTTLYASRTLFFLSDDSTLRPVAIELTCPPNINKPQWKQVFTPGYDATSCWLWNLAKTHAISHDAGYHQLISHWLRTHACTEPYIIAANRQLSAMHPIYRLLHPHFRYTMEINARARQSLVNGGGIIETCFWPGKYALELSSAVYGKLWRFDQEGLPADLIKRGLAEEDKTAEHGVRLTIPDYPFANDGLILWDAIKEWVTDYVKHYYPDEELITSDEELQGWWSEVRNIGHGDKKDEPWWPVLKTQDDLIGVVTTIAWVTSGHHAAVNFGQYGYGGYFPNRPTTTRIRMPTEDPTDEALKEFYESPEKVLLKTYPSQKQATLVMVTLDLLSTHSPDEEYIGEQQEASWANEPVINAAFERFKGKLQYLEGVIDERNVNITLKNRAGAGVVKYELLKPTSEHGVTGMGVPYSISI

SEQ ID NO: 44963 - protein, 754 aa, Arabidopsis thaliana
  peptide (1)..(754): Ceres Seq. ID no. 12559539
MPEDFGPVGAIKIQNQYHRQLFLKGVELKLPGGSITFTCESWVAPKSVDPTKRIFFSDKSYLPSQTPEPLKKYRKEELETLQGKNREEVGEFTKFERIYDYDVYNDVGDPDNDPELARPVIGGLTHPYPRRCKTGRKPCETDPSSEQRYGGEFYVPRDEEFSTAKGTSFTGKAVLAALPSIFPQIESVLLSPQEPFPHFKAIQNLFEEGIQLPKDAGLLPLLPRIIKALGEAQDDILQFDAPVLINRDRFSWLRDDEFARQTLAGLNPYSIQLVEEWPLISKLDPAVYGDPTSLITWEIVEREVKGNMTVDEALKNKRLFVLDYHDLLLPYVNKVRELNNTTLYASRTLFFLSDDSTLRPVAIELTCPPNINKPQWKQVFTPGYDATSCWLWNLAKTHAISHDAGYHQLISHWLRTHACTEPYIIAANRQLSAMHPIYRLLHPHFRYTMEINARARQSLVNGGGIIETCFWPGKYALELSSAVYGKLWRFDQEGLPADLIKRGLAEEDKTAEHGVRLTIPDYPFANDGLILWDAIKEWVTDYVKHYYPDEELITSDEELQGWWSEVRNIGHGDKKDEPWWPVLKTQDDLIGVVTTIAWVTSGHHAAVNFGQYGYGGYFPNRPTTTRIRMPTEDPTDEALKEFYESPEKVLLKTYPSQKQATLVMVTLDLLSTHSPDEEYIGEQQEASWANEPVINAAFERFKGKLQYLEGVIDERNVNITLKNRAGAGVVKYELLKPTSEHGVTGMGVPYSISI

SEQ ID NO: 44964 - DNA, 2028 bp, Arabidopsis thaliana; identical to SEQ ID NO: 37075
  misc_feature (1)..(2028): Ceres Seq. ID no. 12559842
  misc_feature (1)..(2028): Ortholog of  Ceres SEQ ID NO 14313670 as cited in SEQ ID NO 54491

SEQ ID NO: 44965 - protein, 589 aa, Arabidopsis thaliana; identical to SEQ ID NO: 37076
  peptide (1)..(589): Ceres Seq. ID no. 12559843

SEQ ID NO: 44966 - protein, 578 aa, Arabidopsis thaliana; identical to SEQ ID NO: 37077
  peptide (1)..(578): Ceres Seq. ID no. 12559844

SEQ ID NO: 44967 - protein, 463 aa, Arabidopsis thaliana; identical to SEQ ID NO: 37078
  peptide (1)..(463): Ceres Seq. ID no. 12559845

SEQ ID NO: 44968 - DNA, 2486 bp, Arabidopsis thaliana
  misc_feature (1)..(2486): Ceres Seq. ID no. 12559846
  misc_feature (1)..(2486): Ortholog of  Ceres SEQ ID NO 13600595 as cited in SEQ ID NO 629
  misc_feature (1)..(2486): Ortholog of  Ceres SEQ ID NO 13593379 as cited in SEQ ID NO 20573
aaggaacatcaagttaggaaattgattggtatacttcaacttcttcttgttgcagtctgtctctgatgtggtgattgtatccgtcaggtttctatgatacagtatgcaaacccggcattagttcaccggaaccgatgtctcccggtttaggagttgaattttgctaaaaccggctaaaaagtgcgcaatttggccaagcgtactattgcagaagagggacgatggcgatgacaagctggccatcaacgggaagacaaagaagacatcaattggcttccatgttgctcctggttcttgtagttgtcggaatctatgttcctgtcttcgctcttctcccttcactgtcatatactcctcagtctctaccttctgctatacctcaggacgagaagatgatatctcgcaagttttatatcaaggatgacaatttctggaaagatgggaatcgttttcagatcattggtggtgatttgcattactttcgtgttcttccagagtactgggaggatcggcttttaagagccaatgctttaggcttgaatactattcaagtatacgttccttggaatctgcatgaaccaaagcctgggaagatggtttttgagggtattggtgatcttgtctcctttctcaagctgtgtgagaaactagattttctggttatgctacgtgctggaccttatatctgtggagaatgggatttgggaggctttcctgcttggttacttgctgtgaaaccacgtctccaactaaggacatcagatcctgtatatcttaagttggttgaaagatggtgggatgttctgttaccgaaggtatttcctctgctttacagcaacgggggtcctgttataatggttcagattgaaaatgaatatggttcatatggaaatgacaaagcttatcttcgtaagctagttagtatggctaggggacacctgggggatgacattattgtgtacacaacagatggagggacaaaagaaactcttgataaaggaactgtccctgtagctgatgtctactcagctgttgatttctctaccggtgatgatccttggccaatatttaaattgcaaaagaagtttaatgctccaggaagatcacctccactttcctcggagttctacactggttggctcacgcattggggtgagaaaattacaaaaacagatgccgaatttacggcagcttctcttgaaaaaattctgtctcgaaatggttctgctgtgctctatatggtgcatggaggaacaaactttggtttctacaatggcgcaaatactggctctgaagaatctgactataaaccagatctgacatcttatgactatgatgctcccattaaggagtctggtgacatagataatccaaaattccaagctcttcagagagtgattaagaagtacaatgcttcaccacaccccattagcccatccaataagcaacggaaagcttatggctctatcaagatgcagatgacaacatcactgtttgatttagttcgtatgacagatcctgcagatgtgatcacctccgccaacccaatttcaatggaatctgttggacagatgttcggatttcttttatatgaatcttcatacatcgcaaaaaagagtgggaatacactaagaatacccaaggttcatgacagagctcaagtgtttgtttcatgtctttcccaagatgttgatgtgggagtactgagatacattggtactactgagagatggaacaaccaacctatttctcttccaactattgagtgtaccacaaacactagcttatttattctggttgaaaacatgggtcgtgtaaattatgggccatatatctttgatgacaagggtattttgtcttcggtttatctagatggtcaaattctccatggatggaagatgataccaattccttttcacaatctaaatcaagagccaaatctcactttcgagatgcaacataccaaaaacagaagtaaaaagttcgagcttactaatgatgttggtcgaaaggaacccgctctgtttgctggtgaattctctatcaacagtgaagaagaaatcaaagacacatatctatcattcaacggttggggtaaaggagttgcttttgtcaatgaattcaacattggaagatattggccgtctgttggaccacagtgcaacctctatgttcctgcgccacttcttaagcgtggcaaaaacactttggtggtattcgagttggaatctccgcatctcgagctttcgctggaggcagtggatcaccaagacttcacatgcggttcaaatgtttccaaagttaatcagttgtagattttcagttcacggatacaaccaaaagttccagtcgtgaacaatcagcccgctataaatcatatgttggatgataaagaatttaaagttaaccaaaagatttttgtgtgtccaaaaacatgaaactatacattaaaaagtcagacccgataaaaaaagattttatggtcg

SEQ ID NO: 44969 - protein, 697 aa, Arabidopsis thaliana
  peptide (1)..(697): Ceres Seq. ID no. 12559847
MAMTSWPSTGRQRRHQLASMLLLVLVVVGIYVPVFALLPSLSYTPQSLPSAIPQDEKMISRKFYIKDDNFWKDGNRFQIIGGDLHYFRVLPEYWEDRLLRANALGLNTIQVYVPWNLHEPKPGKMVFEGIGDLVSFLKLCEKLDFLVMLRAGPYICGEWDLGGFPAWLLAVKPRLQLRTSDPVYLKLVERWWDVLLPKVFPLLYSNGGPVIMVQIENEYGSYGNDKAYLRKLVSMARGHLGDDIIVYTTDGGTKETLDKGTVPVADVYSAVDFSTGDDPWPIFKLQKKFNAPGRSPPLSSEFYTGWLTHWGEKITKTDAEFTAASLEKILSRNGSAVLYMVHGGTNFGFYNGANTGSEESDYKPDLTSYDYDAPIKESGDIDNPKFQALQRVIKKYNASPHPISPSNKQRKAYGSIKMQMTTSLFDLVRMTDPADVITSANPISMESVGQMFGFLLYESSYIAKKSGNTLRIPKVHDRAQVFVSCLSQDVDVGVLRYIGTTERWNNQPISLPTIECTTNTSLFILVENMGRVNYGPYIFDDKGILSSVYLDGQILHGWKMIPIPFHNLNQEPNLTFEMQHTKNRSKKFELTNDVGRKEPALFAGEFSINSEEEIKDTYLSFNGWGKGVAFVNEFNIGRYWPSVGPQCNLYVPAPLLKRGKNTLVVFELESPHLELSLEAVDHQDFTCGSNVSKVNQL

SEQ ID NO: 44970 - protein, 695 aa, Arabidopsis thaliana
  peptide (1)..(695): Ceres Seq. ID no. 12559848
MTSWPSTGRQRRHQLASMLLLVLVVVGIYVPVFALLPSLSYTPQSLPSAIPQDEKMISRKFYIKDDNFWKDGNRFQIIGGDLHYFRVLPEYWEDRLLRANALGLNTIQVYVPWNLHEPKPGKMVFEGIGDLVSFLKLCEKLDFLVMLRAGPYICGEWDLGGFPAWLLAVKPRLQLRTSDPVYLKLVERWWDVLLPKVFPLLYSNGGPVIMVQIENEYGSYGNDKAYLRKLVSMARGHLGDDIIVYTTDGGTKETLDKGTVPVADVYSAVDFSTGDDPWPIFKLQKKFNAPGRSPPLSSEFYTGWLTHWGEKITKTDAEFTAASLEKILSRNGSAVLYMVHGGTNFGFYNGANTGSEESDYKPDLTSYDYDAPIKESGDIDNPKFQALQRVIKKYNASPHPISPSNKQRKAYGSIKMQMTTSLFDLVRMTDPADVITSANPISMESVGQMFGFLLYESSYIAKKSGNTLRIPKVHDRAQVFVSCLSQDVDVGVLRYIGTTERWNNQPISLPTIECTTNTSLFILVENMGRVNYGPYIFDDKGILSSVYLDGQILHGWKMIPIPFHNLNQEPNLTFEMQHTKNRSKKFELTNDVGRKEPALFAGEFSINSEEEIKDTYLSFNGWGKGVAFVNEFNIGRYWPSVGPQCNLYVPAPLLKRGKNTLVVFELESPHLELSLEAVDHQDFTCGSNVSKVNQL

SEQ ID NO: 44971 - protein, 678 aa, Arabidopsis thaliana
  peptide (1)..(678): Ceres Seq. ID no. 12559849
MLLLVLVVVGIYVPVFALLPSLSYTPQSLPSAIPQDEKMISRKFYIKDDNFWKDGNRFQIIGGDLHYFRVLPEYWEDRLLRANALGLNTIQVYVPWNLHEPKPGKMVFEGIGDLVSFLKLCEKLDFLVMLRAGPYICGEWDLGGFPAWLLAVKPRLQLRTSDPVYLKLVERWWDVLLPKVFPLLYSNGGPVIMVQIENEYGSYGNDKAYLRKLVSMARGHLGDDIIVYTTDGGTKETLDKGTVPVADVYSAVDFSTGDDPWPIFKLQKKFNAPGRSPPLSSEFYTGWLTHWGEKITKTDAEFTAASLEKILSRNGSAVLYMVHGGTNFGFYNGANTGSEESDYKPDLTSYDYDAPIKESGDIDNPKFQALQRVIKKYNASPHPISPSNKQRKAYGSIKMQMTTSLFDLVRMTDPADVITSANPISMESVGQMFGFLLYESSYIAKKSGNTLRIPKVHDRAQVFVSCLSQDVDVGVLRYIGTTERWNNQPISLPTIECTTNTSLFILVENMGRVNYGPYIFDDKGILSSVYLDGQILHGWKMIPIPFHNLNQEPNLTFEMQHTKNRSKKFELTNDVGRKEPALFAGEFSINSEEEIKDTYLSFNGWGKGVAFVNEFNIGRYWPSVGPQCNLYVPAPLLKRGKNTLVVFELESPHLELSLEAVDHQDFTCGSNVSKVNQL

SEQ ID NO: 44972 - DNA, 2769 bp, Arabidopsis thaliana
  misc_feature (1)..(2769): Ceres Seq. ID no. 13575705
  misc_feature (1)..(2769): Ortholog of  Ceres SEQ ID NO 13654928 as cited in SEQ ID NO 62546
atgaaaaaaaattggaaggatgaaattaatcgaaagcagctcatccgattcccctgaggcgattatggtgtctcctccttctcactctcgctcttagtagtagtctttcttctccgatcgccgactaacctccggagctttcttcggcggtctctcctctctgttttctacttgaggtttctctcttctcttactttttttattctttgtgcatatctctcttctcttactttactcaccaaatttctaggaatactttttctcctgagatttgggcttttaatttagcttaattcttctgttaagtagaaatatatcatggcgaatctatgaaattatttcttctgttaagtagacattgaaatttgttacaatggcgaatcgtgttttttttttggtctgtctccattttttggtattgtctctaagaaaataagacgtttgtggtatttagtttattaggcgaattggatttgttgaagcatggataacttgtatcttaatcccttggggttagttagatgaattgaatggtcgagggaccattttgctttttcatgggaaaccctggctgaggggaccgtgattgggatcgaaacctaacttgctgtctcattttgttagttcaatctttattgctggagatagatccctttcattggcttagcttggtgccgttttctttgacatatacttaattcaatatgtgtgtatctgtagactcaatagtaagctttagattaaccctttatttcatttaaaccttagctaagaactttctgcaagtacaaagaaggaatgggtagggaagggtttgcaattatgatggctatagggttttaattgacttgttgaagtcgtgttctttaacaagttgttgattttctgggcaatctgatttgaggagtgtgggaccagttggaataaatgccacttagtttttgtgtgatggagagcacaagagggagctaagaaaagtaataccctttctcttgccctttttgttggtctgggtgaaacatagcaaggtttctcttgctgaggttattgataaacgggtgagttaaataaaaacgttgatcagcagtgtgtggtgcttggaattcataaggtttttcttctttcttatgcttttggtagttaatggtattgtctattaggtatctgtttgggttgccagcgttatttataggcttgacaagttttctcttatttttgatgtttggctttcatttacaatcactagttctgcaaacttatggttgtttcagtttttgttactctggcttttggtgataggtctatgaaatcaacccacatcttgaatggactgcaacatggtatcttcgttcccgtgggactgggagaatttgatcatgtccaatcagtcgaagactgaaaatgaaaaaaaacagcaatctactgagtgggaatttgaaaaaggtgaaggaattgaatctatagttccagatttcttaggctttgagaaagtcagtagtggctctgctactagtttctggcacactgccgtatcaaaaagctcgcagtcgacctctatcaactcatcatctcccgaggacaaacgatgcaatcttgcatcacaaagttcccctggagattcttccagcaacatagattttctccaggtgaaaccatccacagctctcgaggtacctattgcctcagctgaatcagatctttgtttgaaactaggaaagcggacatactctgaagaattttggggtaggaacaataatgacctttcagcggtttctatgaatttgttgactccatctgttgttgctcggaagaaaaccaaatcgtgtggtcagagcatgcaagttccgcgttgccaaattgatggctgtgagctggatctctcatcttctaaggattatcatcgcaagcatagagtctgcgaaacgcattcaaagtgcccaaaagttgttgtgagtggcctggaacgtcgtttctgccaacagtgtagcaggttccatgctgtctcagaatttgatgaaaagaaacgaagctgccgcaaacgtctttctcatcataatgcaaggcgtcgcaagccacaaggagtatttccactgaattcagagagggtgttcgatcgaagacagcatacaagtatgttgtggaatgggttgtcccttaacacgagatctgaagaaaagtatacatggggtaccacttatgagacaaagcctacacagatggaaagcggctttactctgagcttccagagaggtaatggctctgaggaccaactgtttactggtagcaccctctctttctctgcgtttcaaacatctggtgggttctcagcagggaaatccaacattcaacttccagacaaaggtgtgggagaatgctcaggaggcctccatgaatctcatgatttctacagtgctctctctcttctgtcaactacttcggattcacaagggatcaaacacactcccgtggccgaaccaccgccaatatttggcactttccctagtcatttcatctgaaagagttaaaaaatgcgaagtcactccataaaaagtcgggttgcatcatccgatggagtttgacagtttgttttcaaataaaataaaaatgtgcaacatccattgctcaagctaaaccagtcactcggttagctcagcttttcttatacatttccaaacatattgtcaatttccttctggattctgttggtatgacaactttgttactctgtcaaacatgtctacgactattttaaaaccatttcagagatta

SEQ ID NO: 44973 - protein, 396 aa, Arabidopsis thaliana
  peptide (1)..(396): Ceres Seq. ID no. 13575706
MDCNMVSSFPWDWENLIMSNQSKTENEKKQQSTEWEFEKGEGIESIVPDFLGFEKVSSGSATSFWHTAVSKSSQSTSINSSSPEDKRCNLASQSSPGDSSSNIDFLQVKPSTALEVPIASAESDLCLKLGKRTYSEEFWGRNNNDLSAVSMNLLTPSVVARKKTKSCGQSMQVPRCQIDGCELDLSSSKDYHRKHRVCETHSKCPKVVVSGLERRFCQQCSRFHAVSEFDEKKRSCRKRLSHHNARRRKPQGVFPLNSERVFDRRQHTSMLWNGLSLNTRSEEKYTWGTTYETKPTQMESGFTLSFQRGNGSEDQLFTGSTLSFSAFQTSGGFSAGKSNIQLPDKGVGECSGGLHESHDFYSALSLLSTTSDSQGIKHTPVAEPPPIFGTFPSHFI

SEQ ID NO: 44974 - protein, 392 aa, Arabidopsis thaliana
  peptide (1)..(392): Ceres Seq. ID no. 13575707
MVSSFPWDWENLIMSNQSKTENEKKQQSTEWEFEKGEGIESIVPDFLGFEKVSSGSATSFWHTAVSKSSQSTSINSSSPEDKRCNLASQSSPGDSSSNIDFLQVKPSTALEVPIASAESDLCLKLGKRTYSEEFWGRNNNDLSAVSMNLLTPSVVARKKTKSCGQSMQVPRCQIDGCELDLSSSKDYHRKHRVCETHSKCPKVVVSGLERRFCQQCSRFHAVSEFDEKKRSCRKRLSHHNARRRKPQGVFPLNSERVFDRRQHTSMLWNGLSLNTRSEEKYTWGTTYETKPTQMESGFTLSFQRGNGSEDQLFTGSTLSFSAFQTSGGFSAGKSNIQLPDKGVGECSGGLHESHDFYSALSLLSTTSDSQGIKHTPVAEPPPIFGTFPSHFI

SEQ ID NO: 44975 - protein, 379 aa, Arabidopsis thaliana
  peptide (1)..(379): Ceres Seq. ID no. 13575708
MSNQSKTENEKKQQSTEWEFEKGEGIESIVPDFLGFEKVSSGSATSFWHTAVSKSSQSTSINSSSPEDKRCNLASQSSPGDSSSNIDFLQVKPSTALEVPIASAESDLCLKLGKRTYSEEFWGRNNNDLSAVSMNLLTPSVVARKKTKSCGQSMQVPRCQIDGCELDLSSSKDYHRKHRVCETHSKCPKVVVSGLERRFCQQCSRFHAVSEFDEKKRSCRKRLSHHNARRRKPQGVFPLNSERVFDRRQHTSMLWNGLSLNTRSEEKYTWGTTYETKPTQMESGFTLSFQRGNGSEDQLFTGSTLSFSAFQTSGGFSAGKSNIQLPDKGVGECSGGLHESHDFYSALSLLSTTSDSQGIKHTPVAEPPPIFGTFPSHFI

SEQ ID NO: 44976 - DNA, 2167 bp, Arabidopsis thaliana
  misc_feature (1)..(2167): Ceres Seq. ID no. 12600273
  misc_feature (1)..(2167): Ortholog of  Ceres SEQ ID NO 14309715 as cited in SEQ ID NO 55353
  misc_feature (1)..(2167): Ortholog of  Ceres SEQ ID NO 13595521 as cited in SEQ ID NO 59840
ttaaaccacatttctccttctggctctctctcttcctaagtttcctctctctttagaactgtagagagagaaaagcctccatttttctcaaggcaatctctctctctctgcctcatctcataaacccattacaccaaaacctcatcgtagagagagaaacacaccaaccattgttacactctaagagaagagaagagagaaggaaaaatggacggtgtatcaccaaagtttgtgttgccggagacattcgacggcgtgaggatggagatcacaggccaactaggcatgatctgggagcttgtaaaagcaccagtgattgtccctcttcttcaattagctgtttacatctgtttgcttatgtctgtcatgcttttatgtgagagggtttacatgggaatcgtcatcgtcctcgtcaaactcttctggaaaaaaccagacaaacgttacaagttcgagcccattcacgatgatgaagagcttggtagctccaatttccccgtcgtcctcgtacaaatccccatgttcaacgaacgagaggtttataagctatcaataggagcggcgtgtggactttcctggccgtccgatcgtctcgtgattcaagtgttagatgactctacagatcctactgttaagcaaatggtggaagtggagtgtcaaagatgggcaagtaaaggaatcaatattaggtatcaaataagagagaatagagttggttacaaagccggtgctttaaaggaaggactcaaacgtagttatgtcaagcattgcgagtatgttgtcatcttcgacgccgattttcagcccgaacctgattttcttcgccgtagcattcctttcctcatgcacaatcccaacattgccttggttcaggctcgatggcggttcgtaaattctgatgagtgcttattgacgagaatgcaagaaatgtcattggattaccatttcactgttgagcaagaagtgggttcatcaacacatgcttttttcggcttcaacggaaccgccggaatatggagaatagcggcgataaatgaagctggtgggtggaaagatcggaccaccgtggaagatatggatctcgccgtccgagcaagtcttcgcggctggaaatttctctacctcggtgaccttcaggtgaaaagtgagcttccaagtacttttagagccttccgttttcagcaacatagatggtcttgtggacctgcaaatctctttaggaaaatggttatggagatcgtaagaaacaagaaagtgagattctggaagaaagtgtacgtgatatacagcttcttctttgtgaggaaaatcattgcacattgggtcacattttgtttctactgcgttgttcttcctctcacaattctcgtcccggaggttaaagttccgatttggggttcggtttatatcccatccatcatcactatcctcaattccgtcggtactccaaggtcaattcatctgctgttctattggattctattcgagaatgtgatgtcgctgcaccggacaaaggccactctcattggtctgtttgaggcaggaagggctaacgagtgggtagtgactgctaagcttggaagcggtcagagcgctaaaggaaacactaaagggatcaaaaggttcccaagaatcttcaaattgcctgatcgattgaatacattggagcttggatttgcggctttcttgttcgtgtgcggatgctatgactttgtgcacgggaagaacaattacttcatctacctgtttcttcagacaatgtctttcttcatcagtgggctgggctggatcgggacttatgtcccgagttagtagttgtgttgtttcagagagaaaagagaatgttattaattttcttgagaaataaagacaattttcattgaaatgacaaaggaaaattgataggggagatagagacgtaccggtaacaacaagtaggaagaaaggagaagacttttatcaaagaccaggaaagaggagaagctccaagggttcttttgatttatttttaatttttctgtgttttatttatatagctatgggatttgtgattcagttgttgtgagattttaattttcgttctttgttttttattttggtttttgggtattttttcgttttgaaagtgttagtctttttgttttgtttttatgatttagaattcaag

SEQ ID NO: 44977 - protein, 534 aa, Arabidopsis thaliana
  peptide (1)..(534): Ceres Seq. ID no. 12600274
MDGVSPKFVLPETFDGVRMEITGQLGMIWELVKAPVIVPLLQLAVYICLLMSVMLLCERVYMGIVIVLVKLFWKKPDKRYKFEPIHDDEELGSSNFPVVLVQIPMFNEREVYKLSIGAACGLSWPSDRLVIQVLDDSTDPTVKQMVEVECQRWASKGINIRYQIRENRVGYKAGALKEGLKRSYVKHCEYVVIFDADFQPEPDFLRRSIPFLMHNPNIALVQARWRFVNSDECLLTRMQEMSLDYHFTVEQEVGSSTHAFFGFNGTAGIWRIAAINEAGGWKDRTTVEDMDLAVRASLRGWKFLYLGDLQVKSELPSTFRAFRFQQHRWSCGPANLFRKMVMEIVRNKKVRFWKKVYVIYSFFFVRKIIAHWVTFCFYCVVLPLTILVPEVKVPIWGSVYIPSIITILNSVGTPRSIHLLFYWILFENVMSLHRTKATLIGLFEAGRANEWVVTAKLGSGQSAKGNTKGIKRFPRIFKLPDRLNTLELGFAAFLFVCGCYDFVHGKNNYFIYLFLQTMSFFISGLGWIGTYVPS

SEQ ID NO: 44978 - protein, 516 aa, Arabidopsis thaliana
  peptide (1)..(516): Ceres Seq. ID no. 12600275
MEITGQLGMIWELVKAPVIVPLLQLAVYICLLMSVMLLCERVYMGIVIVLVKLFWKKPDKRYKFEPIHDDEELGSSNFPVVLVQIPMFNEREVYKLSIGAACGLSWPSDRLVIQVLDDSTDPTVKQMVEVECQRWASKGINIRYQIRENRVGYKAGALKEGLKRSYVKHCEYVVIFDADFQPEPDFLRRSIPFLMHNPNIALVQARWRFVNSDECLLTRMQEMSLDYHFTVEQEVGSSTHAFFGFNGTAGIWRIAAINEAGGWKDRTTVEDMDLAVRASLRGWKFLYLGDLQVKSELPSTFRAFRFQQHRWSCGPANLFRKMVMEIVRNKKVRFWKKVYVIYSFFFVRKIIAHWVTFCFYCVVLPLTILVPEVKVPIWGSVYIPSIITILNSVGTPRSIHLLFYWILFENVMSLHRTKATLIGLFEAGRANEWVVTAKLGSGQSAKGNTKGIKRFPRIFKLPDRLNTLELGFAAFLFVCGCYDFVHGKNNYFIYLFLQTMSFFISGLGWIGTYVPS

SEQ ID NO: 44979 - protein, 508 aa, Arabidopsis thaliana
  peptide (1)..(508): Ceres Seq. ID no. 12600276
MIWELVKAPVIVPLLQLAVYICLLMSVMLLCERVYMGIVIVLVKLFWKKPDKRYKFEPIHDDEELGSSNFPVVLVQIPMFNEREVYKLSIGAACGLSWPSDRLVIQVLDDSTDPTVKQMVEVECQRWASKGINIRYQIRENRVGYKAGALKEGLKRSYVKHCEYVVIFDADFQPEPDFLRRSIPFLMHNPNIALVQARWRFVNSDECLLTRMQEMSLDYHFTVEQEVGSSTHAFFGFNGTAGIWRIAAINEAGGWKDRTTVEDMDLAVRASLRGWKFLYLGDLQVKSELPSTFRAFRFQQHRWSCGPANLFRKMVMEIVRNKKVRFWKKVYVIYSFFFVRKIIAHWVTFCFYCVVLPLTILVPEVKVPIWGSVYIPSIITILNSVGTPRSIHLLFYWILFENVMSLHRTKATLIGLFEAGRANEWVVTAKLGSGQSAKGNTKGIKRFPRIFKLPDRLNTLELGFAAFLFVCGCYDFVHGKNNYFIYLFLQTMSFFISGLGWIGTYVPS

SEQ ID NO: 44980 - DNA, 1921 bp, Arabidopsis thaliana
  misc_feature (1)..(1921): Ceres Seq. ID no. 12559858
  misc_feature (1)..(1921): Ortholog of  Ceres SEQ ID NO 15169623 as cited in SEQ ID NO 67523
  misc_feature (1)..(1921): Ortholog of  Ceres SEQ ID NO 12614670 as cited in SEQ ID NO 68565
atctaactttagagcttctcttttcatttgaagatggtagcagccatggcttttcctgccgctgctacttatcccacccatttccaaggcggcgctcttcatctgggtaggaccgatcattgcctcttcggtttctaccctcaaaccatttcctctgtgaattctcggagagcttctgtttccatcaagtgccaatctacggagccaaagacgaatggtaacatattggacaatgcgagcaaccttttgacaaattttttaagtggtggaagtttggggtcaatgcctactgctgaaggctctgtctctgatttgtttggaaagcctctctttttatctctttacgactggttcttggagcatggaggaatttataaacttgcgtttggtccaaaagcctttgttgtcatctcagatcccattattgcaaggcatgtcctccgggaaaatgctttttcttatgacaagggagttcttgctgagatcttagagccgattatgggaaaagggttaataccggctgatctagatacgtggaagttaagaagaagagctatcactcccgcattccataaattgtatctagaggccatggtcaaagtatttagtgactgttcggagaaaatgatattgaaatctgagaaactcataagggagaaagaaacttcaagcggggaggacaccattgagttggatctggaagcagaattctcgagtctggctcttgatattataggtcttagcgtgttcaactacgattttggctctgtcacaaaagagtcccctgtgatcaaggcagtttatggaactcttttcgaggcagagcatcggtctactttctacttcccttattggaactttcctccagctagatggatagttccgaggcaacgaaagttccaaagcgatctgaagattataaacgattgccttgatggcctcattcaaaatgctaaagagacaagacaggaaacagatgttgagaagctccaggaaagggactacactaatctcaaggatgcaagtcttttgcggttcttagtcgatatgcgcggtgttgacattgatgaccggcagctgagggatgacttgatgactatgctaattgctggtcatgagacaacagcagcagttcttacttgggctgttttccttctgtcacaaaatcctgaaaaaattaggaaagctcaagctgagattgatgctgtgcttggtcaaggtccacccacttatgaatcaatgaaaaagctcgagtacatacgactgatcgttgtagaagtccttcgtctctttcctcagccacctttgctcatcagacgcactctcaaaccagaaacattacccggaggacacaaaggggaaaaagaaggtcataaagttccaaaagggactgatatcttcatttctgtgtataatctccatagatctccatacttttgggataatccccacgattttgagcctgagaggtttttaagaacaaaggagagcaatggaattgaaggatgggctggctttgatccatctcgtagccccggggcactatatccgaatgagataatagcagactttgcattcttaccatttggtggaggaccaagaaaatgcattggagaccagtttgcactaatggaatcgaccgtcgcactagctatgttgtttcagaaattcgatgtggagctgcgtggaacgccagaatctgttgaactcgtgagcggcgcaacgattcatgccaaaaatgggatgtggtgcaaactaaagagaagatcaaagtgaaatttatggataggcaaaaagactcaattttaacttgaaggaagctgagtgtaaatgagagatgatatgcttatgattcactaaacgtacattcttgagattttgaaaatgcaaaaaagctaatacagagattggatctgttggt

SEQ ID NO: 44981 - protein, 580 aa, Arabidopsis thaliana
  peptide (1)..(580): Ceres Seq. ID no. 12559859
MVAAMAFPAAATYPTHFQGGALHLGRTDHCLFGFYPQTISSVNSRRASVSIKCQSTEPKTNGNILDNASNLLTNFLSGGSLGSMPTAEGSVSDLFGKPLFLSLYDWFLEHGGIYKLAFGPKAFVVISDPIIARHVLRENAFSYDKGVLAEILEPIMGKGLIPADLDTWKLRRRAITPAFHKLYLEAMVKVFSDCSEKMILKSEKLIREKETSSGEDTIELDLEAEFSSLALDIIGLSVFNYDFGSVTKESPVIKAVYGTLFEAEHRSTFYFPYWNFPPARWIVPRQRKFQSDLKIINDCLDGLIQNAKETRQETDVEKLQERDYTNLKDASLLRFLVDMRGVDIDDRQLRDDLMTMLIAGHETTAAVLTWAVFLLSQNPEKIRKAQAEIDAVLGQGPPTYESMKKLEYIRLIVVEVLRLFPQPPLLIRRTLKPETLPGGHKGEKEGHKVPKGTDIFISVYNLHRSPYFWDNPHDFEPERFLRTKESNGIEGWAGFDPSRSPGALYPNEIIADFAFLPFGGGPRKCIGDQFALMESTVALAMLFQKFDVELRGTPESVELVSGATIHAKNGMWCKLKRRSK

SEQ ID NO: 44982 - protein, 576 aa, Arabidopsis thaliana
  peptide (1)..(576): Ceres Seq. ID no. 12559860
MAFPAAATYPTHFQGGALHLGRTDHCLFGFYPQTISSVNSRRASVSIKCQSTEPKTNGNILDNASNLLTNFLSGGSLGSMPTAEGSVSDLFGKPLFLSLYDWFLEHGGIYKLAFGPKAFVVISDPIIARHVLRENAFSYDKGVLAEILEPIMGKGLIPADLDTWKLRRRAITPAFHKLYLEAMVKVFSDCSEKMILKSEKLIREKETSSGEDTIELDLEAEFSSLALDIIGLSVFNYDFGSVTKESPVIKAVYGTLFEAEHRSTFYFPYWNFPPARWIVPRQRKFQSDLKIINDCLDGLIQNAKETRQETDVEKLQERDYTNLKDASLLRFLVDMRGVDIDDRQLRDDLMTMLIAGHETTAAVLTWAVFLLSQNPEKIRKAQAEIDAVLGQGPPTYESMKKLEYIRLIVVEVLRLFPQPPLLIRRTLKPETLPGGHKGEKEGHKVPKGTDIFISVYNLHRSPYFWDNPHDFEPERFLRTKESNGIEGWAGFDPSRSPGALYPNEIIADFAFLPFGGGPRKCIGDQFALMESTVALAMLFQKFDVELRGTPESVELVSGATIHAKNGMWCKLKRRSK

SEQ ID NO: 44983 - protein, 497 aa, Arabidopsis thaliana
  peptide (1)..(497): Ceres Seq. ID no. 12559861
MPTAEGSVSDLFGKPLFLSLYDWFLEHGGIYKLAFGPKAFVVISDPIIARHVLRENAFSYDKGVLAEILEPIMGKGLIPADLDTWKLRRRAITPAFHKLYLEAMVKVFSDCSEKMILKSEKLIREKETSSGEDTIELDLEAEFSSLALDIIGLSVFNYDFGSVTKESPVIKAVYGTLFEAEHRSTFYFPYWNFPPARWIVPRQRKFQSDLKIINDCLDGLIQNAKETRQETDVEKLQERDYTNLKDASLLRFLVDMRGVDIDDRQLRDDLMTMLIAGHETTAAVLTWAVFLLSQNPEKIRKAQAEIDAVLGQGPPTYESMKKLEYIRLIVVEVLRLFPQPPLLIRRTLKPETLPGGHKGEKEGHKVPKGTDIFISVYNLHRSPYFWDNPHDFEPERFLRTKESNGIEGWAGFDPSRSPGALYPNEIIADFAFLPFGGGPRKCIGDQFALMESTVALAMLFQKFDVELRGTPESVELVSGATIHAKNGMWCKLKRRSK

SEQ ID NO: 44984 - DNA, 2024 bp, Arabidopsis thaliana
  misc_feature (1)..(2024): Ceres Seq. ID no. 12600277
  misc_feature (1)..(2024): Ortholog of  Ceres SEQ ID NO 14310841 as cited in SEQ ID NO 53666
  misc_feature (1)..(2024): Ortholog of  Ceres SEQ ID NO 15178736 as cited in SEQ ID NO 56439
  misc_feature (1)..(2024): Ortholog of  Ceres SEQ ID NO 14308493 as cited in SEQ ID NO 60320
caaacttttgagaagcattttcgcttcaattcaataaaaggcgaaaaatctctcactgcactttatctcgagagctcagatctccgatctagagcctttcgcttctcctcttctgttcatataacaactgaataatgtcgatctccgcccaaaatccggatatttccggcgatagacaatccggccaagatgttcgtactcagaacgtgatggcttgtcaagctgtttctaatattgttaagacctcacttggtcccgtcggcctcgacaagatgttggtggatgatattggtgatgtgactattacaaatgatggtgctactattcttaggatgttggaggtcgagcaccctgctgctaaggttcttgtcgagttagctgaacttcaagatagagaagtcggtgatgggactacatctgttgttattgtagctgctgagttgttgaagagggcaaatgatttggtcaggaacaaaatacatccaacatcaattatcagtggatataggctagcaatgagagaatcttgcaaatacatagaagagaagttggtgaccaaggtcgaaaagcttgggaaagttccattgataaactgtgccaaaaccagcatgtcctccaaactgatatctggtgacagcgacttctttgccaatttggttgtggaagccgttctttcagtaaagatgacaaatcagcggggagagataaaataccctatcaagggcattaatattctgaaagctcatggacaaagtgcaagagacagctatttgttaaatggatatgcactcaatactggtcgtgctgcccaagggatgccattacgagtgtccccagcaaagattgcttgccttgacttcaatctgcagaagacaaaaatgcagctgggtgtccaagttgttgttaatgacccacgagaacttgaaaagatccgtcaaagagaagctgacatgacaaaagagcggatagagaaacttctcaaagctggggccaatgtaattctgaccacaaaggggattgacgacatggcacttaaatactttgtagaggcaggagctattgctgttaggcgtgtgcgcaaagaagacatgcgtcatgttgccaaggcgacaggagcgactctggtcaccacttttgctgacatggagggcgaagaaacatttgatccagctcaccttggatctgctgatgaggttgttgaagagagaatcgcagatgatgatgttatattgataaagggaaccaaaacaagtagtgcggtctcgttgatcttaagaggtgcaaatgactacatgcttgatgagatggagagagcactgcatgacgctttatgtattgtcaagaggacccttgagtccaacacggtggttgcgggtggaggtgcagttgaatcagcattgtctgtgtatctggagcaccttgctacaaccttgggctctcgcgaacaattggccatcgctgaatttgctgatgcgctattgattataccaaaggtgcttgcagtaaacgctgctaaggatgcaaccgaattggtagctaaactaagagcgtaccaccacactgcacaaaccaaggctgataagaagcactattcaagcatgggacttgacctcgtaaacggaaccatccgcaacaatttggaagctggagtgatcgaaccagctatgagcaaagtgaaaattatccagtttgcaacagaggcagccataacgattctacgaattgacgacatgatcaaactggtgaaggatgagagccaaggcgaagaataagcaaagctcagctcctctttatccgccttatcatccttagtgtgtgtttttgtccgcattttcagctcctctttagcttcttttttgcgctgtaacaatgtagcctctgaaagagctgtttctgtttatttttcaactctctcgtttcttgctcactttttacttcaagaaatttttgctttttgtcgggtaacgcatgtaatgaagttgggctttcgtctcttactgtttgaatttatggtgtagtttttg

SEQ ID NO: 44985 - protein, 545 aa, Arabidopsis thaliana
  peptide (1)..(545): Ceres Seq. ID no. 12600278
MSISAQNPDISGDRQSGQDVRTQNVMACQAVSNIVKTSLGPVGLDKMLVDDIGDVTITNDGATILRMLEVEHPAAKVLVELAELQDREVGDGTTSVVIVAAELLKRANDLVRNKIHPTSIISGYRLAMRESCKYIEEKLVTKVEKLGKVPLINCAKTSMSSKLISGDSDFFANLVVEAVLSVKMTNQRGEIKYPIKGINILKAHGQSARDSYLLNGYALNTGRAAQGMPLRVSPAKIACLDFNLQKTKMQLGVQVVVNDPRELEKIRQREADMTKERIEKLLKAGANVILTTKGIDDMALKYFVEAGAIAVRRVRKEDMRHVAKATGATLVTTFADMEGEETFDPAHLGSADEVVEERIADDDVILIKGTKTSSAVSLILRGANDYMLDEMERALHDALCIVKRTLESNTVVAGGGAVESALSVYLEHLATTLGSREQLAIAEFADALLIIPKVLAVNAAKDATELVAKLRAYHHTAQTKADKKHYSSMGLDLVNGTIRNNLEAGVIEPAMSKVKIIQFATEAAITILRIDDMIKLVKDESQGEE

SEQ ID NO: 44986 - protein, 520 aa, Arabidopsis thaliana
  peptide (1)..(520): Ceres Seq. ID no. 12600279
MACQAVSNIVKTSLGPVGLDKMLVDDIGDVTITNDGATILRMLEVEHPAAKVLVELAELQDREVGDGTTSVVIVAAELLKRANDLVRNKIHPTSIISGYRLAMRESCKYIEEKLVTKVEKLGKVPLINCAKTSMSSKLISGDSDFFANLVVEAVLSVKMTNQRGEIKYPIKGINILKAHGQSARDSYLLNGYALNTGRAAQGMPLRVSPAKIACLDFNLQKTKMQLGVQVVVNDPRELEKIRQREADMTKERIEKLLKAGANVILTTKGIDDMALKYFVEAGAIAVRRVRKEDMRHVAKATGATLVTTFADMEGEETFDPAHLGSADEVVEERIADDDVILIKGTKTSSAVSLILRGANDYMLDEMERALHDALCIVKRTLESNTVVAGGGAVESALSVYLEHLATTLGSREQLAIAEFADALLIIPKVLAVNAAKDATELVAKLRAYHHTAQTKADKKHYSSMGLDLVNGTIRNNLEAGVIEPAMSKVKIIQFATEAAITILRIDDMIKLVKDESQGEE

SEQ ID NO: 44987 - protein, 499 aa, Arabidopsis thaliana
  peptide (1)..(499): Ceres Seq. ID no. 12600280
MLVDDIGDVTITNDGATILRMLEVEHPAAKVLVELAELQDREVGDGTTSVVIVAAELLKRANDLVRNKIHPTSIISGYRLAMRESCKYIEEKLVTKVEKLGKVPLINCAKTSMSSKLISGDSDFFANLVVEAVLSVKMTNQRGEIKYPIKGINILKAHGQSARDSYLLNGYALNTGRAAQGMPLRVSPAKIACLDFNLQKTKMQLGVQVVVNDPRELEKIRQREADMTKERIEKLLKAGANVILTTKGIDDMALKYFVEAGAIAVRRVRKEDMRHVAKATGATLVTTFADMEGEETFDPAHLGSADEVVEERIADDDVILIKGTKTSSAVSLILRGANDYMLDEMERALHDALCIVKRTLESNTVVAGGGAVESALSVYLEHLATTLGSREQLAIAEFADALLIIPKVLAVNAAKDATELVAKLRAYHHTAQTKADKKHYSSMGLDLVNGTIRNNLEAGVIEPAMSKVKIIQFATEAAITILRIDDMIKLVKDESQGEE

SEQ ID NO: 44988 - DNA, 1590 bp, Arabidopsis thaliana
  misc_feature (1)..(1590): Ceres Seq. ID no. 12600281
  misc_feature (1)..(1590): Ortholog of  Ceres SEQ ID NO 14314264 as cited in SEQ ID NO 57374
actctctcatcaccaccatgctttctctaactgcaacaactctcagttcctccattttcacacaatccaaaacccatggattcttcaatacccgacccgtttaccgaaaacccttcaccaccatcacctccgctttaatccccgcttcaaaccgtcaagctccaccaaaacaacaactctatcaaccattccgtccaccaccatcaccaatccctccaaagttccgatcactcgacaccgccggaaaaatcgaagtcctcgctgatcgtctcggtctctggttcgaatacgctccactcatttcctccttatacactgaaggattcactcctccatcaatcgaagaactcaccggaatctccggtgtcgaacagaacagtctcatcgtcggcgcgcaagttcgagactctttagttcaatccggtgccaaaccggagcttatagctgcgtttgacacaaatggagccgagcttctctacgagattcgtcttttaaacacaactcaacgtgtagctgctgctgaatacattgttgatcacggtttcgatacgaaaggagctggagatcttgcgagagcgattaaagattttccgcatcgtcgtggcgacgttggtttgggagactttgattataacttacctggagattgtttgtcttttatgctttataggaaaagtagagagcatcggagtccgtcggagattcgaactacattactcgaacaagctcttgaaaccgcggtaacagagaaggcgaaaaaggcggtgttgagggagttacatggagagagtgaagaagagagagttaaagaagaggagataaaaatcattcgtgttcctgtagtgagattaaggtttggagaagtagcgggagcgagttcggttgttgttttaccggtttgtaaagcagaagaaggagaagagaagcttcttgaagcaccaatggagtttgaaagtggaggagagtttggtgtagtggaagctgagaaagattggagtagatgggtggttttaccgggttgggatcccgtggttgcggttaggaaaggagtggcggtttcgtttagcgatgatagggaagttttgccgtggaacgggaaaggagaggcgataatggttgtgatcgatagggaaaagaagacggtggaagctgataatggatactactaccttgttgtggctgatggtgggatgaagttggatagaggattggtgttgaaggagaaaggagtgaatgagagcttaggaatggttgttttggtcgttaggccgccgagagatgatgatgatgagtggcagataaatgatgaagattgggattagaattcaattagaagaatagttaaacaaatacttatatgcttttggttttggcaaatatgtaatttttttgtttgattgctttttatctcataaatgtttctttcattgttgtgtttagtgtctagctacatcaagattctcaccgtagtttttagttgaactatgttttgtgtagttaaagaacattgtataaggactaggggatgatgatgagattgcagcttataaaagcctattcggtaacaatgcaataaacaaaatattgtac

SEQ ID NO: 44989 - protein, 439 aa, Arabidopsis thaliana
  peptide (1)..(439): Ceres Seq. ID no. 12600282
SLITTMLSLTATTLSSSIFTQSKTHGFFNTRPVYRKPFTTITSALIPASNRQAPPKQQLYQPFRPPPSPIPPKFRSLDTAGKIEVLADRLGLWFEYAPLISSLYTEGFTPPSIEELTGISGVEQNSLIVGAQVRDSLVQSGAKPELIAAFDTNGAELLYEIRLLNTTQRVAAAEYIVDHGFDTKGAGDLARAIKDFPHRRGDVGLGDFDYNLPGDCLSFMLYRKSREHRSPSEIRTTLLEQALETAVTEKAKKAVLRELHGESEEERVKEEEIKIIRVPVVRLRFGEVAGASSVVVLPVCKAEEGEEKLLEAPMEFESGGEFGVVEAEKDWSRWVVLPGWDPVVAVRKGVAVSFSDDREVLPWNGKGEAIMVVIDREKKTVEADNGYYYLVVADGGMKLDRGLVLKEKGVNESLGMVVLVVRPPRDDDDEWQINDEDWD

SEQ ID NO: 44990 - protein, 434 aa, Arabidopsis thaliana
  peptide (1)..(434): Ceres Seq. ID no. 12600283
MLSLTATTLSSSIFTQSKTHGFFNTRPVYRKPFTTITSALIPASNRQAPPKQQLYQPFRPPPSPIPPKFRSLDTAGKIEVLADRLGLWFEYAPLISSLYTEGFTPPSIEELTGISGVEQNSLIVGAQVRDSLVQSGAKPELIAAFDTNGAELLYEIRLLNTTQRVAAAEYIVDHGFDTKGAGDLARAIKDFPHRRGDVGLGDFDYNLPGDCLSFMLYRKSREHRSPSEIRTTLLEQALETAVTEKAKKAVLRELHGESEEERVKEEEIKIIRVPVVRLRFGEVAGASSVVVLPVCKAEEGEEKLLEAPMEFESGGEFGVVEAEKDWSRWVVLPGWDPVVAVRKGVAVSFSDDREVLPWNGKGEAIMVVIDREKKTVEADNGYYYLVVADGGMKLDRGLVLKEKGVNESLGMVVLVVRPPRDDDDEWQINDEDWD

SEQ ID NO: 44991 - protein, 220 aa, Arabidopsis thaliana
  peptide (1)..(220): Ceres Seq. ID no. 12600284
MLYRKSREHRSPSEIRTTLLEQALETAVTEKAKKAVLRELHGESEEERVKEEEIKIIRVPVVRLRFGEVAGASSVVVLPVCKAEEGEEKLLEAPMEFESGGEFGVVEAEKDWSRWVVLPGWDPVVAVRKGVAVSFSDDREVLPWNGKGEAIMVVIDREKKTVEADNGYYYLVVADGGMKLDRGLVLKEKGVNESLGMVVLVVRPPRDDDDEWQINDEDWD

SEQ ID NO: 44992 - DNA, 1689 bp, Arabidopsis thaliana
  misc_feature (1)..(1689): Ceres Seq. ID no. 13575713
  misc_feature (1)..(1689): Ortholog of  Ceres SEQ ID NO 15176922 as cited in SEQ ID NO 55251
ggaacatcaacatgtggctctctttcttcctcctccgccgagatttttctccgtctctcgttctccgcaatggcggcggtcgctacctccttctgtttctctccccatcgatcgccgtcacgttttggaaaccctaattcatccattcgaagaacaatcgtctgtaaatcatctcctcgcgatgaatctccagccgtctccacttcttctcagcgaccggaaaagcagcagaatcctctgacttcacagaataaaccggatcatgatcacaaaccggatcctgggattggtaaaattggaatggagataatgtcaattgcattacctgctgcattagctttagctgctgatcctataacatctcttgtcgacactgccttcgttggccatattggttctgcggaattagctgcagtaggagtgtcagtttctgtattcaatttggtgtcgaagctcttcaatgttcctttactaaatgtcacaacatcgtttgttgcggaggagcaagcaattgctgctaaggatgataatgattctatagaaacaagcaagaaagtgctgccttcggtttcaacttcattagttcttgctgctggagttggtattgcagaggccattgcgctatctctcgggtctgatttcttgatggatgtcatggctataccttttgattcaccaatgcggataccagcagagcagttcctcagacttcgagcgtatggtgcaccaccaattgttgttgcattggctgcgcaaggagcttttcgaggtttcaaggacacaacaacgcctctatatgccgttgttgcggggaatgtacttaatgcggtattggatccaatcctgatatttgtccttggttttggtatctctggtgctgcggctgctactgtgatttctgaatacttgattgcatttattcttctatggaagttgaatgagaatgtagttttgctctctcctcaaatcaaagtgggaagagccaaccagtacctcaaatcaggtgggcttctcattggtagaacggtggctttgcttgtgccattcacattagctacttcgttagcagctcaaaatggacccactcaaatggctggccatcaaatcgtcttggaaatctggttggctgtctctttactcaccgatgctttagccattgctgcacagagtcttcttgccaccacttactctcaaggagaatacaaacaagcccgggaagttctcttcggagtccttcaagtaggtttagcaactggaactggtttggctgctgtattgttcatcactttcgaaccattttcaagcttattcacaacggattcagaagttttaaagattgctttgtcagggaccttatttgtggctggatctcaaccggtgaatgctctagcgtttgttttggatgggctctattatggtgtctctgacttcggatttgccgcttattctatggtgattgtcggattcatatcttccttgttcatgcttgtggctgcaccaacgtttggccttgccgggatctggactggtttgttcctcttcatggcgttgcggttggttgctggagcctggaggatactgcgtcatgtttcagattggggacaagaaccggtccatggaaaatgctatggtctgctccagagaagccagaatgaagcggatcactgttttttgcggtatgatgcgtga

SEQ ID NO: 44993 - protein, 562 aa, Arabidopsis thaliana
  peptide (1)..(562): Ceres Seq. ID no. 13575714
GTSTCGSLSSSSAEIFLRLSFSAMAAVATSFCFSPHRSPSRFGNPNSSIRRTIVCKSSPRDESPAVSTSSQRPEKQQNPLTSQNKPDHDHKPDPGIGKIGMEIMSIALPAALALAADPITSLVDTAFVGHIGSAELAAVGVSVSVFNLVSKLFNVPLLNVTTSFVAEEQAIAAKDDNDSIETSKKVLPSVSTSLVLAAGVGIAEAIALSLGSDFLMDVMAIPFDSPMRIPAEQFLRLRAYGAPPIVVALAAQGAFRGFKDTTTPLYAVVAGNVLNAVLDPILIFVLGFGISGAAAATVISEYLIAFILLWKLNENVVLLSPQIKVGRANQYLKSGGLLIGRTVALLVPFTLATSLAAQNGPTQMAGHQIVLEIWLAVSLLTDALAIAAQSLLATTYSQGEYKQAREVLFGVLQVGLATGTGLAAVLFITFEPFSSLFTTDSEVLKIALSGTLFVAGSQPVNALAFVLDGLYYGVSDFGFAAYSMVIVGFISSLFMLVAAPTFGLAGIWTGLFLFMALRLVAGAWRILRHVSDWGQEPVHGKCYGLLQRSQNEADHCFLRYDA

SEQ ID NO: 44994 - protein, 539 aa, Arabidopsis thaliana
  peptide (1)..(539): Ceres Seq. ID no. 13575715
MAAVATSFCFSPHRSPSRFGNPNSSIRRTIVCKSSPRDESPAVSTSSQRPEKQQNPLTSQNKPDHDHKPDPGIGKIGMEIMSIALPAALALAADPITSLVDTAFVGHIGSAELAAVGVSVSVFNLVSKLFNVPLLNVTTSFVAEEQAIAAKDDNDSIETSKKVLPSVSTSLVLAAGVGIAEAIALSLGSDFLMDVMAIPFDSPMRIPAEQFLRLRAYGAPPIVVALAAQGAFRGFKDTTTPLYAVVAGNVLNAVLDPILIFVLGFGISGAAAATVISEYLIAFILLWKLNENVVLLSPQIKVGRANQYLKSGGLLIGRTVALLVPFTLATSLAAQNGPTQMAGHQIVLEIWLAVSLLTDALAIAAQSLLATTYSQGEYKQAREVLFGVLQVGLATGTGLAAVLFITFEPFSSLFTTDSEVLKIALSGTLFVAGSQPVNALAFVLDGLYYGVSDFGFAAYSMVIVGFISSLFMLVAAPTFGLAGIWTGLFLFMALRLVAGAWRILRHVSDWGQEPVHGKCYGLLQRSQNEADHCFLRYDA

SEQ ID NO: 44995 - protein, 462 aa, Arabidopsis thaliana
  peptide (1)..(462): Ceres Seq. ID no. 13575716
MEIMSIALPAALALAADPITSLVDTAFVGHIGSAELAAVGVSVSVFNLVSKLFNVPLLNVTTSFVAEEQAIAAKDDNDSIETSKKVLPSVSTSLVLAAGVGIAEAIALSLGSDFLMDVMAIPFDSPMRIPAEQFLRLRAYGAPPIVVALAAQGAFRGFKDTTTPLYAVVAGNVLNAVLDPILIFVLGFGISGAAAATVISEYLIAFILLWKLNENVVLLSPQIKVGRANQYLKSGGLLIGRTVALLVPFTLATSLAAQNGPTQMAGHQIVLEIWLAVSLLTDALAIAAQSLLATTYSQGEYKQAREVLFGVLQVGLATGTGLAAVLFITFEPFSSLFTTDSEVLKIALSGTLFVAGSQPVNALAFVLDGLYYGVSDFGFAAYSMVIVGFISSLFMLVAAPTFGLAGIWTGLFLFMALRLVAGAWRILRHVSDWGQEPVHGKCYGLLQRSQNEADHCFLRYDA

SEQ ID NO: 44996 - DNA, 2263 bp, Arabidopsis thaliana
  misc_feature (1)..(2263): Ceres Seq. ID no. 13591573
  misc_feature (1)..(2263): Ortholog of  Ceres SEQ ID NO 13595870 as cited in SEQ ID NO 62101
  misc_feature (1)..(2263): Ortholog of  Ceres SEQ ID NO 13590241 as cited in SEQ ID NO 63878
  misc_feature (1)..(2263): Ortholog of  Ceres SEQ ID NO 13657939 as cited in SEQ ID NO 66349
tcctccatatttgcagagctcgagattctccttccctatacaactctcatctgtaatcgatacagatggcagcttcatcagcttgtcttgtgggaaatggtttgtcagtgaacacaacaaccaaacagaggttaagtaaacatttttccggcagacagacaagcttttcttcagtgattaggacatctaaggttaatgtagtgaaggcttctttggatgggaagaagaagcaagaaggaagaagagattttctcaaaatcttgttaggaaatgctggggtcggtttggttgcaagtgggaaagcaaatgctgatgaacaaggtgtttcttcgtcgaggatgtcgtattctaggtttctagagtacttggataaggatagggtgaataaagttgatttgtatgagaatgggactatagctattgtggaagctgtttctcctgaattgggtaaccgggttgagagagtacgtgttcagctaccgggtttaagtcaagagcttctacagaagcttagggctaagaatattgattttgcagcacataatgctcaggaagatcaaggttctgtgttattcaacttgattggtaatcttgctttcccggcgcttttgattggtggtttgttccttctttcgagacggtctggtggtggaatgggtggacctggtggtcctggtaacccacttcagtttggtcagtccaaagcaaagttccaaatggaacctaacactggtgtaacatttgatgatgttgctggagttgatgaagcaaagcaagatttcatggaagtggtggagtttttgaagaaacctgagagattcactgcggttggtgccaagatcccgaaaggtgttcttcttattggtcctcctggtaccgggaaaacccttttggcaaaagccattgctggtgaagctggtgtgcctttcttctccatctctggttctgagtttgttgagatgtttgtcggtgttggtgcctcgagagtccgtgatcttttcaagaaagccaaggagaacgctccttgcattgtctttgtagatgaaatagatgctgttggtaggcaaagaggaaccggaattggtggaggtaatgatgaaagagaacagaccctcaatcagctcctaactgagatggatggttttgaaggtaacactggtgttatcgtagttgctgcaaccaatagagcagacattcttgactctgctttgttgaggccaggacggtttgaccggcaggtaagtgttgacgttcctgacgttaaggggagaacagatattctcaaggttcatgccggcaataagaagttcgacaatgatgtttcacttgaaataatagcaatgagaacacctggatttagcggagcagatctcgctaacctcttgaatgaggctgctatattggccggaaggcgagcacggacatcgatatcatctaaagagattgatgactccattgatagaatcgttgctggcatggaaggaacagtgatgaccgatggcaagagcaaaagcttggtagcttaccatgaagttggtcatgcagtgtgtggaacattgactccaggacatgatgctgtgcaaaaggtaacgttgataccaagaggccaagcaagaggtctgacttggttcattccatcagatgacccgacactcatctccaagcagcaactctttgcaagaattgttggtggactcggtggtagggccgctgaagaaatcatctttggtgattccgaggtgactactggcgcagttggtgacttacaacagatcaccggtttggctagacagatggtaacaacatttggaatgtctgatattggaccatggtctttgatggattcttcggcacaaagcgatgtcatcatgagaatgatggcaagaaactccatgtctgagaagcttgcagaagacattgattctgcggtgaagaaactatcagacagtgcatatgagatagctctaagccacataaagaacaatcgtgaagccatggataagctcgttgaagtgcttctcgagaaagaaactattggcggtgacgaattcagggcaattctttccgagtttactgagatccccccggaaaaccgagttccttcttcaacaacgacaactccagcatcagcaccaacaccagctgctgtctaagtaatcaatctgtatacttgtgatacttataatttttctgtaaatttatcttcaaacttacactctagaaatgtgatactatctcaaaatttagtaacaagtaaatgttt

SEQ ID NO: 44997 - protein, 695 aa, Arabidopsis thaliana
  peptide (1)..(695): Ceres Seq. ID no. 13591574
MAASSACLVGNGLSVNTTTKQRLSKHFSGRQTSFSSVIRTSKVNVVKASLDGKKKQEGRRDFLKILLGNAGVGLVASGKANADEQGVSSSRMSYSRFLEYLDKDRVNKVDLYENGTIAIVEAVSPELGNRVERVRVQLPGLSQELLQKLRAKNIDFAAHNAQEDQGSVLFNLIGNLAFPALLIGGLFLLSRRSGGGMGGPGGPGNPLQFGQSKAKFQMEPNTGVTFDDVAGVDEAKQDFMEVVEFLKKPERFTAVGAKIPKGVLLIGPPGTGKTLLAKAIAGEAGVPFFSISGSEFVEMFVGVGASRVRDLFKKAKENAPCIVFVDEIDAVGRQRGTGIGGGNDEREQTLNQLLTEMDGFEGNTGVIVVAATNRADILDSALLRPGRFDRQVSVDVPDVKGRTDILKVHAGNKKFDNDVSLEIIAMRTPGFSGADLANLLNEAAILAGRRARTSISSKEIDDSIDRIVAGMEGTVMTDGKSKSLVAYHEVGHAVCGTLTPGHDAVQKVTLIPRGQARGLTWFIPSDDPTLISKQQLFARIVGGLGGRAAEEIIFGDSEVTTGAVGDLQQITGLARQMVTTFGMSDIGPWSLMDSSAQSDVIMRMMARNSMSEKLAEDIDSAVKKLSDSAYEIALSHIKNNREAMDKLVEVLLEKETIGGDEFRAILSEFTEIPPENRVPSSTTTTPASAPTPAAV

SEQ ID NO: 44998 - protein, 604 aa, Arabidopsis thaliana
  peptide (1)..(604): Ceres Seq. ID no. 13591575
MSYSRFLEYLDKDRVNKVDLYENGTIAIVEAVSPELGNRVERVRVQLPGLSQELLQKLRAKNIDFAAHNAQEDQGSVLFNLIGNLAFPALLIGGLFLLSRRSGGGMGGPGGPGNPLQFGQSKAKFQMEPNTGVTFDDVAGVDEAKQDFMEVVEFLKKPERFTAVGAKIPKGVLLIGPPGTGKTLLAKAIAGEAGVPFFSISGSEFVEMFVGVGASRVRDLFKKAKENAPCIVFVDEIDAVGRQRGTGIGGGNDEREQTLNQLLTEMDGFEGNTGVIVVAATNRADILDSALLRPGRFDRQVSVDVPDVKGRTDILKVHAGNKKFDNDVSLEIIAMRTPGFSGADLANLLNEAAILAGRRARTSISSKEIDDSIDRIVAGMEGTVMTDGKSKSLVAYHEVGHAVCGTLTPGHDAVQKVTLIPRGQARGLTWFIPSDDPTLISKQQLFARIVGGLGGRAAEEIIFGDSEVTTGAVGDLQQITGLARQMVTTFGMSDIGPWSLMDSSAQSDVIMRMMARNSMSEKLAEDIDSAVKKLSDSAYEIALSHIKNNREAMDKLVEVLLEKETIGGDEFRAILSEFTEIPPENRVPSSTTTTPASAPTPAAV

SEQ ID NO: 44999 - protein, 499 aa, Arabidopsis thaliana
  peptide (1)..(499): Ceres Seq. ID no. 13591576
MGGPGGPGNPLQFGQSKAKFQMEPNTGVTFDDVAGVDEAKQDFMEVVEFLKKPERFTAVGAKIPKGVLLIGPPGTGKTLLAKAIAGEAGVPFFSISGSEFVEMFVGVGASRVRDLFKKAKENAPCIVFVDEIDAVGRQRGTGIGGGNDEREQTLNQLLTEMDGFEGNTGVIVVAATNRADILDSALLRPGRFDRQVSVDVPDVKGRTDILKVHAGNKKFDNDVSLEIIAMRTPGFSGADLANLLNEAAILAGRRARTSISSKEIDDSIDRIVAGMEGTVMTDGKSKSLVAYHEVGHAVCGTLTPGHDAVQKVTLIPRGQARGLTWFIPSDDPTLISKQQLFARIVGGLGGRAAEEIIFGDSEVTTGAVGDLQQITGLARQMVTTFGMSDIGPWSLMDSSAQSDVIMRMMARNSMSEKLAEDIDSAVKKLSDSAYEIALSHIKNNREAMDKLVEVLLEKETIGGDEFRAILSEFTEIPPENRVPSSTTTTPASAPTPAAV

SEQ ID NO: 45000 - DNA, 1519 bp, Arabidopsis thaliana
  misc_feature (1)..(1519): Ceres Seq. ID no. 12600301
  misc_feature (1)..(1519): Ortholog of  Ceres SEQ ID NO 14314280 as cited in SEQ ID NO 57429
  misc_feature (1)..(1519): Ortholog of  Ceres SEQ ID NO 13595870 as cited in SEQ ID NO 62101
  misc_feature (1)..(1519): Ortholog of  Ceres SEQ ID NO 13590241 as cited in SEQ ID NO 63878
  misc_feature (1)..(1519): Ortholog of  Ceres SEQ ID NO 13657939 as cited in SEQ ID NO 66349
ggttttttttctctcatagtcgctctccctctcctctccctttgagaaatccctaactctttgctcttctcttcccggcgatctatctctccgatttgggtattgaaatggcaactcctatggttgaagatacgtcaagcttcgaagaggatcagcttgcttccatgtccaccgaagatatcactagagctactcgtcttctcgacaacgagattcgaattctcaaggaagacgcgcaaagaacaaatctagaatgtgattcttacaaggagaagattaaggagaatcaggagaagattaaactcaacaagcagctgccttacttggttggcaacattgtcgagattttggagatgaatccagaagatgatgctgaggaagatggtgcaaatattgatcttgactcgcaacggaaaggaaaatgtgttgtgttgaaaacgtctacacggcagaccatctttctaccagttgttggactcgtggatcctgatagtttgaaacctggtgacttggttggagttaacaaagatagctacttgattttggataccttgccatccgagtatgactctagggttaaagccatggaggtcgatgaaaaaccaactgaagattacaatgacattggaggactagagaagcagatccaagagcttgtagaggcaattgtgcttcccatgacgcacaaggaacgttttgagaagctgggtgttcgtccaccaaagggagtgctcttgtatggtcccccagggactggtaaaactttaatggctcgtgcctgcgcagcacagaccaatgccaccttccttaaattggcaggccctcaattggtccagatgttcattggagacggagcaaagcttgtccgtgatgcctttcaacttgccaaagagaaagctccgtgcattatcttcatagatgaaatcgatgccattggtacaaagcgtttcgacagtgaagtcagcggagacagggaagtgcagaggactatgttggagttgctcaatcaacttgacggattcagtagcgatgaacgtattaaggtgattgcagctactaaccgtgcagatattctggacccagcactcatgcgttctggtcgattagacagaaagattgagttcccacacccaaccgaagaagcgagagcaagaatcttgcagattcactcaaggaagatgaatgtccacccagacgtcaactttgaggagcttgcacgatcaacagatgatttcaatggagctcagctgaaagcagtgtgtgtagaggcaggcatgttagctcttcgccgtgatgccacagaggtgaaccatgaagacttcaatgaaggtatcatccaagtccaggccaagaagaaagcaagcttgaactactacgcctgatctctctctctcatcatttatttttatcaatgccgtttatctttcaactagttttacttgtaccctcattccgatttggatctttttaagttttcgaatcaggatcatctattatatcaaaatacatttaattgtgt

SEQ ID NO: 45001 - protein, 424 aa, Arabidopsis thaliana
  peptide (1)..(424): Ceres Seq. ID no. 12600302
MATPMVEDTSSFEEDQLASMSTEDITRATRLLDNEIRILKEDAQRTNLECDSYKEKIKENQEKIKLNKQLPYLVGNIVEILEMNPEDDAEEDGANIDLDSQRKGKCVVLKTSTRQTIFLPVVGLVDPDSLKPGDLVGVNKDSYLILDTLPSEYDSRVKAMEVDEKPTEDYNDIGGLEKQIQELVEAIVLPMTHKERFEKLGVRPPKGVLLYGPPGTGKTLMARACAAQTNATFLKLAGPQLVQMFIGDGAKLVRDAFQLAKEKAPCIIFIDEIDAIGTKRFDSEVSGDREVQRTMLELLNQLDGFSSDERIKVIAATNRADILDPALMRSGRLDRKIEFPHPTEEARARILQIHSRKMNVHPDVNFEELARSTDDFNGAQLKAVCVEAGMLALRRDATEVNHEDFNEGIIQVQAKKKASLNYYA

SEQ ID NO: 45002 - protein, 420 aa, Arabidopsis thaliana
  peptide (1)..(420): Ceres Seq. ID no. 12600303
MVEDTSSFEEDQLASMSTEDITRATRLLDNEIRILKEDAQRTNLECDSYKEKIKENQEKIKLNKQLPYLVGNIVEILEMNPEDDAEEDGANIDLDSQRKGKCVVLKTSTRQTIFLPVVGLVDPDSLKPGDLVGVNKDSYLILDTLPSEYDSRVKAMEVDEKPTEDYNDIGGLEKQIQELVEAIVLPMTHKERFEKLGVRPPKGVLLYGPPGTGKTLMARACAAQTNATFLKLAGPQLVQMFIGDGAKLVRDAFQLAKEKAPCIIFIDEIDAIGTKRFDSEVSGDREVQRTMLELLNQLDGFSSDERIKVIAATNRADILDPALMRSGRLDRKIEFPHPTEEARARILQIHSRKMNVHPDVNFEELARSTDDFNGAQLKAVCVEAGMLALRRDATEVNHEDFNEGIIQVQAKKKASLNYYA

SEQ ID NO: 45003 - protein, 405 aa, Arabidopsis thaliana
  peptide (1)..(405): Ceres Seq. ID no. 12600304
MSTEDITRATRLLDNEIRILKEDAQRTNLECDSYKEKIKENQEKIKLNKQLPYLVGNIVEILEMNPEDDAEEDGANIDLDSQRKGKCVVLKTSTRQTIFLPVVGLVDPDSLKPGDLVGVNKDSYLILDTLPSEYDSRVKAMEVDEKPTEDYNDIGGLEKQIQELVEAIVLPMTHKERFEKLGVRPPKGVLLYGPPGTGKTLMARACAAQTNATFLKLAGPQLVQMFIGDGAKLVRDAFQLAKEKAPCIIFIDEIDAIGTKRFDSEVSGDREVQRTMLELLNQLDGFSSDERIKVIAATNRADILDPALMRSGRLDRKIEFPHPTEEARARILQIHSRKMNVHPDVNFEELARSTDDFNGAQLKAVCVEAGMLALRRDATEVNHEDFNEGIIQVQAKKKASLNYYA

SEQ ID NO: 45004 - DNA, 2158 bp, Arabidopsis thaliana
  misc_feature (1)..(2158): Ceres Seq. ID no. 12559890
  misc_feature (1)..(2158): Ortholog of  Ceres SEQ ID NO 13598865 as cited in SEQ ID NO 0
ggcgtaacagattaaaaatatctacagtttctgttctaacgtaacgacgcctccctgcatttggattaagtggtaggttctttaaaagggaacccttttcaccactagttcttgaatccacatacaagccgaggcgtttcaatattaaatgtaaattttacccttaaaaccatttgatttctccttcaaaattcctgcaacgacattaatttgaaaaaaaaaaaacagagacgtaagatcaaagatgaggagcaagagcggttttagtttcttctctaaaatgacttcttcaaggaagaggccttctctctcactacctagcaagagtcacgagtccacggatgttaacaagaccatcgacaatgcagccgagattatcgagaaatggaacacagagtatgtttccgataagaaattttattctctgttttgcgagagcaagcgagacgcgaagaagtttgttaaacgcgtgaaggaactgcagaacgccatggatttgttgattagagaagatccaaattcggagaaactccttagagctcagaatctgatgcagatcgctatgaaacgacttcagaaagagtttctccagattctttcaatgaaccgtgcgcatttggatcctgaatccatctcctctagatctcctacatctgtcgtatcgaacgatgatgatgtttggcacgagtctcgttcagctggtgactccatcatcgaagttgaggaggtgtcaaagaactctaggacagagctgaaatccatagcagattgcatgatcgctgcgggttgtgcgaaagagtgtgcgactacttataaatccattcgaaaatcgatagttgatgaatcgatttaccgtctcggagtagagaatataagctcatccaaggcgaaaaagatgccatgtgaggttgttgagttgaagatgaataggtggatagaggcggttaaggtctcgatgaagactctcttcaatggcgaaaagactctatgcgatgaaatcttcgaatcctctgtttctcttagagagttttgtttccgagacatctccaaggaaggagctcttcttctgtttggattcccggaaactatcaccttaagagacaagaaaaatccacatccggagaagattttcccgttgctagatatgtattgcacgatcacagataacttgcttgcgattgaagcaatcttctcgtttccatcaatttcgaatgttcgaactcaagctcacagctcacttagccgactaagcgagtcaattcttgctcacttgatggattttgaatctcaaatacgtaaagactcgtccaagacagtggttcgtggtggaggagttcatccgatgactatctccgccatgaatcacatctctcgactcgcggaatacagtaacgctctcattaatatactcaagggatcatcatcatcatcttccgctaaagcattgcttcctaaatcttacttcaatgtctcagaatctgaagaatctccagtgtcggagctaaaagcacgattcgcgtggatgattctcgtcctcctctgtaaaatcgacggcaaagctgaaatgtacaaggacttctcaatgcagtatctcttcttagccaacaatctccaacacgttgtctcacgtgctcgatccacgaacgtgaagcatgttctcggcaacgattggatagcgaaaaactcagagaaagttagacagttcgcaagaagctacgagcggttggcatggggtccattggcgtcgatgtgtccggcgattagtacttcggaggcggtggagatgtcgcccgaagaagcgatgatgcaattcaaaaagttcaacgagactttcgagagcacgtgcgaggcacagagtgagtgcatcgtactagatccgaagctgttggacgagatgagaatttcgatcgggagaaaactgttaccggtttaccgcgatttttacaacgctcatagaaatgccgttatgttagcgggaacggaaggccagtggaatgtccgatataaccctgaagatattggaaaccacttgtcggagctgtttagcggaaagggtatttcggagaaaggatatgtctgtacgccagatttttgtgttacaacacctactccaactcctgtacgaaagactcgatctttgtcatgcagaagattttga

SEQ ID NO: 45005 - protein, 637 aa, Arabidopsis thaliana
  peptide (1)..(637): Ceres Seq. ID no. 12559891
MRSKSGFSFFSKMTSSRKRPSLSLPSKSHESTDVNKTIDNAAEIIEKWNTEYVSDKKFYSLFCESKRDAKKFVKRVKELQNAMDLLIREDPNSEKLLRAQNLMQIAMKRLQKEFLQILSMNRAHLDPESISSRSPTSVVSNDDDVWHESRSAGDSIIEVEEVSKNSRTELKSIADCMIAAGCAKECATTYKSIRKSIVDESIYRLGVENISSSKAKKMPCEVVELKMNRWIEAVKVSMKTLFNGEKTLCDEIFESSVSLREFCFRDISKEGALLLFGFPETITLRDKKNPHPEKIFPLLDMYCTITDNLLAIEAIFSFPSISNVRTQAHSSLSRLSESILAHLMDFESQIRKDSSKTVVRGGGVHPMTISAMNHISRLAEYSNALINILKGSSSSSSAKALLPKSYFNVSESEESPVSELKARFAWMILVLLCKIDGKAEMYKDFSMQYLFLANNLQHVVSRARSTNVKHVLGNDWIAKNSEKVRQFARSYERLAWGPLASMCPAISTSEAVEMSPEEAMMQFKKFNETFESTCEAQSECIVLDPKLLDEMRISIGRKLLPVYRDFYNAHRNAVMLAGTEGQWNVRYNPEDIGNHLSELFSGKGISEKGYVCTPDFCVTTPTPTPVRKTRSLSCRRF

SEQ ID NO: 45006 - protein, 625 aa, Arabidopsis thaliana
  peptide (1)..(625): Ceres Seq. ID no. 12559892
MTSSRKRPSLSLPSKSHESTDVNKTIDNAAEIIEKWNTEYVSDKKFYSLFCESKRDAKKFVKRVKELQNAMDLLIREDPNSEKLLRAQNLMQIAMKRLQKEFLQILSMNRAHLDPESISSRSPTSVVSNDDDVWHESRSAGDSIIEVEEVSKNSRTELKSIADCMIAAGCAKECATTYKSIRKSIVDESIYRLGVENISSSKAKKMPCEVVELKMNRWIEAVKVSMKTLFNGEKTLCDEIFESSVSLREFCFRDISKEGALLLFGFPETITLRDKKNPHPEKIFPLLDMYCTITDNLLAIEAIFSFPSISNVRTQAHSSLSRLSESILAHLMDFESQIRKDSSKTVVRGGGVHPMTISAMNHISRLAEYSNALINILKGSSSSSSAKALLPKSYFNVSESEESPVSELKARFAWMILVLLCKIDGKAEMYKDFSMQYLFLANNLQHVVSRARSTNVKHVLGNDWIAKNSEKVRQFARSYERLAWGPLASMCPAISTSEAVEMSPEEAMMQFKKFNETFESTCEAQSECIVLDPKLLDEMRISIGRKLLPVYRDFYNAHRNAVMLAGTEGQWNVRYNPEDIGNHLSELFSGKGISEKGYVCTPDFCVTTPTPTPVRKTRSLSCRRF

SEQ ID NO: 45007 - protein, 555 aa, Arabidopsis thaliana
  peptide (1)..(555): Ceres Seq. ID no. 12559893
MDLLIREDPNSEKLLRAQNLMQIAMKRLQKEFLQILSMNRAHLDPESISSRSPTSVVSNDDDVWHESRSAGDSIIEVEEVSKNSRTELKSIADCMIAAGCAKECATTYKSIRKSIVDESIYRLGVENISSSKAKKMPCEVVELKMNRWIEAVKVSMKTLFNGEKTLCDEIFESSVSLREFCFRDISKEGALLLFGFPETITLRDKKNPHPEKIFPLLDMYCTITDNLLAIEAIFSFPSISNVRTQAHSSLSRLSESILAHLMDFESQIRKDSSKTVVRGGGVHPMTISAMNHISRLAEYSNALINILKGSSSSSSAKALLPKSYFNVSESEESPVSELKARFAWMILVLLCKIDGKAEMYKDFSMQYLFLANNLQHVVSRARSTNVKHVLGNDWIAKNSEKVRQFARSYERLAWGPLASMCPAISTSEAVEMSPEEAMMQFKKFNETFESTCEAQSECIVLDPKLLDEMRISIGRKLLPVYRDFYNAHRNAVMLAGTEGQWNVRYNPEDIGNHLSELFSGKGISEKGYVCTPDFCVTTPTPTPVRKTRSLSCRRF

SEQ ID NO: 45008 - DNA, 1777 bp, Arabidopsis thaliana
  misc_feature (1)..(1777): Ceres Seq. ID no. 12559910
  misc_feature (1)..(1777): Ortholog of  Ceres SEQ ID NO 15179918 as cited in SEQ ID NO 57077
aaatcatattgagaacaaatagatttggttatatatggcttttacgcacgtttgtttatggacgttagtcgccttcgtgctgacgtggacggtgttctaccttaccaacatgaagaagaaggcgacggatttggctgatacggtggctgaggatcaaaaagacggtgctgctgacgtcattatcgtcggggctggtgtaggtggttcggctctcgcatatgctcttgctaaggatgggcgtcgagtacatgtgatcgagagggacatgagagaaccagaaagaatgatgggtgagtttatgcaacctggcggacgactcatgctttctaaacttggccttcaagattgcttggaagacatagatgcacagaaagccacgggtttggcagtttataaagatggaaaagaagcagacgcaccttttccagtggataacaacaatttttcttatgaaccttctgctcgatcttttcacaatggccgattcgtccaacaactgcgtcgaaaggctttttctctttccaatgtgcgcctggaagaaggaacggtgaagtctttactagaagaaaaaggagtggtcaaaggagtgacatacaagaataaagaaggcgaagaaacaacagccttggcacctctcactgtggtatgcgacggttgctactcaaaccttcgtcggtctcttaatgatgacaacaatgctgagattatgtcgtacatagttggttacatctcaaagaattgtcggcttgaagaacccgaaaagctacacttgatattgtctaaaccatctttcaccatggtataccaaataagcagcactgacgttcgttgtggttttgaggttctccccgaaaattttccttctattgcaaatggtgaaatgtctactttcatgaagaatactatagttcctcaggtacctccaaaactccgcaaaatatttttgaaaggtatagatgagggagcacacataaaagtggtgccggcaaagcgcatgacatctactttaagcaagaagaaaggtgtgattgtattgggagatgcattcaatatgcgtcatccagttgttgcatctggaatgatggttttactgtcggacattctcattctacgccgtcttcttcagccattaagcaacctcggcgatgcaaacaaagtctcagaagttatcaattccttttatgatatccgcaagccaatgtcggcgacggttaacacattgggaaatgcattttctcaagtactaattggatcaacggatgaagcaaaagaggcaatgagacagggtgtctatgattacctttgtagtggcgggtttcgtacgtcagggatgatggctctgctcggcggcatgaatcctcgtcctctctctctcgtctatcatctttgtgccatcactctatcctccattggccaactgctctctccatttccctctccccttcgcatttggcatagcctcaagctttttggtttggccatgaaaatgttggttcccaatctcaaagctgaaggagttagccaaatgttgtttccagcaaatgcagccgcgtatcacaaaagctatatggctgcaaccactctctaaactttgatgctctcaatcgcaatatatatggagcacgaatctatgtgattgtgcatttggtaaacgtgtattgcagtgcttataattattagtatgtaacggggaaaagttctaaacacaaaaaaataaacttttgaatgttatatgtgtgaattatttttgttgttacaagtaatgctcttttttttt

SEQ ID NO: 45009 - protein, 517 aa, Arabidopsis thaliana
  peptide (1)..(517): Ceres Seq. ID no. 12559911
MAFTHVCLWTLVAFVLTWTVFYLTNMKKKATDLADTVAEDQKDGAADVIIVGAGVGGSALAYALAKDGRRVHVIERDMREPERMMGEFMQPGGRLMLSKLGLQDCLEDIDAQKATGLAVYKDGKEADAPFPVDNNNFSYEPSARSFHNGRFVQQLRRKAFSLSNVRLEEGTVKSLLEEKGVVKGVTYKNKEGEETTALAPLTVVCDGCYSNLRRSLNDDNNAEIMSYIVGYISKNCRLEEPEKLHLILSKPSFTMVYQISSTDVRCGFEVLPENFPSIANGEMSTFMKNTIVPQVPPKLRKIFLKGIDEGAHIKVVPAKRMTSTLSKKKGVIVLGDAFNMRHPVVASGMMVLLSDILILRRLLQPLSNLGDANKVSEVINSFYDIRKPMSATVNTLGNAFSQVLIGSTDEAKEAMRQGVYDYLCSGGFRTSGMMALLGGMNPRPLSLVYHLCAITLSSIGQLLSPFPSPLRIWHSLKLFGLAMKMLVPNLKAEGVSQMLFPANAAAYHKSYMAATTL

SEQ ID NO: 45010 - protein, 492 aa, Arabidopsis thaliana
  peptide (1)..(492): Ceres Seq. ID no. 12559912
MKKKATDLADTVAEDQKDGAADVIIVGAGVGGSALAYALAKDGRRVHVIERDMREPERMMGEFMQPGGRLMLSKLGLQDCLEDIDAQKATGLAVYKDGKEADAPFPVDNNNFSYEPSARSFHNGRFVQQLRRKAFSLSNVRLEEGTVKSLLEEKGVVKGVTYKNKEGEETTALAPLTVVCDGCYSNLRRSLNDDNNAEIMSYIVGYISKNCRLEEPEKLHLILSKPSFTMVYQISSTDVRCGFEVLPENFPSIANGEMSTFMKNTIVPQVPPKLRKIFLKGIDEGAHIKVVPAKRMTSTLSKKKGVIVLGDAFNMRHPVVASGMMVLLSDILILRRLLQPLSNLGDANKVSEVINSFYDIRKPMSATVNTLGNAFSQVLIGSTDEAKEAMRQGVYDYLCSGGFRTSGMMALLGGMNPRPLSLVYHLCAITLSSIGQLLSPFPSPLRIWHSLKLFGLAMKMLVPNLKAEGVSQMLFPANAAAYHKSYMAATTL

SEQ ID NO: 45011 - protein, 440 aa, Arabidopsis thaliana
  peptide (1)..(440): Ceres Seq. ID no. 12559913
MREPERMMGEFMQPGGRLMLSKLGLQDCLEDIDAQKATGLAVYKDGKEADAPFPVDNNNFSYEPSARSFHNGRFVQQLRRKAFSLSNVRLEEGTVKSLLEEKGVVKGVTYKNKEGEETTALAPLTVVCDGCYSNLRRSLNDDNNAEIMSYIVGYISKNCRLEEPEKLHLILSKPSFTMVYQISSTDVRCGFEVLPENFPSIANGEMSTFMKNTIVPQVPPKLRKIFLKGIDEGAHIKVVPAKRMTSTLSKKKGVIVLGDAFNMRHPVVASGMMVLLSDILILRRLLQPLSNLGDANKVSEVINSFYDIRKPMSATVNTLGNAFSQVLIGSTDEAKEAMRQGVYDYLCSGGFRTSGMMALLGGMNPRPLSLVYHLCAITLSSIGQLLSPFPSPLRIWHSLKLFGLAMKMLVPNLKAEGVSQMLFPANAAAYHKSYMAATTL

SEQ ID NO: 45012 - DNA, 1702 bp, Arabidopsis thaliana
  misc_feature (1)..(1702): Ceres Seq. ID no. 12600391
  misc_feature (1)..(1702): Ortholog of  Ceres SEQ ID NO 13598882 as cited in SEQ ID NO 0
gacaacaagaaaaacaaataatatattagtaaaagacaaacgtaaaaaccatctctcggcctcctctcataaatcaatctctcttcttatcactctccgaaacccacttccagctttttcctctctctttctctctctagtctctcttttgtagctctcccctgctaagctaaccactgcacgtttccatagagaggaaagatgagtctctctccgagagattttctctctatcatcttatcttcttccgtgtaatgctctgagccaaaacccaataactaaatcaacaacaatatagaagagaagagaaagatcttatctttcttctcattcttgagtttagtcccccacaatggcgattcggaaggaggaagaaagtagagaagaacagagcaattcgtttcttcttgatgctctctactgcgaagaagagaaatgggacgatgaaggagaagaagttgaagaaaactcttccttgtcttcttcttcttctccattcgttgttttgcaacaagatttgttctgggaagatgaagatctggttacactcttctccaaagaagaagaacaaggactcagctgtctcgatgatgtttatctttccacggatcgaaaagaagctgttggttggattctgagagtcaacgctcattatggcttctctactttagcagctgttttagccataacttatctcgataagttcatctgtagctacagcttacagagagacaaaccatggatgcttcagctcgtttctgtcgcgtgtctctcattagctgctaaagtcgaagaaacccaagtccctcttcttctagactttcaagtggaggagacaaagtatgtgtttgaagcaaaaaccatacagagaatggagctactgattctgtctactctcgagtggaagatgcatctcattactccaatttcgttcgtagaccacattatcaggagattgggacttaagaacaatgctcactgggatttcctcaacaaatgccaccgtctcctcctctctgtaatctccgattcaagatttgtcgggtacctcccatcagtagttgccgcagctaccatgatgcgaattatagagcaagttgatccctttgaccctctttcataccaaactaatctcctcggtgtccttaacttaaccaaggaaaaggtgaaaacttgctacgatctaatcctccaactaccagtggaccgcatcggtttacagatccaaatccaatcttccaagaaacgcaagagtcacgattcatcatcatcgttgaacagtccaagctgcgtgattgatgcaaaccctttcaatagcgacgaaagctcaaacgattcgtggtcagcgagttcgtgcaacccaccaacgtcgtcgtcgtccccgcagcaacaacctccattgaagaagatgagaggagctgaagagaatgagaagaagaagccgattttgcatctgccatgggcaatcgtagccactccataatcgaaagctcgatttcgtttatatgatatttactgtttttttaaactttgagaacaatctttgttgtattaagctttacccgtttgcatatacgaaatgtcgcgaatgcccttacgtgccatggcttgatagagttaatgggtaaagggtattcatgacatttgactgcatgggatgtgacgaaggagagaattagaaataataataataatattgcgt

SEQ ID NO: 45013 - protein, 376 aa, Arabidopsis thaliana
  peptide (1)..(376): Ceres Seq. ID no. 12600392
MAIRKEEESREEQSNSFLLDALYCEEEKWDDEGEEVEENSSLSSSSSPFVVLQQDLFWEDEDLVTLFSKEEEQGLSCLDDVYLSTDRKEAVGWILRVNAHYGFSTLAAVLAITYLDKFICSYSLQRDKPWMLQLVSVACLSLAAKVEETQVPLLLDFQVEETKYVFEAKTIQRMELLILSTLEWKMHLITPISFVDHIIRRLGLKNNAHWDFLNKCHRLLLSVISDSRFVGYLPSVVAAATMMRIIEQVDPFDPLSYQTNLLGVLNLTKEKVKTCYDLILQLPVDRIGLQIQIQSSKKRKSHDSSSSLNSPSCVIDANPFNSDESSNDSWSASSCNPPTSSSSPQQQPPLKKMRGAEENEKKKPILHLPWAIVATP

SEQ ID NO: 45014 - protein, 246 aa, Arabidopsis thaliana
  peptide (1)..(246): Ceres Seq. ID no. 12600393
MLQLVSVACLSLAAKVEETQVPLLLDFQVEETKYVFEAKTIQRMELLILSTLEWKMHLITPISFVDHIIRRLGLKNNAHWDFLNKCHRLLLSVISDSRFVGYLPSVVAAATMMRIIEQVDPFDPLSYQTNLLGVLNLTKEKVKTCYDLILQLPVDRIGLQIQIQSSKKRKSHDSSSSLNSPSCVIDANPFNSDESSNDSWSASSCNPPTSSSSPQQQPPLKKMRGAEENEKKKPILHLPWAIVATP

SEQ ID NO: 45015 - protein, 203 aa, Arabidopsis thaliana
  peptide (1)..(203): Ceres Seq. ID no. 12600394
MELLILSTLEWKMHLITPISFVDHIIRRLGLKNNAHWDFLNKCHRLLLSVISDSRFVGYLPSVVAAATMMRIIEQVDPFDPLSYQTNLLGVLNLTKEKVKTCYDLILQLPVDRIGLQIQIQSSKKRKSHDSSSSLNSPSCVIDANPFNSDESSNDSWSASSCNPPTSSSSPQQQPPLKKMRGAEENEKKKPILHLPWAIVATP

SEQ ID NO: 45016 - DNA, 2254 bp, Arabidopsis thaliana
  misc_feature (1)..(2254): Ceres Seq. ID no. 13591474
  misc_feature (1)..(2254): Ortholog of  Ceres SEQ ID NO 15174638 as cited in SEQ ID NO 53185
  misc_feature (1)..(2254): Ortholog of  Ceres SEQ ID NO 13657460 as cited in SEQ ID NO 66115
  misc_feature (1)..(2254): Ortholog of  Ceres SEQ ID NO 13659394 as cited in SEQ ID NO 67049
ggtggtagtagcagtgaaaaacaaaagcaatccaatcccaaacccatttgctcttaagattcttcacatagagaagtcacatgttccttcttcttcttccttcatcatccccaaacacacacaaactaaaaaaaaggcaaaaccctagatccaagatcagacctaatctaatcgaaactcatagctgaaaaatgaagagagatcatcaccaattccaaggtcgattgtccaaccacgggacttcttcttcttcatcatcaatctctaaagataagatgatgatggtgaaaaaagaagaagacggtggaggtaacatggacgacgagcttctcgctgttttaggttacaaagttaggtcatcggagatggcggaggttgctttgaaactcgaacaattagagacgatgatgagtaatgttcaagaagatggtttatctcatctcgcgacggatactgttcattataatccgtcggagctttattcttggcttgataatatgctctctgagcttaatcctcctcctcttccggcgagttctaacggtttagatccggttcttccttcgccggagatttgtggttttccggcttcggattatgaccttaaagtcattcccggaaacgcgatttatcagtttccggcgattgattcttcgtcttcgtcgaataatcagaacaagcgtttgaaatcatgctcgagtcctgattctatggttacatcgacttcgacgggtacgcagattggtggagtcataggaacgacggtgacgacaaccaccacgacaacgacggcggcgggtgagtcaactcgttctgttatcctggttgactcgcaagagaacggtgttcgtttagtccacgcgcttatggcttgtgcagaagcaatccagcagaacaatttgactctagcggaagctcttgtgaagcaaatcggatgcttagctgtgtctcaagccggagctatgagaaaagtggctacttacttcgccgaagctttagcgcggcggatctaccgtctctctccgccgcagaatcagatcgatcattgtctctccgatactcttcagatgcacttttacgagacttgtccttatcttaaattcgctcacttcacggcgaaccaagcgattctcgaagcttttgaaggtaagaagagagtacacgtcattgatttctcgatgaaccaaggtcttcaatggcctgcacttatgcaagctcttgcgcttcgagaaggaggtcctccaactttccggttaaccggaattggtccaccggcgccggataattctgatcatcttcatgaagttggttgtaaattagctcagcttgcggaggcgattcacgtagaattcgaataccgtggattcgttgctaacagcttagccgatctcgatgcttcgatgcttgagcttagaccgagcgatacggaagctgttgcggtgaactctgtttttgagctacataagctcttaggtcgtcccggtgggatagagaaagttctcggcgttgtgaaacagattaaaccggtgattttcacggtggttgagcaagaatcgaaccataacggaccggttttcttagaccggtttactgaatcgttacattattattcgactctgtttgattcgttggaaggagttccgaatagtcaagacaaagtcatgtctgaagtttacttagggaaacagatttgtaatctggtggcttgtgaaggtcctgacagagtcgagagacacgaaacgttgagtcaatggggaaaccggtttggttcgtccggtttagcgccggcacatcttgggtctaacgcgtttaagcaagcgagtatgcttttgtctgtgtttaatagtggccaaggttatcgtgtggaggagagtaatggatgtttgatgttgggttggcacactcgtccactcattaccacctccgcttggaaactctcgacggcggcgtactgagtttgactcgaagcatacgacggtggtggagtcgagtcgagtgaatttgagattgagatcagtggaccggtgatgacatatgttcggaccaagacctaaaccgaactgaatcgaaccgttttgccttttgtttattttatttattttcgttcacttgtttaaaattcttatatatatcgctttggtaggtcatttttaatttatgcctttttgggatcaatttttaataggctgagtttgtatttattaataaattatctttatgaattttaaactaaaactatgttttaatctcatcc

SEQ ID NO: 45017 - protein, 587 aa, Arabidopsis thaliana
  peptide (1)..(587): Ceres Seq. ID no. 13591475
MKRDHHQFQGRLSNHGTSSSSSSISKDKMMMVKKEEDGGGNMDDELLAVLGYKVRSSEMAEVALKLEQLETMMSNVQEDGLSHLATDTVHYNPSELYSWLDNMLSELNPPPLPASSNGLDPVLPSPEICGFPASDYDLKVIPGNAIYQFPAIDSSSSSNNQNKRLKSCSSPDSMVTSTSTGTQIGGVIGTTVTTTTTTTTAAGESTRSVILVDSQENGVRLVHALMACAEAIQQNNLTLAEALVKQIGCLAVSQAGAMRKVATYFAEALARRIYRLSPPQNQIDHCLSDTLQMHFYETCPYLKFAHFTANQAILEAFEGKKRVHVIDFSMNQGLQWPALMQALALREGGPPTFRLTGIGPPAPDNSDHLHEVGCKLAQLAEAIHVEFEYRGFVANSLADLDASMLELRPSDTEAVAVNSVFELHKLLGRPGGIEKVLGVVKQIKPVIFTVVEQESNHNGPVFLDRFTESLHYYSTLFDSLEGVPNSQDKVMSEVYLGKQICNLVACEGPDRVERHETLSQWGNRFGSSGLAPAHLGSNAFKQASMLLSVFNSGQGYRVEESNGCLMLGWHTRPLITTSAWKLSTAAY

SEQ ID NO: 45018 - protein, 559 aa, Arabidopsis thaliana
  peptide (1)..(559): Ceres Seq. ID no. 13591476
MMMVKKEEDGGGNMDDELLAVLGYKVRSSEMAEVALKLEQLETMMSNVQEDGLSHLATDTVHYNPSELYSWLDNMLSELNPPPLPASSNGLDPVLPSPEICGFPASDYDLKVIPGNAIYQFPAIDSSSSSNNQNKRLKSCSSPDSMVTSTSTGTQIGGVIGTTVTTTTTTTTAAGESTRSVILVDSQENGVRLVHALMACAEAIQQNNLTLAEALVKQIGCLAVSQAGAMRKVATYFAEALARRIYRLSPPQNQIDHCLSDTLQMHFYETCPYLKFAHFTANQAILEAFEGKKRVHVIDFSMNQGLQWPALMQALALREGGPPTFRLTGIGPPAPDNSDHLHEVGCKLAQLAEAIHVEFEYRGFVANSLADLDASMLELRPSDTEAVAVNSVFELHKLLGRPGGIEKVLGVVKQIKPVIFTVVEQESNHNGPVFLDRFTESLHYYSTLFDSLEGVPNSQDKVMSEVYLGKQICNLVACEGPDRVERHETLSQWGNRFGSSGLAPAHLGSNAFKQASMLLSVFNSGQGYRVEESNGCLMLGWHTRPLITTSAWKLSTAAY

SEQ ID NO: 45019 - protein, 558 aa, Arabidopsis thaliana
  peptide (1)..(558): Ceres Seq. ID no. 13591477
MMVKKEEDGGGNMDDELLAVLGYKVRSSEMAEVALKLEQLETMMSNVQEDGLSHLATDTVHYNPSELYSWLDNMLSELNPPPLPASSNGLDPVLPSPEICGFPASDYDLKVIPGNAIYQFPAIDSSSSSNNQNKRLKSCSSPDSMVTSTSTGTQIGGVIGTTVTTTTTTTTAAGESTRSVILVDSQENGVRLVHALMACAEAIQQNNLTLAEALVKQIGCLAVSQAGAMRKVATYFAEALARRIYRLSPPQNQIDHCLSDTLQMHFYETCPYLKFAHFTANQAILEAFEGKKRVHVIDFSMNQGLQWPALMQALALREGGPPTFRLTGIGPPAPDNSDHLHEVGCKLAQLAEAIHVEFEYRGFVANSLADLDASMLELRPSDTEAVAVNSVFELHKLLGRPGGIEKVLGVVKQIKPVIFTVVEQESNHNGPVFLDRFTESLHYYSTLFDSLEGVPNSQDKVMSEVYLGKQICNLVACEGPDRVERHETLSQWGNRFGSSGLAPAHLGSNAFKQASMLLSVFNSGQGYRVEESNGCLMLGWHTRPLITTSAWKLSTAAY

SEQ ID NO: 45020 - DNA, 2920 bp, Arabidopsis thaliana; identical to SEQ ID NO: 21546
  misc_feature (1)..(2920): Ceres Seq. ID no. 12600069
  misc_feature (1)..(2920): Ortholog of  Ceres SEQ ID NO 15172491 as cited in SEQ ID NO 58719

SEQ ID NO: 45021 - protein, 794 aa, Arabidopsis thaliana; identical to SEQ ID NO: 21547
  peptide (1)..(794): Ceres Seq. ID no. 12600070

SEQ ID NO: 45022 - protein, 790 aa, Arabidopsis thaliana; identical to SEQ ID NO: 21548
  peptide (1)..(790): Ceres Seq. ID no. 12600071

SEQ ID NO: 45023 - protein, 764 aa, Arabidopsis thaliana; identical to SEQ ID NO: 21549
  peptide (1)..(764): Ceres Seq. ID no. 12600072

SEQ ID NO: 45024 - DNA, 1880 bp, Arabidopsis thaliana
  misc_feature (1)..(1880): Ceres Seq. ID no. 12559206
  misc_feature (1)..(1880): Ortholog of  Ceres SEQ ID NO 13503610 as cited in SEQ ID NO 62416
  misc_feature (1)..(1880): Ortholog of  Ceres SEQ ID NO 13657610 as cited in SEQ ID NO 66165
  misc_feature (1)..(1880): Ortholog of  Ceres SEQ ID NO 13598312 as cited in SEQ ID NO 68448
  misc_feature (1)..(1880): Ortholog of  Ceres SEQ ID NO 13596100 as cited in SEQ ID NO 68573
gcactctatatatctctccatccctacttgccctcatttcaccaaaatcctcctaattcaccaattttagaattcccattctcattttctctctctttctatttctccaaatttgcctaaagattttacattttatcttcaatccttccttgatttacgtttgaaatatttcgacccaaaactatactgatggagagaacaaacagcattgagatggatcgagagagattaacggcggagatggcgtttcgagattcatcatcggccgttataagaattcgaagacgtttgccggatttattaacgtccgttaagctcaaatacgtgaagcttggacttcacaactcttgcaacgtgaccaccattctcttcttcttaattattcttcctttaaccggaaccgtgctggttcagctaaccggtctaacgttcgatacgttctctgagctttggtctaaccaggcggttcaactcgacacggcgacgagacttacctgcttggttttcctctccttcgttttgaccctctacgtggctaaccggtctaaaccggtttacctagtggatttctcctgctacaaaccggaagacgagcgtaaaatatcagtagattcgttcttgacgatgactgaggaaaatggatcattcaccgatgacacggttcagttccagcaaagaatctcgaaccgggccggtttgggagacgagacgtatctgccacgtggcataacttcaacgcccccgaagctaaatatgtcagaggcacgtgccgaagctgaagccgttatgtttggagccttagattccctcttcgagaaaaccggaattaaaccggccgaagtcggaatcttgatagtaaactgcagcttattcaatccgacgccgtctctatcagcgatgatcgtgaaccattacaagatgagagaagacatcaaaagttacaacctcggaggaatgggttgctccgccggattaatctcaatcgatctcgctaacaatctcctcaaagcaaaccctaattcttacgctgtcgtggtaagcacggaaaacataaccctaaactggtacttcggaaatgaccggtcaatgctcctctgcaactgcatcttccgaatgggcggagctgcgattctcctctctaaccgccgtcaagaccggaagaagtcaaagtactcgctggtcaacgtcgttcgaacacataaaggatcagacgacaagaactacaattgcgtgtaccagaaggaagacgagagaggaacaatcggtgtctctttagctagagagctcatgtctgtcgccggagacgctctgaaaacaaacatcacgactttaggaccgatggttcttccattgtcagagcagttgatgttcttgatttccttggtcaaaaggaagatgttcaagttaaaagttaaaccgtatattccggatttcaagctagctttcgagcatttctgtattcacgcaggaggtagagcggttctagacgaagtgcagaagaatcttgatctcaaagattggcacatggaaccttctagaatgactttgcacagatttggtaacacttcgagtagctcgctttggtatgagatggcttataccgaagctaagggtcgggttaaagctggtgaccgactttggcagattgcgtttggatcgggtttcaagtgtaatagtgcggtttggaaagcgttacgaccggtttcgacggaggagatgaccggtaatgcttgggctggttcgattgatcaatatccggttaaagttgtgcaatgattggttgaaccggataatcatatatgtaattgtgttcttcttgattttattttttaattgttgatgtaagttgtcgattgaaaatcatataatttaattaattt

SEQ ID NO: 45025 - protein, 528 aa, Arabidopsis thaliana
  peptide (1)..(528): Ceres Seq. ID no. 12559207
MERTNSIEMDRERLTAEMAFRDSSSAVIRIRRRLPDLLTSVKLKYVKLGLHNSCNVTTILFFLIILPLTGTVLVQLTGLTFDTFSELWSNQAVQLDTATRLTCLVFLSFVLTLYVANRSKPVYLVDFSCYKPEDERKISVDSFLTMTEENGSFTDDTVQFQQRISNRAGLGDETYLPRGITSTPPKLNMSEARAEAEAVMFGALDSLFEKTGIKPAEVGILIVNCSLFNPTPSLSAMIVNHYKMREDIKSYNLGGMGCSAGLISIDLANNLLKANPNSYAVVVSTENITLNWYFGNDRSMLLCNCIFRMGGAAILLSNRRQDRKKSKYSLVNVVRTHKGSDDKNYNCVYQKEDERGTIGVSLARELMSVAGDALKTNITTLGPMVLPLSEQLMFLISLVKRKMFKLKVKPYIPDFKLAFEHFCIHAGGRAVLDEVQKNLDLKDWHMEPSRMTLHRFGNTSSSSLWYEMAYTEAKGRVKAGDRLWQIAFGSGFKCNSAVWKALRPVSTEEMTGNAWAGSIDQYPVKVVQ

SEQ ID NO: 45026 - protein, 520 aa, Arabidopsis thaliana
  peptide (1)..(520): Ceres Seq. ID no. 12559208
MDRERLTAEMAFRDSSSAVIRIRRRLPDLLTSVKLKYVKLGLHNSCNVTTILFFLIILPLTGTVLVQLTGLTFDTFSELWSNQAVQLDTATRLTCLVFLSFVLTLYVANRSKPVYLVDFSCYKPEDERKISVDSFLTMTEENGSFTDDTVQFQQRISNRAGLGDETYLPRGITSTPPKLNMSEARAEAEAVMFGALDSLFEKTGIKPAEVGILIVNCSLFNPTPSLSAMIVNHYKMREDIKSYNLGGMGCSAGLISIDLANNLLKANPNSYAVVVSTENITLNWYFGNDRSMLLCNCIFRMGGAAILLSNRRQDRKKSKYSLVNVVRTHKGSDDKNYNCVYQKEDERGTIGVSLARELMSVAGDALKTNITTLGPMVLPLSEQLMFLISLVKRKMFKLKVKPYIPDFKLAFEHFCIHAGGRAVLDEVQKNLDLKDWHMEPSRMTLHRFGNTSSSSLWYEMAYTEAKGRVKAGDRLWQIAFGSGFKCNSAVWKALRPVSTEEMTGNAWAGSIDQYPVKVVQ

SEQ ID NO: 45027 - protein, 511 aa, Arabidopsis thaliana
  peptide (1)..(511): Ceres Seq. ID no. 12559209
MAFRDSSSAVIRIRRRLPDLLTSVKLKYVKLGLHNSCNVTTILFFLIILPLTGTVLVQLTGLTFDTFSELWSNQAVQLDTATRLTCLVFLSFVLTLYVANRSKPVYLVDFSCYKPEDERKISVDSFLTMTEENGSFTDDTVQFQQRISNRAGLGDETYLPRGITSTPPKLNMSEARAEAEAVMFGALDSLFEKTGIKPAEVGILIVNCSLFNPTPSLSAMIVNHYKMREDIKSYNLGGMGCSAGLISIDLANNLLKANPNSYAVVVSTENITLNWYFGNDRSMLLCNCIFRMGGAAILLSNRRQDRKKSKYSLVNVVRTHKGSDDKNYNCVYQKEDERGTIGVSLARELMSVAGDALKTNITTLGPMVLPLSEQLMFLISLVKRKMFKLKVKPYIPDFKLAFEHFCIHAGGRAVLDEVQKNLDLKDWHMEPSRMTLHRFGNTSSSSLWYEMAYTEAKGRVKAGDRLWQIAFGSGFKCNSAVWKALRPVSTEEMTGNAWAGSIDQYPVKVVQ

SEQ ID NO: 45028 - DNA, 1755 bp, Arabidopsis thaliana
  misc_feature (1)..(1755): Ceres Seq. ID no. 12559214
  misc_feature (1)..(1755): Ortholog of  Ceres SEQ ID NO 13654989 as cited in SEQ ID NO 63117
  misc_feature (1)..(1755): Ortholog of  Ceres SEQ ID NO 13584744 as cited in SEQ ID NO 69137
gagaaagagtctctgttctgatttgtcagtggaaaaagagaaagagaagtgggacccatctccgccatagccaaagacctctttctctcccacctcatacctctctactctctgcccatcattgcccccgacgaaactctctctctctcgctctctctctaaaaagagaaacaaacatttctttagtgtctctctctttcatcatctctttaccttttgcttcttcgaaaaaaaaagagaaataaattctaagaagagaaattgagagcttggtttttctttattggcatgaatttgtaacttaccagagataataaagttagggttcttttttttcgttcttataaatatagtaatctttctatttttaagtgtgtgtgtgagtgttgtttgggaataatgggtaactgttggtgtagatttgagcccttaaaccacagagtttctgcaaacgctaaatcagagtcaccaaaagaacagagtccaacagtagaagataaacatattaaggaagttcaaaagctgccatcaaatccaaaagaagtagaagatctaagacgtgactcagcagcgaatcctcttatagctttcacatacgaagagcttaagaacattacaagtaattttagacaagacagagttcttggtggtggtggatttggaagtgtctacaaagggtttataaaagaggatttgggtgatcaagaagttcctgaaccacttcctgttgccgttaaagttcatgatggtgataatagctttcagggtcacagagaatggctggcagaggtgatattcttggggcagctttcacatccaaacttagtgaaattgatcggttattgctgtgaggataatcaccgagtgctaatctatgagtacatggctcgtggtagcgtggagaacaatcttttctcaagagtgttgcttcctctttcatgggcaataagaatgaagattgctttcggagctgcgaaaggacttgcctttcttcatgaagcaaagaaacccgtcatttatcgcgatttcaaaacttcgaacattcttctagatatggattacaacgccaaattatctgattttggacttgctaaagacggtcctgtaggagataaatcccatgtttccactcgtataatgggaacttatggctatgcagctcctgaatacatcatgacagggcatttgacaccggggagtgatgtgtatagtttcggtgtagttctgttagagcttcttacgggaagaaaatcattagacaaatcacggccaacacgtgagcaaaacctcatagattgggctcttccattgttgaaggagaagaagaaagtcttgaacattgtagacccaaaaatgaactgtgagtatccggttaaagcggttcaaaaggctgcaatgttagcttaccattgcctgaaccgtaacccgaaggctcggcctttaatgcgtgacattgttgattctttggagcctcttcaggccacagaagaggaggctttactagtccctcctgttcagaaagcagtaattactattatcgacgaaatgcctaagaatggattgaagaaagttgaagaattgaagaaggttgaagaagtgaagaaggttattgaagatgcatgctaattcacattgtaattgatcacttttttttttttttttaatcttcttaatatacagtttgaaaaagtgataactagattgtgttattttgtattttgaaatacagattaagaaacagatacaaaggtttgt

SEQ ID NO: 45029 - protein, 408 aa, Arabidopsis thaliana
  peptide (1)..(408): Ceres Seq. ID no. 12559215
MGNCWCRFEPLNHRVSANAKSESPKEQSPTVEDKHIKEVQKLPSNPKEVEDLRRDSAANPLIAFTYEELKNITSNFRQDRVLGGGGFGSVYKGFIKEDLGDQEVPEPLPVAVKVHDGDNSFQGHREWLAEVIFLGQLSHPNLVKLIGYCCEDNHRVLIYEYMARGSVENNLFSRVLLPLSWAIRMKIAFGAAKGLAFLHEAKKPVIYRDFKTSNILLDMDYNAKLSDFGLAKDGPVGDKSHVSTRIMGTYGYAAPEYIMTGHLTPGSDVYSFGVVLLELLTGRKSLDKSRPTREQNLIDWALPLLKEKKKVLNIVDPKMNCEYPVKAVQKAAMLAYHCLNRNPKARPLMRDIVDSLEPLQATEEEALLVPPVQKAVITIIDEMPKNGLKKVEELKKVEEVKKVIEDAC

SEQ ID NO: 45030 - protein, 247 aa, Arabidopsis thaliana
  peptide (1)..(247): Ceres Seq. ID no. 12559216
MARGSVENNLFSRVLLPLSWAIRMKIAFGAAKGLAFLHEAKKPVIYRDFKTSNILLDMDYNAKLSDFGLAKDGPVGDKSHVSTRIMGTYGYAAPEYIMTGHLTPGSDVYSFGVVLLELLTGRKSLDKSRPTREQNLIDWALPLLKEKKKVLNIVDPKMNCEYPVKAVQKAAMLAYHCLNRNPKARPLMRDIVDSLEPLQATEEEALLVPPVQKAVITIIDEMPKNGLKKVEELKKVEEVKKVIEDAC

SEQ ID NO: 45031 - protein, 224 aa, Arabidopsis thaliana
  peptide (1)..(224): Ceres Seq. ID no. 12559217
MKIAFGAAKGLAFLHEAKKPVIYRDFKTSNILLDMDYNAKLSDFGLAKDGPVGDKSHVSTRIMGTYGYAAPEYIMTGHLTPGSDVYSFGVVLLELLTGRKSLDKSRPTREQNLIDWALPLLKEKKKVLNIVDPKMNCEYPVKAVQKAAMLAYHCLNRNPKARPLMRDIVDSLEPLQATEEEALLVPPVQKAVITIIDEMPKNGLKKVEELKKVEEVKKVIEDAC

SEQ ID NO: 45032 - DNA, 1608 bp, Arabidopsis thaliana
  misc_feature (1)..(1608): Ceres Seq. ID no. 12559218
  misc_feature (1)..(1608): Ortholog of  Ceres SEQ ID NO 14313216 as cited in SEQ ID NO 66103
atggagattttgagatttttgctttctctctttatatattttcttttgttgaatctttctctttcacattttccttcgatttcagctcaaaggactaaccatgaaaacttcctcaagtgtctctctcaccgaatcaacgaggacgactcaagaatcatacacacatcaaaagatccttcgtatttctcaatcttgaattcttccatacaaaatccaagattctttgttctcgaaacacctaaaccggtttcaatcatcactccggttcaagccaccgatgttcaatctacgattaaatgcgcacggcttcacggtatacacatcaggactaggagtggtggtcatgactacgaaggtttatcttacatggctaaaagcagaccgttcgttgtcattgatttgagaaatctccggtctattacattagatgttgataaccggaccggttgggttcaatccggagctacaattggggaattgtactatgagattggaaaattaagcaaatctttggcctttccggccggtctttatccaaccgttggcatcggagggcaattcggaggtggtgggtacggtacgttgatgagaaaatacggtttatcggcggacaatgtaattgatgcacatattgttgacgcgaatggaagctttcttgaccgacaaggcatgggtgaagatttcttttgggctatccgtggaggcggaggatcaagcttctctgttgtcctgtcatggaagattagattgcttgatgttccgtcggtagtaacggtctttaaagtcgtgaaaacatcggaaaaagaggctgtctcgatcatcaacaagtggcagtatattgcggataaggttcctaatgatcttttcatcagagctatgctacagaaggaaaccgaggtttatgcttcgttcccgggactttatctcggtccggtaagcgatctattagcattgatgaaagataagtttccggaattaggtcttgagattggaaattgtagagaaatgagttggattgagtctgttctctggtttataaaaggagaatcaatggaaattcttgcgaaacggaaacgaacgtcaagatctttcaagggaaaagatgatttcatcgaagaaccgatacctaaaaccgcgattcagtatctttggagacgattcgaggcgcccgaggctcggcttgcaaagatcatactcactccatttggtggcaaaatgagtgaaattgcggataacgaaataccattcccacatagagaaggtaatctttatgagattcaatatttagcttattggagtgaagaagaagataagaacaagactaatactgaaaagtatttgagatgggtcgagagtgtatacgaatttatgactccttatgtttcaaaatctccacgaagagcttatgttaattttagagacattgatttgggaatgtatcttgggttgaatatgaagacaaagtacgaggaagcaaaggtttggggagtgaagtatttcaagaacaatttcgatagattggtgagagttaaaacaaatgttgatccaatggatttcttctgtgatgaacaaagtataccaattatgaaatatgttaatgatatttga

SEQ ID NO: 45033 - protein, 535 aa, Arabidopsis thaliana
  peptide (1)..(535): Ceres Seq. ID no. 12559219
MEILRFLLSLFIYFLLLNLSLSHFPSISAQRTNHENFLKCLSHRINEDDSRIIHTSKDPSYFSILNSSIQNPRFFVLETPKPVSIITPVQATDVQSTIKCARLHGIHIRTRSGGHDYEGLSYMAKSRPFVVIDLRNLRSITLDVDNRTGWVQSGATIGELYYEIGKLSKSLAFPAGLYPTVGIGGQFGGGGYGTLMRKYGLSADNVIDAHIVDANGSFLDRQGMGEDFFWAIRGGGGSSFSVVLSWKIRLLDVPSVVTVFKVVKTSEKEAVSIINKWQYIADKVPNDLFIRAMLQKETEVYASFPGLYLGPVSDLLALMKDKFPELGLEIGNCREMSWIESVLWFIKGESMEILAKRKRTSRSFKGKDDFIEEPIPKTAIQYLWRRFEAPEARLAKIILTPFGGKMSEIADNEIPFPHREGNLYEIQYLAYWSEEEDKNKTNTEKYLRWVESVYEFMTPYVSKSPRRAYVNFRDIDLGMYLGLNMKTKYEEAKVWGVKYFKNNFDRLVRVKTNVDPMDFFCDEQSIPIMKYVNDI

SEQ ID NO: 45034 - protein, 413 aa, Arabidopsis thaliana
  peptide (1)..(413): Ceres Seq. ID no. 12559220
MAKSRPFVVIDLRNLRSITLDVDNRTGWVQSGATIGELYYEIGKLSKSLAFPAGLYPTVGIGGQFGGGGYGTLMRKYGLSADNVIDAHIVDANGSFLDRQGMGEDFFWAIRGGGGSSFSVVLSWKIRLLDVPSVVTVFKVVKTSEKEAVSIINKWQYIADKVPNDLFIRAMLQKETEVYASFPGLYLGPVSDLLALMKDKFPELGLEIGNCREMSWIESVLWFIKGESMEILAKRKRTSRSFKGKDDFIEEPIPKTAIQYLWRRFEAPEARLAKIILTPFGGKMSEIADNEIPFPHREGNLYEIQYLAYWSEEEDKNKTNTEKYLRWVESVYEFMTPYVSKSPRRAYVNFRDIDLGMYLGLNMKTKYEEAKVWGVKYFKNNFDRLVRVKTNVDPMDFFCDEQSIPIMKYVNDI

SEQ ID NO: 45035 - protein, 340 aa, Arabidopsis thaliana
  peptide (1)..(340): Ceres Seq. ID no. 12559221
MRKYGLSADNVIDAHIVDANGSFLDRQGMGEDFFWAIRGGGGSSFSVVLSWKIRLLDVPSVVTVFKVVKTSEKEAVSIINKWQYIADKVPNDLFIRAMLQKETEVYASFPGLYLGPVSDLLALMKDKFPELGLEIGNCREMSWIESVLWFIKGESMEILAKRKRTSRSFKGKDDFIEEPIPKTAIQYLWRRFEAPEARLAKIILTPFGGKMSEIADNEIPFPHREGNLYEIQYLAYWSEEEDKNKTNTEKYLRWVESVYEFMTPYVSKSPRRAYVNFRDIDLGMYLGLNMKTKYEEAKVWGVKYFKNNFDRLVRVKTNVDPMDFFCDEQSIPIMKYVNDI

SEQ ID NO: 45036 - DNA, 1727 bp, Arabidopsis thaliana
  misc_feature (1)..(1727): Ceres Seq. ID no. 12559281
  misc_feature (1)..(1727): Ortholog of  Ceres SEQ ID NO 15171626 as cited in SEQ ID NO 57201
aatatcacaaactcgtttgctcttttcatcattactaaatcataagcggctctcaagttctttagggtttcgagttttctcaatctcctacctgattaaggttaatttcttatcttggatcaataacaagagaattataactccggattgtaatcaatattcctctacataaaaagcgtgaatgagattatgatggaatcgaaagctggtaataagaagtcaagcagcaatagttccttatgttacgaagcaccccttggttacagcattgaagacgttcgtcctttcggtggaatcaagaaattcaaatcttctgtctactccaactgcgctaagaggccttcctgagtactagccagttccctccatagcttttcaattacaacaatctccttttctcaaagctctggttccccaaatcctctcgtcttttgtttgccctcacaacaacaacaacaacgcagagatggccatgtctgctattggcttcgaaggttacgagaagcggcttgaagttactttctttgagcctggtctctttcttgacactcaaggaaaagggctacgtgctttagctaagtctcagatcgatgagattcttcagccagctgagtgcactatcgtctcatctctctcgaacgatcagcttgactcttatgttctctctgagtccagtctctttatcttcccgtacaagatcgtcatcaagacttgcggtactactaagctcctcctctctattgagcctctcttgaggttagccggtgagctttctcttgacgttaaggctgtgaggtacactcgtggaagtttcctctgtcctggaggacaaccattccctcaccgcaacttctctgaagaagtctctgttcttgatggtcactttgctaagcttggtttaagcagtgttgcctacttgatgggcaatgacgatgaaaccaagaaatggcatgtttactctgcttcttctgccaacagcaacaacaagaacaatgtctacacgcttgagatgtgtatgactggtctagacaaagacaaggcatctgtcttctacaagaacgagtcaagctctgctggttctatgactgataactctggcatcagaaagatactgcctcaatcccaaatctgtgactttgagtttgagccctgtggctactcaatgaacagcatcgaaggcgacgcaatctctaccatccatgtaactccagaggatggtttcagctacgctagctttgaagcagtgggatatgatttcacaaccatggacttgagccatcttgtctcaaaggtactaacttgcttcaaaccaaaacaattctctgtagctgtccactcgaccgtggcacagaagagctacgactctggtctctctgtggacctagacgattacggatgcaaagagtcaacaatggagtctctaggagaagagagaggaacagtgatgtatcagaggtttgagaagctaggaaggtattgtggttctccgagatctaccttgaaatgtgagtggagcagcaacagtagctgcaacagcgaggacgagaaggaatagggaatctaaaagctcaagtttttaattttcgttttcttgaataatgtcttatggatatttttcttcttcttcttatttcccttaaaccagtgtttgtgtctggtctatgtgaattcggatgatccaaatgttgaatataatggatcaagtatctattattatgatcattttc

SEQ ID NO: 45037 - protein, 362 aa, Arabidopsis thaliana
  peptide (1)..(362): Ceres Seq. ID no. 12559282
MAMSAIGFEGYEKRLEVTFFEPGLFLDTQGKGLRALAKSQIDEILQPAECTIVSSLSNDQLDSYVLSESSLFIFPYKIVIKTCGTTKLLLSIEPLLRLAGELSLDVKAVRYTRGSFLCPGGQPFPHRNFSEEVSVLDGHFAKLGLSSVAYLMGNDDETKKWHVYSASSANSNNKNNVYTLEMCMTGLDKDKASVFYKNESSSAGSMTDNSGIRKILPQSQICDFEFEPCGYSMNSIEGDAISTIHVTPEDGFSYASFEAVGYDFTTMDLSHLVSKVLTCFKPKQFSVAVHSTVAQKSYDSGLSVDLDDYGCKESTMESLGEERGTVMYQRFEKLGRYCGSPRSTLKCEWSSNSSCNSEDEKE

SEQ ID NO: 45038 - protein, 360 aa, Arabidopsis thaliana
  peptide (1)..(360): Ceres Seq. ID no. 12559283
MSAIGFEGYEKRLEVTFFEPGLFLDTQGKGLRALAKSQIDEILQPAECTIVSSLSNDQLDSYVLSESSLFIFPYKIVIKTCGTTKLLLSIEPLLRLAGELSLDVKAVRYTRGSFLCPGGQPFPHRNFSEEVSVLDGHFAKLGLSSVAYLMGNDDETKKWHVYSASSANSNNKNNVYTLEMCMTGLDKDKASVFYKNESSSAGSMTDNSGIRKILPQSQICDFEFEPCGYSMNSIEGDAISTIHVTPEDGFSYASFEAVGYDFTTMDLSHLVSKVLTCFKPKQFSVAVHSTVAQKSYDSGLSVDLDDYGCKESTMESLGEERGTVMYQRFEKLGRYCGSPRSTLKCEWSSNSSCNSEDEKE

SEQ ID NO: 45039 - protein, 211 aa, Arabidopsis thaliana
  peptide (1)..(211): Ceres Seq. ID no. 12559284
MGNDDETKKWHVYSASSANSNNKNNVYTLEMCMTGLDKDKASVFYKNESSSAGSMTDNSGIRKILPQSQICDFEFEPCGYSMNSIEGDAISTIHVTPEDGFSYASFEAVGYDFTTMDLSHLVSKVLTCFKPKQFSVAVHSTVAQKSYDSGLSVDLDDYGCKESTMESLGEERGTVMYQRFEKLGRYCGSPRSTLKCEWSSNSSCNSEDEKE

SEQ ID NO: 45040 - DNA, 3093 bp, Arabidopsis thaliana
  misc_feature (1)..(3093): Ceres Seq. ID no. 12600157
  misc_feature (1)..(3093): Ortholog of  Ceres SEQ ID NO 13600595 as cited in SEQ ID NO 629
  misc_feature (1)..(3093): Ortholog of  Ceres SEQ ID NO 13593379 as cited in SEQ ID NO 20573
gtcttcttcttcttcttcttccttccttctctctccttattaagaaagaccaacacagacacggaagaagtagcttggttcttctctttgtgaaggtgaatgcgggagatggggactggagattctgcttcgagactgattctctggttctgcttagggtttttgattctaggtgttggatttgtgcaatgtggagttacttatgaccggaaagcacttctcattaatggacagagacgaatcctcttctctggctccatacattaccctcgaagcactcctgatatgtgggaagatttgattcagaaggcgaaagatggaggcattgatgtgattgagacgtatgtgttctggaatcttcatgagccttctcctggaaaatacgattttgaagggagaaatgatttggtgagattcgtgaagacgattcacaaagctggtttatatgctcatcttcgaattggaccttatgtttgcgccgagtggaattttggaggattccctgtttggctcaagtatgttcctggaatcagcttcagaacagataatgagccttttaagagagctatgaaaggattcacagagagaatagttgagctgatgaagagtgagaacttgttcgagtcccagggtggtcccattatcctttctcagattgagaatgagtatggaagacaagggcagttattgggcgctgaaggtcacaactacatgacatgggcagctaaaatggctatagcaactgagactggtgtcccgtgggtcatgtgcaaagaagacgatgcccctgaccctgtgataaacacatgtaacggtttctactgtgattcatttgctccgaacaagccatacaagcctttgatatggacagaggcatggagcggctggttcactgagttcggtgggccaatgcaccatagaccagttcaggatctggcgtttggtgttgcacgtttcatacaaaaaggaggatcttttgttaactactacatgtatcatggaggaactaactttggaagaacagccggaggtccatttgtcaccaccagctatgattatgatgctccgatcgacgaatatggtttaatcagacaacctaaatatggtcacctaaaggaactccacagagctatcaagatgtgtgagaaggctctggtgtcagctgatcccgttgttacatcaataggaaacaagcaacaagctcatgtatactctgcagaatcaggagattgttcggctttcctagctaactatgatacagaatcggcagcaagagttttgtttaacaacgttcattataacttacctccttggtcaatcagtattcttccagactgtagaaatgcagtcttcaatactgcaaaggttggagttcaaacatcccagatggaaatgttgcctacagacacaaagaatttccagtgggagagttatttggaagatctttcttctctagatgacagctccacattcaccactcacggactcttggagcagataaatgtcacgcgtgacacaagcgattatctttggtacatgacgagtgttgatatcggtgacagtgaatcattcttgcatggaggagagctaccaactctcattattcaatctacaggccatgccgtgcatatatttgtcaatggacagctttcaggttctgcctttggaacaaggcaaaacaggagatttacttatcagggaaagatcaatctgcattctggaactaacagaattgcgttgctgagtgttgctgttggattaccaaatgtgggtggacactttgagtcatggaatactggaatcttgggtccggtggcattgcatgggttgagtcaagggaaaatggatttgtcatggcagaaatggacataccaggtgggactgaaaggtgaagctatgaatcttgcatttccaaccaacactccctctattggatggatggatgcgtccttaactgtacaaaagcctcagcctttgacatggcacaagacttattttgatgcgcccgaaggaaatgagccgcttgctttggacatggaaggaatgggaaaaggtcagatttgggtgaacggtgagagcatcggaagatactggacagcatttgcgactggtgactgcagtcattgtagctacactggaacatataaaccgaacaaatgccaaaccggctgtggtcaacctacacaaaggtggtaccatgtgccgagagcttggttaaagccgagccaaaatctgttggtcatattcgaggagcttggtggaaacccatcaactgtctctttggtcaaaagatcagtatcaggagtttgtgctgaagtttctgaataccacccgaatatcaagaactggcaaatcgaaagctacggaaagggacagacatttcatagacccaaggttcatttgaaatgtagtccaggtcaagcaattgcatccatcaaatttgcaagctttggaactcctttaggaacctgcgggagttaccaacaaggagagtgtcacgcagctacctcatacgctatcttagagaggaagtgtgtagggaaagcgagatgcgcagtgacgatatccaacagcaatttcgggaaagacccgtgtccaaatgtgctgaaacggttgactgttgaagcagtttgtgccccagagaaatctgtaagcacttggagaccttaaagacaaccattgagccctttgtctacaaaatgtataaccaaacaatacagagagagttgaagaaaagaaattgtaagctgtgtttaaaatatgtgtgtgtgtgtgttagtttgaacagagacatttgtgggttagagtagtttcagatagataagagagaagagtctgtagagttgtgatgagtctcgggcaattccgtggctcattaaaaacgttcaggccaccggtcaccaccgaccattttaaccggttatggagaccgggattggtgggtctgaatgaagtcagtttaaggtttggttttgatttgtctttgtaatcaactaaagagggttcaggtttaggagaaaggagatcctatggtgacccatttctttcaaacctattgtcgtttcactttctaatttagttctattttccctt

SEQ ID NO: 45041 - protein, 856 aa, Arabidopsis thaliana
  peptide (1)..(856): Ceres Seq. ID no. 12600158
MREMGTGDSASRLILWFCLGFLILGVGFVQCGVTYDRKALLINGQRRILFSGSIHYPRSTPDMWEDLIQKAKDGGIDVIETYVFWNLHEPSPGKYDFEGRNDLVRFVKTIHKAGLYAHLRIGPYVCAEWNFGGFPVWLKYVPGISFRTDNEPFKRAMKGFTERIVELMKSENLFESQGGPIILSQIENEYGRQGQLLGAEGHNYMTWAAKMAIATETGVPWVMCKEDDAPDPVINTCNGFYCDSFAPNKPYKPLIWTEAWSGWFTEFGGPMHHRPVQDLAFGVARFIQKGGSFVNYYMYHGGTNFGRTAGGPFVTTSYDYDAPIDEYGLIRQPKYGHLKELHRAIKMCEKALVSADPVVTSIGNKQQAHVYSAESGDCSAFLANYDTESAARVLFNNVHYNLPPWSISILPDCRNAVFNTAKVGVQTSQMEMLPTDTKNFQWESYLEDLSSLDDSSTFTTHGLLEQINVTRDTSDYLWYMTSVDIGDSESFLHGGELPTLIIQSTGHAVHIFVNGQLSGSAFGTRQNRRFTYQGKINLHSGTNRIALLSVAVGLPNVGGHFESWNTGILGPVALHGLSQGKMDLSWQKWTYQVGLKGEAMNLAFPTNTPSIGWMDASLTVQKPQPLTWHKTYFDAPEGNEPLALDMEGMGKGQIWVNGESIGRYWTAFATGDCSHCSYTGTYKPNKCQTGCGQPTQRWYHVPRAWLKPSQNLLVIFEELGGNPSTVSLVKRSVSGVCAEVSEYHPNIKNWQIESYGKGQTFHRPKVHLKCSPGQAIASIKFASFGTPLGTCGSYQQGECHAATSYAILERKCVGKARCAVTISNSNFGKDPCPNVLKRLTVEAVCAPEKSVSTWRP

SEQ ID NO: 45042 - protein, 853 aa, Arabidopsis thaliana
  peptide (1)..(853): Ceres Seq. ID no. 12600159
MGTGDSASRLILWFCLGFLILGVGFVQCGVTYDRKALLINGQRRILFSGSIHYPRSTPDMWEDLIQKAKDGGIDVIETYVFWNLHEPSPGKYDFEGRNDLVRFVKTIHKAGLYAHLRIGPYVCAEWNFGGFPVWLKYVPGISFRTDNEPFKRAMKGFTERIVELMKSENLFESQGGPIILSQIENEYGRQGQLLGAEGHNYMTWAAKMAIATETGVPWVMCKEDDAPDPVINTCNGFYCDSFAPNKPYKPLIWTEAWSGWFTEFGGPMHHRPVQDLAFGVARFIQKGGSFVNYYMYHGGTNFGRTAGGPFVTTSYDYDAPIDEYGLIRQPKYGHLKELHRAIKMCEKALVSADPVVTSIGNKQQAHVYSAESGDCSAFLANYDTESAARVLFNNVHYNLPPWSISILPDCRNAVFNTAKVGVQTSQMEMLPTDTKNFQWESYLEDLSSLDDSSTFTTHGLLEQINVTRDTSDYLWYMTSVDIGDSESFLHGGELPTLIIQSTGHAVHIFVNGQLSGSAFGTRQNRRFTYQGKINLHSGTNRIALLSVAVGLPNVGGHFESWNTGILGPVALHGLSQGKMDLSWQKWTYQVGLKGEAMNLAFPTNTPSIGWMDASLTVQKPQPLTWHKTYFDAPEGNEPLALDMEGMGKGQIWVNGESIGRYWTAFATGDCSHCSYTGTYKPNKCQTGCGQPTQRWYHVPRAWLKPSQNLLVIFEELGGNPSTVSLVKRSVSGVCAEVSEYHPNIKNWQIESYGKGQTFHRPKVHLKCSPGQAIASIKFASFGTPLGTCGSYQQGECHAATSYAILERKCVGKARCAVTISNSNFGKDPCPNVLKRLTVEAVCAPEKSVSTWRP

SEQ ID NO: 45043 - protein, 794 aa, Arabidopsis thaliana
  peptide (1)..(794): Ceres Seq. ID no. 12600160
MWEDLIQKAKDGGIDVIETYVFWNLHEPSPGKYDFEGRNDLVRFVKTIHKAGLYAHLRIGPYVCAEWNFGGFPVWLKYVPGISFRTDNEPFKRAMKGFTERIVELMKSENLFESQGGPIILSQIENEYGRQGQLLGAEGHNYMTWAAKMAIATETGVPWVMCKEDDAPDPVINTCNGFYCDSFAPNKPYKPLIWTEAWSGWFTEFGGPMHHRPVQDLAFGVARFIQKGGSFVNYYMYHGGTNFGRTAGGPFVTTSYDYDAPIDEYGLIRQPKYGHLKELHRAIKMCEKALVSADPVVTSIGNKQQAHVYSAESGDCSAFLANYDTESAARVLFNNVHYNLPPWSISILPDCRNAVFNTAKVGVQTSQMEMLPTDTKNFQWESYLEDLSSLDDSSTFTTHGLLEQINVTRDTSDYLWYMTSVDIGDSESFLHGGELPTLIIQSTGHAVHIFVNGQLSGSAFGTRQNRRFTYQGKINLHSGTNRIALLSVAVGLPNVGGHFESWNTGILGPVALHGLSQGKMDLSWQKWTYQVGLKGEAMNLAFPTNTPSIGWMDASLTVQKPQPLTWHKTYFDAPEGNEPLALDMEGMGKGQIWVNGESIGRYWTAFATGDCSHCSYTGTYKPNKCQTGCGQPTQRWYHVPRAWLKPSQNLLVIFEELGGNPSTVSLVKRSVSGVCAEVSEYHPNIKNWQIESYGKGQTFHRPKVHLKCSPGQAIASIKFASFGTPLGTCGSYQQGECHAATSYAILERKCVGKARCAVTISNSNFGKDPCPNVLKRLTVEAVCAPEKSVSTWRP

SEQ ID NO: 45044 - DNA, 2350 bp, Arabidopsis thaliana
  misc_feature (1)..(2350): Ceres Seq. ID no. 12560164
  misc_feature (1)..(2350): Ortholog of  Ceres SEQ ID NO 14310556 as cited in SEQ ID NO 54965
aaaagcaacgcaaagctttacactttcctttctcctttctctttcactgcaaatttctcctacccttaaaaatcgaaacttcaagagaagaaattgaggaatcaaaaattccctagattcgagggttcttctctcacttgttctatcttcctgcttcatcggaatcgtttgatttgtgttctttacattttctccgactcaacttatggtctgaattttacctagtgcaaggcattagagaaattggtacagtcgtgtgacatgtgaagattgttgttgtacatatagctgaaggaactctttgctgatttttacataaaagagtgtatcttgatatttggtttgcgatcgagttaagtggaagcgatggatactgccagagcatggctgaagaaattaaagtctaaagggaaagagaaatcttcgaataagaaggaaacttctagaggaaatgttaaggagggatcaaaaacagctggaggtgaagaagctgtgtctaatgtgacaaagcagaaggctgctgctgcgaaacagtatattgaaaatcattacaaaaaacaagttcaaagtcagcagcaaagaaaagagcggcgtgatatgctggaaaataagttagctgctgcagaagtctctgaggaagagcaaaagaatctgcttaaggatctagagaagaaggaaactgaatacatgcgccgtcagagacataaaatgggaactgatgacttcgagccattgacaatgataggaaagggggcttttggagaggttaggatatgtagggagaagacaacaggcaatgtctatgcgatgaaaaagcttaagaaatctgagatgctccgtagaggccaggtggagcatgtgaaagcagagagaaatttacttgcagaggttgacagcaattgcattgtgaagctgtattgttcttttcaagatgaagagtatttgtatcttattatggagtatctacctggtggagatatgatgacattacttatgaggaaagacacacttactgaagatgaggcaagattttatgttggggaaactgtcttagctatcgagtccattcataagcacaattatatccacagagatatcaagcctgataatctgctactcgacagaagcggtcacatgaagttatccgattttggattatgtaagccattagattgtagtattctccaggaaaaagatttcgtagttgcacacaaccttagtggggctctacaaagtgatggccgccctgtggcaccgagacgtacccgctctcaaatggaacaattacaaaactggcagagaaatagaaggatgcttgcttattctacagttggaactcctgactatattgctccagaagttttgttgaagaaaggatatggcatggaatgtgattggtggtcacttggtgcgatcatgtatgaaatgcttgtggggtttccaccattttattcagacgagccaatgacaacttgtagaaagatagtaaattggaaaaattatttaaaattccctgatgaggttaggctatcaccagaagccaaggatctaatttgtagacttttatgcaacgtagaacaaaggattggaacaaaaggagcaaatgaaattaaggaacacccttggttcagtggtgtcgaatgggaaaagttgtatcagatgaaggctgcttttattccccaagttaatgacgagctggacacccaaaatttcgaaaaattcgaagagactgataagcaagttccgaagacgccaaaatcaggtccatggagaaagatgctctcatccaaagacataaactttgtgggttatacttacaagaacgttgaaatcgtaaaccatgatcaattaccagggatagctgagctgaagaagaagagcacaaagccaaagcggccatcaattaaatccctctttgaggatgaatcagccagtagcaccacaagccaccaaggaagctttatgaaactcttgccaacacaaatcgaagttccagagaaagaagacaaatcaagctcatctagtgaaaccctatcatcttccaccacacgtttcgacaatgccacatcctaaaccagactctttgctacactttggtcccggttaacacaccaaaacacggtttgaggtggcggatttacggttggagatagtacagtttccattgtggcggtgaaggctattgtgtgagaagattaaggatttgttcaacagtttctacataggataatatttggttgttcaaaaggtttagtttgaagcaaaaggaagtaaatagtcattttcagaatgtggttttatttatttgtttgattgttttgtttgggtaaaaatcaaatttggtttgttt

SEQ ID NO: 45045 - protein, 568 aa, Arabidopsis thaliana
  peptide (1)..(568): Ceres Seq. ID no. 12560165
MDTARAWLKKLKSKGKEKSSNKKETSRGNVKEGSKTAGGEEAVSNVTKQKAAAAKQYIENHYKKQVQSQQQRKERRDMLENKLAAAEVSEEEQKNLLKDLEKKETEYMRRQRHKMGTDDFEPLTMIGKGAFGEVRICREKTTGNVYAMKKLKKSEMLRRGQVEHVKAERNLLAEVDSNCIVKLYCSFQDEEYLYLIMEYLPGGDMMTLLMRKDTLTEDEARFYVGETVLAIESIHKHNYIHRDIKPDNLLLDRSGHMKLSDFGLCKPLDCSILQEKDFVVAHNLSGALQSDGRPVAPRRTRSQMEQLQNWQRNRRMLAYSTVGTPDYIAPEVLLKKGYGMECDWWSLGAIMYEMLVGFPPFYSDEPMTTCRKIVNWKNYLKFPDEVRLSPEAKDLICRLLCNVEQRIGTKGANEIKEHPWFSGVEWEKLYQMKAAFIPQVNDELDTQNFEKFEETDKQVPKTPKSGPWRKMLSSKDINFVGYTYKNVEIVNHDQLPGIAELKKKSTKPKRPSIKSLFEDESASSTTSHQGSFMKLLPTQIEVPEKEDKSSSSSETLSSSTTRFDNATS

SEQ ID NO: 45046 - protein, 491 aa, Arabidopsis thaliana
  peptide (1)..(491): Ceres Seq. ID no. 12560166
MLENKLAAAEVSEEEQKNLLKDLEKKETEYMRRQRHKMGTDDFEPLTMIGKGAFGEVRICREKTTGNVYAMKKLKKSEMLRRGQVEHVKAERNLLAEVDSNCIVKLYCSFQDEEYLYLIMEYLPGGDMMTLLMRKDTLTEDEARFYVGETVLAIESIHKHNYIHRDIKPDNLLLDRSGHMKLSDFGLCKPLDCSILQEKDFVVAHNLSGALQSDGRPVAPRRTRSQMEQLQNWQRNRRMLAYSTVGTPDYIAPEVLLKKGYGMECDWWSLGAIMYEMLVGFPPFYSDEPMTTCRKIVNWKNYLKFPDEVRLSPEAKDLICRLLCNVEQRIGTKGANEIKEHPWFSGVEWEKLYQMKAAFIPQVNDELDTQNFEKFEETDKQVPKTPKSGPWRKMLSSKDINFVGYTYKNVEIVNHDQLPGIAELKKKSTKPKRPSIKSLFEDESASSTTSHQGSFMKLLPTQIEVPEKEDKSSSSSETLSSSTTRFDNATS

SEQ ID NO: 45047 - protein, 461 aa, Arabidopsis thaliana
  peptide (1)..(461): Ceres Seq. ID no. 12560167
MRRQRHKMGTDDFEPLTMIGKGAFGEVRICREKTTGNVYAMKKLKKSEMLRRGQVEHVKAERNLLAEVDSNCIVKLYCSFQDEEYLYLIMEYLPGGDMMTLLMRKDTLTEDEARFYVGETVLAIESIHKHNYIHRDIKPDNLLLDRSGHMKLSDFGLCKPLDCSILQEKDFVVAHNLSGALQSDGRPVAPRRTRSQMEQLQNWQRNRRMLAYSTVGTPDYIAPEVLLKKGYGMECDWWSLGAIMYEMLVGFPPFYSDEPMTTCRKIVNWKNYLKFPDEVRLSPEAKDLICRLLCNVEQRIGTKGANEIKEHPWFSGVEWEKLYQMKAAFIPQVNDELDTQNFEKFEETDKQVPKTPKSGPWRKMLSSKDINFVGYTYKNVEIVNHDQLPGIAELKKKSTKPKRPSIKSLFEDESASSTTSHQGSFMKLLPTQIEVPEKEDKSSSSSETLSSSTTRFDNATS

SEQ ID NO: 45048 - DNA, 1497 bp, Arabidopsis thaliana
  misc_feature (1)..(1497): Ceres Seq. ID no. 13575818
  misc_feature (1)..(1497): Ortholog of  Ceres SEQ ID NO 13646963 as cited in SEQ ID NO 20658
  misc_feature (1)..(1497): Ortholog of  Ceres SEQ ID NO 15169278 as cited in SEQ ID NO 58762
ggatctcacttgccttcttcactcactctgcagcaacttcgagatcaagttaaagaatggcggcaacatcactattgtacaatcagctcaaggctgctgaaccattcttcttgttggctggtccaaatgtgattgaatccgaggaacatattcttcgaatggcaaagcacattaaagacatttccacaaaagttgggctgcccctggttttcaagtcaagttttgataaagctaacagaacttcttcaaagtcatttcgtggtcctggcatggccgagggtctgaagattcttgagaaggtgaaggtagcatatgatctaccaatagtaactgatgttcatgaatcaagccagtgtgaagcagttggcaaggttgcagatataattcagattccagcattcttatgtcgccagacagatcttctggttgcagcagcacaaaccggaaaaattatcaatattaagaaaggacaattctgtgctccttctgtcatggagaattcagctgagaagatcagactggctgggaatccaaatgttatggtttgtgaaagaggaaccatgttcggatacaatgatttgatagtagatccacgaaacttcgagtggatgagagaagctaattgtcctgttgtcgctgatataacccattcactacaacaacctgcaggcaagaagttggatggtggtggtgttgcaagtggaggccttcgcgagttaataccatgcattgcaagaacagctgtagcagttggcgtcgatggaattttcatggaggttcatgatgatcctctaagtgctccagttgatggtccaactcaatggcctttgcgccatctagaagaactcctggaagagctcattgcgattgcgagggttacaaaagggaagcagcggcttcaaatcgaccttacaccctaccgtgattaaaatcaaaggctcagtgatcgcgaggttggtgacccaaacgggcatatatgatacgactttctcatcatttaaataatccccacaaaaaaactgtttataatcttctcactttcagtagagactagttgcaaaaagggtgaacgttttaaagaagcaccatgttaatgcatcatctgtcatcactgttcttgtttacaagaagttaagagatcagagattgcttctgaagaactgaaaatgttgggcttctcttatattggcccggcaatattcttattcatttgtctgaaacttttaggtctactcgcggacatttgggtccccatcaaaatcccagagattaaagatgatctagtcagtgatgagcctttgtttctgtttcctccaccaacattcgcttcaaaataattcgaattaagaaagtattgagctctatactatagtcatactcagaaatacggttgtatatgtgtggtttctctctgattttgtacttgggataatatatctgttgaaccctgtaatttctcgtgaacgggatgatagtcgtgcttgatttgcgttggat

SEQ ID NO: 45049 - protein, 290 aa, Arabidopsis thaliana
  peptide (1)..(290): Ceres Seq. ID no. 13575819
MAATSLLYNQLKAAEPFFLLAGPNVIESEEHILRMAKHIKDISTKVGLPLVFKSSFDKANRTSSKSFRGPGMAEGLKILEKVKVAYDLPIVTDVHESSQCEAVGKVADIIQIPAFLCRQTDLLVAAAQTGKIINIKKGQFCAPSVMENSAEKIRLAGNPNVMVCERGTMFGYNDLIVDPRNFEWMREANCPVVADITHSLQQPAGKKLDGGGVASGGLRELIPCIARTAVAVGVDGIFMEVHDDPLSAPVDGPTQWPLRHLEELLEELIAIARVTKGKQRLQIDLTPYRD

SEQ ID NO: 45050 - protein, 256 aa, Arabidopsis thaliana
  peptide (1)..(256): Ceres Seq. ID no. 13575820
MAKHIKDISTKVGLPLVFKSSFDKANRTSSKSFRGPGMAEGLKILEKVKVAYDLPIVTDVHESSQCEAVGKVADIIQIPAFLCRQTDLLVAAAQTGKIINIKKGQFCAPSVMENSAEKIRLAGNPNVMVCERGTMFGYNDLIVDPRNFEWMREANCPVVADITHSLQQPAGKKLDGGGVASGGLRELIPCIARTAVAVGVDGIFMEVHDDPLSAPVDGPTQWPLRHLEELLEELIAIARVTKGKQRLQIDLTPYRD

SEQ ID NO: 45051 - protein, 219 aa, Arabidopsis thaliana
  peptide (1)..(219): Ceres Seq. ID no. 13575821
MAEGLKILEKVKVAYDLPIVTDVHESSQCEAVGKVADIIQIPAFLCRQTDLLVAAAQTGKIINIKKGQFCAPSVMENSAEKIRLAGNPNVMVCERGTMFGYNDLIVDPRNFEWMREANCPVVADITHSLQQPAGKKLDGGGVASGGLRELIPCIARTAVAVGVDGIFMEVHDDPLSAPVDGPTQWPLRHLEELLEELIAIARVTKGKQRLQIDLTPYRD

SEQ ID NO: 45052 - DNA, 1976 bp, Arabidopsis thaliana
  misc_feature (1)..(1976): Ceres Seq. ID no. 13575822
  misc_feature (1)..(1976): Ortholog of  Ceres SEQ ID NO 13595900 as cited in SEQ ID NO 69289
gaaaagaggagagaagaaagaaaaggaaaagacccaaactttgagaaacaccttcattctcttccttccttcatcaaagcttaaccttttttaatttttatcctcgttttttcaattcgcgtgaagagacagagagagagaaagataaagctagaagagaatcgacattacgaatcttttgttccagatcgtgagagaggaggagttggaagaatgaagatgactattgggtctttgttccaaccctaattttgcagattaatttcgtttttgttgatttctgttttgggtttgcgttgctgattccggtggattaaagggttctttttggagagcacaaatttgttgggtttttttttggggaaagagaattaaaattttctcctttagagtcggcgtttgggttgagagagattattatagtttttagggttttggatttctgaattggtgattatcgatggagcctcgtgtgggaaacaaatatcgtctcggccggaaaattggaagcggttcatttggagagatctatcttggtactcatattcaaacgaatgaagaagttgcaatcaagcttgaaaatgtgaagacgaaacatcctcagctgctctatgaatccaagttatacagaattctacagggaggaactggtgttccaaatatcaagtggtttggtgttgaaggtgactacaatactctggtgatggatttacttgggcctagtcttgaagacttgttcaatttctgtagcaggaaactttccttgaagtctgtcctcatgctcgcagatcaaatgatcaaccgtgttgagtatttccattcgaaatctttccttcaccgagatcttaagccagacaattttcttatgggtttaggaaggcgcgcaaaccaggtacacatcatcgactttggtcttgcaaagaaataccgggataatactacccaccagcacattccctacagagaaaataagaatctgactggaactgcaagatatgctagtatgaacactcacttgggaattgagcaaagccgaagggatgacctagaatctcttggttacattctcatgtatttccttaaaggaagtcttccatggcaaggacttaaagctggaaccaagaaacaaaagtatgagagaatcagtgaaaagaaagtctctacatcaattgagtccttgtgccgtggttacccatccgaattcgcatcgtacttccactactgccgatcgcttcggtttgatgataaaccagattacggttacctcaaaagaatattccgggacctctttatccgcgaagggtttcaattcgattatgtctttgactggaccatattgaaatatcaacagtcacagctaaccgctcctccatcccgtggcctagtaagtcctgcggttggaaccagtgcgggtttgcctcccggactaaccagcatcgatagatacggaggcgaggaagaaggaggaagaccaccaatggattcgtcacgaaggagaatgtcaggagctcttgaaaactctggcaacttgtcatctagaggcccaatgatgccaagctcgtcactgtttgcacaatcagcaggatcatcgaggagagtaacgtcagaggagctacagagatgccgaaccggcgccggtttaagaaactctccggtagttacaacgccggaagggaagagatcttcttccaccagaaaacattacgattctgctatcaaaggcattgagactctccaagtctccgacgaaaggtttcaccaccactgatacatcatccatccatcgcttagcaaagttgtcgtatttgttcagagctttttatttgctttcgactctatattggagaaacgagaaaatttgctgatttttttttgtttgctttggttttttctaatttttattcatctggttcttttactgcggagggaaattaaattcagtgtttggaattggaacatcgtatatatagtttttt

SEQ ID NO: 45053 - protein, 435 aa, Arabidopsis thaliana
  peptide (1)..(435): Ceres Seq. ID no. 13575823
MEPRVGNKYRLGRKIGSGSFGEIYLGTHIQTNEEVAIKLENVKTKHPQLLYESKLYRILQGGTGVPNIKWFGVEGDYNTLVMDLLGPSLEDLFNFCSRKLSLKSVLMLADQMINRVEYFHSKSFLHRDLKPDNFLMGLGRRANQVHIIDFGLAKKYRDNTTHQHIPYRENKNLTGTARYASMNTHLGIEQSRRDDLESLGYILMYFLKGSLPWQGLKAGTKKQKYERISEKKVSTSIESLCRGYPSEFASYFHYCRSLRFDDKPDYGYLKRIFRDLFIREGFQFDYVFDWTILKYQQSQLTAPPSRGLVSPAVGTSAGLPPGLTSIDRYGGEEEGGRPPMDSSRRRMSGALENSGNLSSRGPMMPSSSLFAQSAGSSRRVTSEELQRCRTGAGLRNSPVVTTPEGKRSSSTRKHYDSAIKGIETLQVSDERFHHH

SEQ ID NO: 45054 - protein, 354 aa, Arabidopsis thaliana
  peptide (1)..(354): Ceres Seq. ID no. 13575824
MDLLGPSLEDLFNFCSRKLSLKSVLMLADQMINRVEYFHSKSFLHRDLKPDNFLMGLGRRANQVHIIDFGLAKKYRDNTTHQHIPYRENKNLTGTARYASMNTHLGIEQSRRDDLESLGYILMYFLKGSLPWQGLKAGTKKQKYERISEKKVSTSIESLCRGYPSEFASYFHYCRSLRFDDKPDYGYLKRIFRDLFIREGFQFDYVFDWTILKYQQSQLTAPPSRGLVSPAVGTSAGLPPGLTSIDRYGGEEEGGRPPMDSSRRRMSGALENSGNLSSRGPMMPSSSLFAQSAGSSRRVTSEELQRCRTGAGLRNSPVVTTPEGKRSSSTRKHYDSAIKGIETLQVSDERFHHH

SEQ ID NO: 45055 - protein, 329 aa, Arabidopsis thaliana
  peptide (1)..(329): Ceres Seq. ID no. 13575825
MLADQMINRVEYFHSKSFLHRDLKPDNFLMGLGRRANQVHIIDFGLAKKYRDNTTHQHIPYRENKNLTGTARYASMNTHLGIEQSRRDDLESLGYILMYFLKGSLPWQGLKAGTKKQKYERISEKKVSTSIESLCRGYPSEFASYFHYCRSLRFDDKPDYGYLKRIFRDLFIREGFQFDYVFDWTILKYQQSQLTAPPSRGLVSPAVGTSAGLPPGLTSIDRYGGEEEGGRPPMDSSRRRMSGALENSGNLSSRGPMMPSSSLFAQSAGSSRRVTSEELQRCRTGAGLRNSPVVTTPEGKRSSSTRKHYDSAIKGIETLQVSDERFHHH

SEQ ID NO: 45056 - DNA, 2186 bp, Arabidopsis thaliana
  misc_feature (1)..(2186): Ceres Seq. ID no. 13575826
  misc_feature (1)..(2186): Ortholog of  Ceres SEQ ID NO 13663839 as cited in SEQ ID NO 60834
  misc_feature (1)..(2186): Ortholog of  Ceres SEQ ID NO 14313284 as cited in SEQ ID NO 67146
  misc_feature (1)..(2186): Ortholog of  Ceres SEQ ID NO 14308925 as cited in SEQ ID NO 0
aatacttctctctgctctcaagataattttgttctctcaatttcattcttaaaccctaattcttcgtttttatccgatctacgaaaatggcggacgcagagacctttgctttccaagctgagatcaaccagttgctttccctcatcatcaataccttttactccaacaaggagatcttcctccgtgaactcatcagtaactcctccgatgctttggacaagattaggttcgagtccttgacggataagagcaagctcgatggtcagcctgagcttttcattcatatcattccggacaagactaacaacaccttgaccattatcgatagtggtattgggatgaccaaggctgatttggtgaacaaccttggaacaattgcaaggtctggtaccaaggagttcatggaggcattggctgctggagctgatgttagcatgattggtcaatttggtgttggtttctactctgcttacttggttgctgacaaggttgttgttactaccaagcacaacgacgatgagcagtatgtgtgggagtctcaggccggtggatctttcacggtgaccagagacacctctggtgaggctcttggtagaggaacaaagatgatcctttacctcaaggaagaccagatggagtacattgaggagcgaaggcttaaggatttggtgaagaagcactctgagttcatcagctacccaatctctctctggattgagaagaccattgagaaggagatctctgatgatgaagaggaggaagagaagaaggatgaggaaggcaaggttgaggaaattgatgaggagaaagaaaaggaggagaagaaaaagaagaagattaaggaggttactcatgagtgggatttggtgaacaaacagaagcctatctggatgaggaagccagaggagatcaacaaggaggagtacgctgctttctacaagagtttgagcaatgattgggaggagcatttggctgtgaagcatttctctgttgaaggacagcttgagttcaaagctatcctctttgttcccaagagagctcctttcgatctctttgacactaagaagaagcccaacaacatcaagctctatgtccgtcgtgtcttcatcatggacaactgtgaagacatcatccctgattaccttgggtttgtcaagggtatcgttgactctgaagatcttcctctcaacatctcaagagaaacattgcagcagaacaagatcctcaaggtcatccgcaagaaccttgtgaagaagtgtcttgagctcttctttgagattgccgagaacaaggaggactacaacaagttctatgaggctttctctaaaaacctgaagctcggcatccacgaggactcccaaaacagaaccaagattgctgagttgctccgttaccactcaaccaagagcggtgatgaattgaccagtctcaaggactacgtgacaaggatgaaggaaggtcagaacgagatcttctacatcaccggtgagagcaaaaaggccgtggagaactctcccttcctagagaagctcaagaagaagggttacgaagtcctctacatggttgacgctattgatgagtatgctattggtcagctcaaggaattcgagggaaagaagcttgtctctgcaaccaaggaaggtctgaagctggaagagactgatgacgagaagaagaagaaagaagagctcaaggagaagtttgagggactctgcaaagtgattaaggacgttttgggagacaaggtcgagaaggttatcgtctctgaccgtgtggtggactcaccttgctgtctagtaacaggcgagtatggctggactgcaaacatggagaggatcatgaaagctcaagctttgaaggatagcaacacgggtggttacatgtcaagcaagaagacaatggaaattaacccagagaactcgatcatggatgagctgagaaagagagctgaagcggacaagaacgataagtctgtgaaggatcttgtgcttcttctctttgagaccgctcttctcacctctggtttcagccttgatgagcccaacacttttggaagcagaatccacaggatgttgaagcttggattgagcattgaagaggatgatgccgttgaagctgatgctgagatgcctccgcttgaagatgatgctgatgctgaaggtagcaagatggaggaagtcgactaa

SEQ ID NO: 45057 - protein, 699 aa, Arabidopsis thaliana
  peptide (1)..(699): Ceres Seq. ID no. 15222635
MADAETFAFQAEINQLLSLIINTFYSNKEIFLRELISNSSDALDKIRFESLTDKSKLDGQPELFIHIIPDKTNNTLTIIDSGIGMTKADLVNNLGTIARSGTKEFMEALAAGADVSMIGQFGVGFYSAYLVADKVVVTTKHNDDEQYVWESQAGGSFTVTRDTSGEALGRGTKMILYLKEDQMEYIEERRLKDLVKKHSEFISYPISLWIEKTIEKEISDDEEEEEKKDEEGKVEEIDEEKEKEEKKKKKIKEVTHEWDLVNKQKPIWMRKPEEINKEEYAAFYKSLSNDWEEHLAVKHFSVEGQLEFKAILFVPKRAPFDLFDTKKKPNNIKLYVRRVFIMDNCEDIIPDYLGFVKGIVDSEDLPLNISRETLQQNKILKVIRKNLVKKCLELFFEIAENKEDYNKFYEAFSKNLKLGIHEDSQNRTKIAELLRYHSTKSGDELTSLKDYVTRMKEGQNEIFYITGESKKAVENSPFLEKLKKKGYEVLYMVDAIDEYAIGQLKEFEGKKLVSATKEGLKLEETDDEKKKKEELKEKFEGLCKVIKDVLGDKVEKVIVSDRVVDSPCCLVTGEYGWTANMERIMKAQALKDSNTGGYMSSKKTMEINPENSIMDELRKRAEADKNDKSVKDLVLLLFETALLTSGFSLDEPNTFGSRIHRMLKLGLSIEEDDAVEADAEMPPLEDDADAEGSKMEEVD

SEQ ID NO: 45058 - protein, 615 aa, Arabidopsis thaliana
  peptide (1)..(615): Ceres Seq. ID no. 15222636
MTKADLVNNLGTIARSGTKEFMEALAAGADVSMIGQFGVGFYSAYLVADKVVVTTKHNDDEQYVWESQAGGSFTVTRDTSGEALGRGTKMILYLKEDQMEYIEERRLKDLVKKHSEFISYPISLWIEKTIEKEISDDEEEEEKKDEEGKVEEIDEEKEKEEKKKKKIKEVTHEWDLVNKQKPIWMRKPEEINKEEYAAFYKSLSNDWEEHLAVKHFSVEGQLEFKAILFVPKRAPFDLFDTKKKPNNIKLYVRRVFIMDNCEDIIPDYLGFVKGIVDSEDLPLNISRETLQQNKILKVIRKNLVKKCLELFFEIAENKEDYNKFYEAFSKNLKLGIHEDSQNRTKIAELLRYHSTKSGDELTSLKDYVTRMKEGQNEIFYITGESKKAVENSPFLEKLKKKGYEVLYMVDAIDEYAIGQLKEFEGKKLVSATKEGLKLEETDDEKKKKEELKEKFEGLCKVIKDVLGDKVEKVIVSDRVVDSPCCLVTGEYGWTANMERIMKAQALKDSNTGGYMSSKKTMEINPENSIMDELRKRAEADKNDKSVKDLVLLLFETALLTSGFSLDEPNTFGSRIHRMLKLGLSIEEDDAVEADAEMPPLEDDADAEGSKMEEVD

SEQ ID NO: 45059 - protein, 594 aa, Arabidopsis thaliana
  peptide (1)..(594): Ceres Seq. ID no. 15222637
MEALAAGADVSMIGQFGVGFYSAYLVADKVVVTTKHNDDEQYVWESQAGGSFTVTRDTSGEALGRGTKMILYLKEDQMEYIEERRLKDLVKKHSEFISYPISLWIEKTIEKEISDDEEEEEKKDEEGKVEEIDEEKEKEEKKKKKIKEVTHEWDLVNKQKPIWMRKPEEINKEEYAAFYKSLSNDWEEHLAVKHFSVEGQLEFKAILFVPKRAPFDLFDTKKKPNNIKLYVRRVFIMDNCEDIIPDYLGFVKGIVDSEDLPLNISRETLQQNKILKVIRKNLVKKCLELFFEIAENKEDYNKFYEAFSKNLKLGIHEDSQNRTKIAELLRYHSTKSGDELTSLKDYVTRMKEGQNEIFYITGESKKAVENSPFLEKLKKKGYEVLYMVDAIDEYAIGQLKEFEGKKLVSATKEGLKLEETDDEKKKKEELKEKFEGLCKVIKDVLGDKVEKVIVSDRVVDSPCCLVTGEYGWTANMERIMKAQALKDSNTGGYMSSKKTMEINPENSIMDELRKRAEADKNDKSVKDLVLLLFETALLTSGFSLDEPNTFGSRIHRMLKLGLSIEEDDAVEADAEMPPLEDDADAEGSKMEEVD

SEQ ID NO: 45060 - DNA, 1173 bp, Arabidopsis thaliana
  misc_feature (1)..(1173): Ceres Seq. ID no. 12560207
  misc_feature (1)..(1173): Ortholog of  Ceres SEQ ID NO 14308575 as cited in SEQ ID NO 58782
atgggaagatctcctagctcagatgaaactggtctgaagaaaggtccatggttgcctgaagaagatgataaactgatcaattatattcacaaacatggccatagcagctggagtgcccttcccaagctcgctggtcttaacaggtgtgggaagagttgcaggctacgatggacaaactatttgagaccagacattaagcgaggaaaattctctgcggaggaagaagagaccatcctgaaccttcatgcggttctaggcaacaagtggtcaatgattgcaagccacttacctggacgaactgacaatgagatcaagaatttctggaatactcatttgaagaaaaagctgattcagatgggttttgaccccatgacccatcagccaagaaccgatgatatcttctcaagtttatctcagctcatgtctctgtctaacctaagaggacttgttgatctgcagcaacagtttccaatggaagaccaagcgctacttaatctccaaactgagatggctaagctccaattgttccaataccttcttcaaccttctcctgctcccatgagtatcaacaacattaaccctaacattctcaatctcctcatcaaagaaaactccgttaccagtaatatcgacctcggtttcctctcctctcatcttcaagacttcaacaacaacaacctcccttccctcaaaaccctagacgataatcacttcagtcaaaacacttctccaatatggctccatgaaccaccgagcttgaaccaaactatgttgcctacgcatgatccttgtgctcagagtgtagatggtttcggcagcaaccaagcctcctcaagccatgatcaagaagtagcagtcacagactctgtagattggcctgatcatcatctatttgatgattccatgtttccagacatttcttatcaatcttaaggtatgtatgtatgtatatgtttcacaagaagttgactggatttgtttggtgtcgctctgcatgtggttctatatctatatacgatgattcatgatgtgtgataatgtcttagaatgtagtacatgtgttcttatgtatttctcatacatgttatttgtgttcttatagaacattttatatgtttgaatgtatcttcattaccttagtatgtagagagaccaatcaacgattgttcagat

SEQ ID NO: 45061 - protein, 310 aa, Arabidopsis thaliana
  peptide (1)..(310): Ceres Seq. ID no. 12560208
MGRSPSSDETGLKKGPWLPEEDDKLINYIHKHGHSSWSALPKLAGLNRCGKSCRLRWTNYLRPDIKRGKFSAEEEETILNLHAVLGNKWSMIASHLPGRTDNEIKNFWNTHLKKKLIQMGFDPMTHQPRTDDIFSSLSQLMSLSNLRGLVDLQQQFPMEDQALLNLQTEMAKLQLFQYLLQPSPAPMSINNINPNILNLLIKENSVTSNIDLGFLSSHLQDFNNNNLPSLKTLDDNHFSQNTSPIWLHEPPSLNQTMLPTHDPCAQSVDGFGSNQASSSHDQEVAVTDSVDWPDHHLFDDSMFPDISYQS

SEQ ID NO: 45062 - protein, 220 aa, Arabidopsis thaliana
  peptide (1)..(220): Ceres Seq. ID no. 12560209
MIASHLPGRTDNEIKNFWNTHLKKKLIQMGFDPMTHQPRTDDIFSSLSQLMSLSNLRGLVDLQQQFPMEDQALLNLQTEMAKLQLFQYLLQPSPAPMSINNINPNILNLLIKENSVTSNIDLGFLSSHLQDFNNNNLPSLKTLDDNHFSQNTSPIWLHEPPSLNQTMLPTHDPCAQSVDGFGSNQASSSHDQEVAVTDSVDWPDHHLFDDSMFPDISYQS

SEQ ID NO: 45063 - protein, 192 aa, Arabidopsis thaliana
  peptide (1)..(192): Ceres Seq. ID no. 12560210
MGFDPMTHQPRTDDIFSSLSQLMSLSNLRGLVDLQQQFPMEDQALLNLQTEMAKLQLFQYLLQPSPAPMSINNINPNILNLLIKENSVTSNIDLGFLSSHLQDFNNNNLPSLKTLDDNHFSQNTSPIWLHEPPSLNQTMLPTHDPCAQSVDGFGSNQASSSHDQEVAVTDSVDWPDHHLFDDSMFPDISYQS

SEQ ID NO: 45064 - DNA, 1800 bp, Arabidopsis thaliana
  misc_feature (1)..(1800): Ceres Seq. ID no. 12560219
  misc_feature (1)..(1800): Ortholog of  Ceres SEQ ID NO 13600220 as cited in SEQ ID NO 0
attagaaatggaacagttttttgctctgtttaccatttttctatcttttgctttccccgggagatgcagcgacgttttcagcagatctgatttccccgagggattcctcttcggagctggcacttctgcttatcagtgggaaggagctgctgcggaagatggaaggaaacctagcgtgtgggacactctttgttactctcgtaacattggtaacggagatgtaacatgtgatgggtatcacaagtataaggaagatgtgaagctgatggtagacactaacttagatgccttcagattctctatatcttggtctaggctaatacctaatggaagaggctctgttaaccaaaagggtctacagttctacaagaacctcatcagcgaattaataacccatgggattgaaccacatgttacactgtatcactacgatcatcctcagtatcttgaggatgaatatggaggatgggtcaacaatatgatgatcaaagacttcactgcttatgtagatgtttgtttcagagagtttgggaactatgtcaaattctggaccactatcaatgaggctaatgtatttactattggaggttacaacgatggggatacaccgcctggtcgttgttctttaccgggcaaaaactgcttgttagggaactcttctactgaaacatatattgtaggccataacttacttcttgcgcacgcctctgcttcaagactatataagcaaaagtacaaggataagcagggtggttccataggctttggcttatatttaatggggttgactccttctacaagctccaaggatgatgccattgcaactcaaagagccaaagatttctatttcggttggtgagtcaggcacaaacagttctaaaaggtttttcaaattgggcaacatgtgcaagatcttaagctgaaaagaaagaaaatctgctctttaaaactcaggttccttggacctcttatatttggagactatccagatacaatgaaaagaaccattggatcaagactgccagttttctcagaggaagaatcagaacaagttaaaggctcatctgacttcataggaatcaatcattagtttgcggcttctgtcacaaacatcaaattcaaaccttctatttctggaaacccggacttctactcagacatgggcgcatatgtgacttgtatgaatcagactcattcttttgtataacaaaaaaaaaacctcttttatctttataatttgttactactcattttttcttcgttttactggttagaagaccttgggaatttttcagttatagaggtatcctgttgctccgtggactatggaagctgtcctagagtatataaagcagagctatgacaatcctcctgtctacattcttgagaatggtacaccgatgacgcaacacaaggatacacatagggtggaatacatgaatgcttacattggtggtgtgctcaaatccataaggaatggatcagacactagaggctattttgtatggtcatttatggatttattcgagcttatagggcggtacgattatggttatggattgtactctgtaaatttcagtgatccacatcgcaagagatctcctagactctctgctcattggtactctgattttctcaagggcaaaacttcttttcttgattccaaaggcatcaaggaattgcagagcaacttctcttcttcctcttagtactgtgatgaaataactcttatgttctactgaatttagactacttgtcatgagagccacttctttttttctataaattctaaattaaact

SEQ ID NO: 45065 - protein, 285 aa, Arabidopsis thaliana
  peptide (1)..(285): Ceres Seq. ID no. 12560220
LEMEQFFALFTIFLSFAFPGRCSDVFSRSDFPEGFLFGAGTSAYQWEGAAAEDGRKPSVWDTLCYSRNIGNGDVTCDGYHKYKEDVKLMVDTNLDAFRFSISWSRLIPNGRGSVNQKGLQFYKNLISELITHGIEPHVTLYHYDHPQYLEDEYGGWVNNMMIKDFTAYVDVCFREFGNYVKFWTTINEANVFTIGGYNDGDTPPGRCSLPGKNCLLGNSSTETYIVGHNLLLAHASASRLYKQKYKDKQGGSIGFGLYLMGLTPSTSSKDDAIATQRAKDFYFGW

SEQ ID NO: 45066 - protein, 283 aa, Arabidopsis thaliana
  peptide (1)..(283): Ceres Seq. ID no. 12560221
MEQFFALFTIFLSFAFPGRCSDVFSRSDFPEGFLFGAGTSAYQWEGAAAEDGRKPSVWDTLCYSRNIGNGDVTCDGYHKYKEDVKLMVDTNLDAFRFSISWSRLIPNGRGSVNQKGLQFYKNLISELITHGIEPHVTLYHYDHPQYLEDEYGGWVNNMMIKDFTAYVDVCFREFGNYVKFWTTINEANVFTIGGYNDGDTPPGRCSLPGKNCLLGNSSTETYIVGHNLLLAHASASRLYKQKYKDKQGGSIGFGLYLMGLTPSTSSKDDAIATQRAKDFYFGW

SEQ ID NO: 45067 - protein, 197 aa, Arabidopsis thaliana
  peptide (1)..(197): Ceres Seq. ID no. 12560222
MVDTNLDAFRFSISWSRLIPNGRGSVNQKGLQFYKNLISELITHGIEPHVTLYHYDHPQYLEDEYGGWVNNMMIKDFTAYVDVCFREFGNYVKFWTTINEANVFTIGGYNDGDTPPGRCSLPGKNCLLGNSSTETYIVGHNLLLAHASASRLYKQKYKDKQGGSIGFGLYLMGLTPSTSSKDDAIATQRAKDFYFGW

SEQ ID NO: 45068 - DNA, 2794 bp, Arabidopsis thaliana
  misc_feature (1)..(2794): Ceres Seq. ID no. 12600170
  misc_feature (1)..(2794): Ortholog of  Ceres SEQ ID NO 15176051 as cited in SEQ ID NO 53434
  misc_feature (1)..(2794): Ortholog of  Ceres SEQ ID NO 15170306 as cited in SEQ ID NO 58219
  misc_feature (1)..(2794): Ortholog of  Ceres SEQ ID NO 12465091 as cited in SEQ ID NO 65947
gaaaaagaacattcttataatcacacatctctctctcttcattccccaagcatagaatctctccctctctatctatctctctttcaccttttcttgattcttactcagagaaaattctgcaatatatatcgccatgatccacaccgacatcgcagagatcttatgcgtcaaacccaagacaacgaagaagacaaaaacaatggaggaagatgtcaagaagacgacgacgatgaagatagaaggagaagttgttgtgatgaagaagaatctccttgatttcaaagacgttatggcttctcttcttgatcgtgtcaatgagcttcttggtcgtcgtgtctctctccacctcatcagctctcaccaacccgacccggccaatgagaagagaggaagacttggaaaagcagcacatctggaaaaatgggtaacaaaaataaaaacgtcagtaaccgctgaggaaactgcgtttggagtaacgtttgattgggacgagtcaatgggaccaccggctgcatttgtgatcaagaaccaccaccatagtcaattctaccttaagtccctcaccctccgcggcttccctgatggcgaaggtggtgccactgcgatacatttcatctgcaattcttggatttacccgaatcatcgataccgctccgaccgcgttttcttctctaacaaggcatatcttccaagtgaaacaccggagctaatcaaagagctaagagaagaagagctaaagaatctaagaggcaatgagaaaggaggagaattcaaagaatgggacagagtttacgactacgcttattacaacgacttgggtgctcctgacaagggtcctgactcagttcgtccggttcttggcggttcacctgagctgccttatcctcgccgtggcaaaaccggccgtaaatccaccaaatcagaccctaagtctgaaagcaggctggctttactaaacctaaacatatacgtgccaagggacgagcgatttagccatgtgaagttttcagacttcctcgcttatgcactcaagtccgtgactcaagtgcttgtccctgagatcgcctctgtttgcgacaagaccatcaacgagtttgactccttcgaagatgtttttcacctctatgacggtagtattaagctcgccaatggtcacaccatttctaagctccgtgatgttatcccgtgggagatgtttagagagctagttcgcaacgacggagaacggttcttgaagtatcccttgcctgacatcctcaaagagagcagatcggcttggaggactgacgaagagtttgctcgagaaatgctggccggtcttaatccggtggtgattagccgtcttcaggaatttccaccaaagagctgtctggactctgcaaagtatggaaaccaacactcttccatacgaacagagcacatagaatcaaacatgaacggcctcaatgtccaagaagctttggaacagaataagctatacatattggatcatcacgacgcattgatgccttacctgacacggataaactcaacaaacactaaaacctatgcgacccgaaccctgctgttgcttcaagcagacggaacactgaagcctctcgccatagagctgagtcttccacacgcacaaggcgaatcatatggatcggtcagcaaagttttcacaccagcagagaaaggtgtcgagggatcggtttggcaacttgctaaggcttatgctgcggtcaatgactctggttatcatcagcttataagccattggttgcaaacgcatgcggtgattgaaccgttcataatcgcgtccaataggcagctcagcgtggtccatccgatccataaacttctacatcctcatttccgtgacactatgaacatcaacgcattagcgcgtcatgtactcataaactcagacggagttcttgagagaacagtcttccctagtcgatacgccatggaaatgtcttcttcaatttacaagaattgggttttcaccgagcaggctctcccaaaagacctcctcaaacgaggagttgctgttgaagatccaaacagtgacaacggcgttaagcttctgatcgaagattacccgtttgcggtcgacggtttagagatttggtcagcgatcaaaacatgggtcacagagtactgcacattctactacaataatgacaaaaccgtccaaacggatacagagatccaatcatggtggaccgagctccgaaccaaaggccacggcgacaaacgacacgagtcatggtggccttcgatgcaaacccgcgacgacctaatcgaaacctgcacgatcatcatctggatcgcctctgctcttcacgcagcagtaaatttcggacagtacccttacgccggttttctccctaaccgtcctaccgtcagccgccggtttatgcctgaaccaggtacggatgagtatgctgagctggaggaagatgctgacgtagcgttcttgaagacgatcacgccgcagttacagactctacttggtatctccatcatagagatattgtctatgcattcaacggacgagatctacttagggcaaagagattcaccgaattggacggcggatgatgagcctttggaggcgtttaagcggtttgggaaagaacttgagctgatagagaacaatattatacgaagaaacaatgacaagaggttcaagaacagaaccggaccggttaacataccgtacacattgttgtacccgaatactacggattatacgagagaaggtgggattactgggaaagggatcccgaacagtgtctcaatctaa

SEQ ID NO: 45069 - protein, 886 aa, Arabidopsis thaliana
  peptide (1)..(886): Ceres Seq. ID no. 12600171
MIHTDIAEILCVKPKTTKKTKTMEEDVKKTTTMKIEGEVVVMKKNLLDFKDVMASLLDRVNELLGRRVSLHLISSHQPDPANEKRGRLGKAAHLEKWVTKIKTSVTAEETAFGVTFDWDESMGPPAAFVIKNHHHSQFYLKSLTLRGFPDGEGGATAIHFICNSWIYPNHRYRSDRVFFSNKAYLPSETPELIKELREEELKNLRGNEKGGEFKEWDRVYDYAYYNDLGAPDKGPDSVRPVLGGSPELPYPRRGKTGRKSTKSDPKSESRLALLNLNIYVPRDERFSHVKFSDFLAYALKSVTQVLVPEIASVCDKTINEFDSFEDVFHLYDGSIKLANGHTISKLRDVIPWEMFRELVRNDGERFLKYPLPDILKESRSAWRTDEEFAREMLAGLNPVVISRLQEFPPKSCLDSAKYGNQHSSIRTEHIESNMNGLNVQEALEQNKLYILDHHDALMPYLTRINSTNTKTYATRTLLLLQADGTLKPLAIELSLPHAQGESYGSVSKVFTPAEKGVEGSVWQLAKAYAAVNDSGYHQLISHWLQTHAVIEPFIIASNRQLSVVHPIHKLLHPHFRDTMNINALARHVLINSDGVLERTVFPSRYAMEMSSSIYKNWVFTEQALPKDLLKRGVAVEDPNSDNGVKLLIEDYPFAVDGLEIWSAIKTWVTEYCTFYYNNDKTVQTDTEIQSWWTELRTKGHGDKRHESWWPSMQTRDDLIETCTIIIWIASALHAAVNFGQYPYAGFLPNRPTVSRRFMPEPGTDEYAELEEDADVAFLKTITPQLQTLLGISIIEILSMHSTDEIYLGQRDSPNWTADDEPLEAFKRFGKELELIENNIIRRNNDKRFKNRTGPVNIPYTLLYPNTTDYTREGGITGKGIPNSVSI

SEQ ID NO: 45070 - protein, 864 aa, Arabidopsis thaliana
  peptide (1)..(864): Ceres Seq. ID no. 12600172
MEEDVKKTTTMKIEGEVVVMKKNLLDFKDVMASLLDRVNELLGRRVSLHLISSHQPDPANEKRGRLGKAAHLEKWVTKIKTSVTAEETAFGVTFDWDESMGPPAAFVIKNHHHSQFYLKSLTLRGFPDGEGGATAIHFICNSWIYPNHRYRSDRVFFSNKAYLPSETPELIKELREEELKNLRGNEKGGEFKEWDRVYDYAYYNDLGAPDKGPDSVRPVLGGSPELPYPRRGKTGRKSTKSDPKSESRLALLNLNIYVPRDERFSHVKFSDFLAYALKSVTQVLVPEIASVCDKTINEFDSFEDVFHLYDGSIKLANGHTISKLRDVIPWEMFRELVRNDGERFLKYPLPDILKESRSAWRTDEEFAREMLAGLNPVVISRLQEFPPKSCLDSAKYGNQHSSIRTEHIESNMNGLNVQEALEQNKLYILDHHDALMPYLTRINSTNTKTYATRTLLLLQADGTLKPLAIELSLPHAQGESYGSVSKVFTPAEKGVEGSVWQLAKAYAAVNDSGYHQLISHWLQTHAVIEPFIIASNRQLSVVHPIHKLLHPHFRDTMNINALARHVLINSDGVLERTVFPSRYAMEMSSSIYKNWVFTEQALPKDLLKRGVAVEDPNSDNGVKLLIEDYPFAVDGLEIWSAIKTWVTEYCTFYYNNDKTVQTDTEIQSWWTELRTKGHGDKRHESWWPSMQTRDDLIETCTIIIWIASALHAAVNFGQYPYAGFLPNRPTVSRRFMPEPGTDEYAELEEDADVAFLKTITPQLQTLLGISIIEILSMHSTDEIYLGQRDSPNWTADDEPLEAFKRFGKELELIENNIIRRNNDKRFKNRTGPVNIPYTLLYPNTTDYTREGGITGKGIPNSVSI

SEQ ID NO: 45071 - protein, 854 aa, Arabidopsis thaliana
  peptide (1)..(854): Ceres Seq. ID no. 12600173
MKIEGEVVVMKKNLLDFKDVMASLLDRVNELLGRRVSLHLISSHQPDPANEKRGRLGKAAHLEKWVTKIKTSVTAEETAFGVTFDWDESMGPPAAFVIKNHHHSQFYLKSLTLRGFPDGEGGATAIHFICNSWIYPNHRYRSDRVFFSNKAYLPSETPELIKELREEELKNLRGNEKGGEFKEWDRVYDYAYYNDLGAPDKGPDSVRPVLGGSPELPYPRRGKTGRKSTKSDPKSESRLALLNLNIYVPRDERFSHVKFSDFLAYALKSVTQVLVPEIASVCDKTINEFDSFEDVFHLYDGSIKLANGHTISKLRDVIPWEMFRELVRNDGERFLKYPLPDILKESRSAWRTDEEFAREMLAGLNPVVISRLQEFPPKSCLDSAKYGNQHSSIRTEHIESNMNGLNVQEALEQNKLYILDHHDALMPYLTRINSTNTKTYATRTLLLLQADGTLKPLAIELSLPHAQGESYGSVSKVFTPAEKGVEGSVWQLAKAYAAVNDSGYHQLISHWLQTHAVIEPFIIASNRQLSVVHPIHKLLHPHFRDTMNINALARHVLINSDGVLERTVFPSRYAMEMSSSIYKNWVFTEQALPKDLLKRGVAVEDPNSDNGVKLLIEDYPFAVDGLEIWSAIKTWVTEYCTFYYNNDKTVQTDTEIQSWWTELRTKGHGDKRHESWWPSMQTRDDLIETCTIIIWIASALHAAVNFGQYPYAGFLPNRPTVSRRFMPEPGTDEYAELEEDADVAFLKTITPQLQTLLGISIIEILSMHSTDEIYLGQRDSPNWTADDEPLEAFKRFGKELELIENNIIRRNNDKRFKNRTGPVNIPYTLLYPNTTDYTREGGITGKGIPNSVSI

SEQ ID NO: 45072 - DNA, 1837 bp, Arabidopsis thaliana
  misc_feature (1)..(1837): Ceres Seq. ID no. 12560230
  misc_feature (1)..(1837): Ortholog of  Ceres SEQ ID NO 13594037 as cited in SEQ ID NO 55666
  misc_feature (1)..(1837): Ortholog of  Ceres SEQ ID NO 13657707 as cited in SEQ ID NO 66407
actacacacgaatcatcaaagttgcacatatatcacaatggcaactacatcattctcattaccaaatcataagttcgggatcaaactaatgttgttcctagtcttgaacctcttgtcccttcagacttcagtatttgcccattcatcaaactctaaattcacaaaaatctcaagacacccaaactccgattcatcttcgagaaccaaaccctcaacttcttccaacaaagggtttctcagctcagtccaactcagcttggaccacgctctctttgctcgttctctcgcctttaatctcacgctttcgcaccgtacttctcaaaccctcatgctagatcctgtcaacgactgccttgagctgcttgacgacaccctcgacatgttgtatcgcatcgttgtcatcaagcgtaaagatcacgtcaatgatgatgtacatacgtggctaagcgcggcgttgactaatcaagagacatgtaagcaaagcctcagtgagaaatctagcttcaacaaagaaggaattgcgatagattctttcgcaagaaacctcaccggtttactgaccaattcactagacatgttcgtgtctgataaacagaagagttcttcttcgtctaatctaactggtggccggaaactgttgtccgatcatgattttccgacgtgggtttcttcgtcagaccggaagcttttagaagcttcagtagaagagctgagacctcacgctgtggtggcagccgacggaagcgggactcacatgagcgtagccgaagcgttggcgtctttggagaagggaagtggcagaagcgtaatccatttaacagccggaacctataaagagaatctgaatattccgagcaaacagaagaacgttatgttggtcggtgacgggaagggcaaaacagtcattgtcggtagcagaagtaacagaggcggctggaatacttaccaatccgctactgtcgccgccatgggagatggattcatagctcgagacataacattcgtgaacagtgccggaccaaactcggagcaagctgtagcattacgggtcggatcagataggtccgtggtatacagatgctcaatagatgggtaccaagactcactctacactctctccaaacgacagttctatagagaaaccgacataacaggcaccgtcgatttcatcttcggaaactctgccgtcgttttccaaagctgcaacctcgtatctcgtaaaggctcctcggaccagaactacgtcacggcccaaggccggtccgacccgaaccagaacaccggtatttctatccataattgcagaataaccggttcgaccaagacttacttgggtcgtccatggaagcagtattcgaggactgttgtgatgcaatcgtttatagacggctcgattcacccttcgggttggtctccttggtcgagtaactttgctttgaagactctttattacggagaatttgggaattcgggtcctggatcatcggtgtcgggtcgggttagttgggccgggtatcacccggcgttgacgttgactgaagctcaagggtttactgtttcgggtttcattgacgggaattcttggttgccgtcaacaggtgtcgttttcgactctggccttttataatttaagtgacgttttaaatgaatttttactctgatcatgatattcatatactgctttaaattgatattaactaatcaatcatgtggtaaaaaaaaaaaaacgtaaatgtaattaaatatagttgtgtattgcattttgtgattggttgtatactcctatcatagttgtaaatgttcttgtcatgaataaaagtgtgaaaattggtattgt

SEQ ID NO: 45073 - protein, 541 aa, Arabidopsis thaliana
  peptide (1)..(541): Ceres Seq. ID no. 12560231
LHTNHQSCTYITMATTSFSLPNHKFGIKLMLFLVLNLLSLQTSVFAHSSNSKFTKISRHPNSDSSSRTKPSTSSNKGFLSSVQLSLDHALFARSLAFNLTLSHRTSQTLMLDPVNDCLELLDDTLDMLYRIVVIKRKDHVNDDVHTWLSAALTNQETCKQSLSEKSSFNKEGIAIDSFARNLTGLLTNSLDMFVSDKQKSSSSSNLTGGRKLLSDHDFPTWVSSSDRKLLEASVEELRPHAVVAADGSGTHMSVAEALASLEKGSGRSVIHLTAGTYKENLNIPSKQKNVMLVGDGKGKTVIVGSRSNRGGWNTYQSATVAAMGDGFIARDITFVNSAGPNSEQAVALRVGSDRSVVYRCSIDGYQDSLYTLSKRQFYRETDITGTVDFIFGNSAVVFQSCNLVSRKGSSDQNYVTAQGRSDPNQNTGISIHNCRITGSTKTYLGRPWKQYSRTVVMQSFIDGSIHPSGWSPWSSNFALKTLYYGEFGNSGPGSSVSGRVSWAGYHPALTLTEAQGFTVSGFIDGNSWLPSTGVVFDSGLL

SEQ ID NO: 45074 - protein, 529 aa, Arabidopsis thaliana
  peptide (1)..(529): Ceres Seq. ID no. 12560232
MATTSFSLPNHKFGIKLMLFLVLNLLSLQTSVFAHSSNSKFTKISRHPNSDSSSRTKPSTSSNKGFLSSVQLSLDHALFARSLAFNLTLSHRTSQTLMLDPVNDCLELLDDTLDMLYRIVVIKRKDHVNDDVHTWLSAALTNQETCKQSLSEKSSFNKEGIAIDSFARNLTGLLTNSLDMFVSDKQKSSSSSNLTGGRKLLSDHDFPTWVSSSDRKLLEASVEELRPHAVVAADGSGTHMSVAEALASLEKGSGRSVIHLTAGTYKENLNIPSKQKNVMLVGDGKGKTVIVGSRSNRGGWNTYQSATVAAMGDGFIARDITFVNSAGPNSEQAVALRVGSDRSVVYRCSIDGYQDSLYTLSKRQFYRETDITGTVDFIFGNSAVVFQSCNLVSRKGSSDQNYVTAQGRSDPNQNTGISIHNCRITGSTKTYLGRPWKQYSRTVVMQSFIDGSIHPSGWSPWSSNFALKTLYYGEFGNSGPGSSVSGRVSWAGYHPALTLTEAQGFTVSGFIDGNSWLPSTGVVFDSGLL

SEQ ID NO: 45075 - protein, 512 aa, Arabidopsis thaliana
  peptide (1)..(512): Ceres Seq. ID no. 12560233
MLFLVLNLLSLQTSVFAHSSNSKFTKISRHPNSDSSSRTKPSTSSNKGFLSSVQLSLDHALFARSLAFNLTLSHRTSQTLMLDPVNDCLELLDDTLDMLYRIVVIKRKDHVNDDVHTWLSAALTNQETCKQSLSEKSSFNKEGIAIDSFARNLTGLLTNSLDMFVSDKQKSSSSSNLTGGRKLLSDHDFPTWVSSSDRKLLEASVEELRPHAVVAADGSGTHMSVAEALASLEKGSGRSVIHLTAGTYKENLNIPSKQKNVMLVGDGKGKTVIVGSRSNRGGWNTYQSATVAAMGDGFIARDITFVNSAGPNSEQAVALRVGSDRSVVYRCSIDGYQDSLYTLSKRQFYRETDITGTVDFIFGNSAVVFQSCNLVSRKGSSDQNYVTAQGRSDPNQNTGISIHNCRITGSTKTYLGRPWKQYSRTVVMQSFIDGSIHPSGWSPWSSNFALKTLYYGEFGNSGPGSSVSGRVSWAGYHPALTLTEAQGFTVSGFIDGNSWLPSTGVVFDSGLL

SEQ ID NO: 45076 - DNA, 2701 bp, Arabidopsis thaliana; identical to SEQ ID NO: 38826
  misc_feature (1)..(2701): Ceres Seq. ID no. 12599860
  misc_feature (1)..(2701): Ortholog of  Ceres SEQ ID NO 14313284 as cited in SEQ ID NO 67146
  misc_feature (1)..(2701): Ortholog of  Ceres SEQ ID NO 14308925 as cited in SEQ ID NO 0

SEQ ID NO: 45077 - protein, 823 aa, Arabidopsis thaliana; identical to SEQ ID NO: 38827
  peptide (1)..(823): Ceres Seq. ID no. 12599861

SEQ ID NO: 45078 - protein, 757 aa, Arabidopsis thaliana; identical to SEQ ID NO: 38828
  peptide (1)..(757): Ceres Seq. ID no. 12599862

SEQ ID NO: 45079 - protein, 735 aa, Arabidopsis thaliana; identical to SEQ ID NO: 38829
  peptide (1)..(735): Ceres Seq. ID no. 12599863

SEQ ID NO: 45080 - DNA, 1195 bp, Arabidopsis thaliana
  misc_feature (1)..(1195): Ceres Seq. ID no. 13575811
  misc_feature (1)..(1195): Ortholog of  Ceres SEQ ID NO 13581579 as cited in SEQ ID NO 58361
  misc_feature (1)..(1195): Ortholog of  Ceres SEQ ID NO 13596474 as cited in SEQ ID NO 62169
  misc_feature (1)..(1195): Ortholog of  Ceres SEQ ID NO 13598714 as cited in SEQ ID NO 62656
  misc_feature (1)..(1195): Ortholog of  Ceres SEQ ID NO 13596969 as cited in SEQ ID NO 63375
  misc_feature (1)..(1195): Ortholog of  Ceres SEQ ID NO 13597519 as cited in SEQ ID NO 64759
  misc_feature (1)..(1195): Ortholog of  Ceres SEQ ID NO 13597870 as cited in SEQ ID NO 64982
  misc_feature (1)..(1195): Ortholog of  Ceres SEQ ID NO 13596362 as cited in SEQ ID NO 67877
  misc_feature (1)..(1195): Ortholog of  Ceres SEQ ID NO 12567001 as cited in SEQ ID NO 0
tctctcaagctcaagagttctgaatctcccttcaacaatggcggaacaatctcaactcaagaatctcaccatcatcctcctcctcctctgcttatccttccaatcactatccttcgccgccgaatctcacctaaccgtcgatttctactccaaatcatgccctaaattcctcgacattatccgcgaaaccatcaccaacaaacagatctcaactccaacaaccgccgccgcagctctccgcctcttcttccacgactgtttccccaacggctgcgacgcctccgtcctcgtttcttccaccgctttcaacaccgccgaacgcgattcatcaatcaatctctctctccccggagacggattcgacgtagtaatccgagctaaaacagctctcgaactcgcttgtcccaacacagtctcttgctccgatatcatcgccgtcgcggtacgtgatctcctcgtaaccgtcggtggaccttactacgaaatctccctcggccgtcgcgattcacgaacttcgaaatcatctctcgtctccgatctcctcccgctcccgtcgatgcagatatcgaagctcatcgatcaattcagctccagaggcttctccgttcaagaaatggttgctttgagtggtgctcacaccatcggattctcacattgcaaggagttcacgaaccgggtcaacccgaataatagtaccgggtataacccgagattcgcggtagctttaaagaaagcttgttcgaattccaaaaatgaccctacgatatctgtcttcaacgacgttatgactccgaacaaattcgataatatgtatttccagaatattccgaaaggtctcgggttacttgaatcggatcacggtttattctccgacccgagaacccgtccgttcgttgagttatacgcgagagaccaatctcggttctttaacgactttgccggagctatgcagaagttgagtcttcacggtgttttgaccggacggcgaggagagatccgacgaaggtgtgatgcgatcaactaaaacgtcttagagattcttcttaattgttattacgatttgtgagatttcgtttttgtttatttttttaattgttgattagttagtttagagcaaatgtttgagatttcggcgagattgaattgttgatctaaggctcatgtgtgattatttatatatgattataattagtcg

SEQ ID NO: 45081 - protein, 340 aa, Arabidopsis thaliana
  peptide (1)..(340): Ceres Seq. ID no. 13575812
LSSSRVLNLPSTMAEQSQLKNLTIILLLLCLSFQSLSFAAESHLTVDFYSKSCPKFLDIIRETITNKQISTPTTAAAALRLFFHDCFPNGCDASVLVSSTAFNTAERDSSINLSLPGDGFDVVIRAKTALELACPNTVSCSDIIAVAVRDLLVTVGGPYYEISLGRRDSRTSKSSLVSDLLPLPSMQISKLIDQFSSRGFSVQEMVALSGAHTIGFSHCKEFTNRVNPNNSTGYNPRFAVALKKACSNSKNDPTISVFNDVMTPNKFDNMYFQNIPKGLGLLESDHGLFSDPRTRPFVELYARDQSRFFNDFAGAMQKLSLHGVLTGRRGEIRRRCDAIN

SEQ ID NO: 45082 - protein, 328 aa, Arabidopsis thaliana
  peptide (1)..(328): Ceres Seq. ID no. 13575813
MAEQSQLKNLTIILLLLCLSFQSLSFAAESHLTVDFYSKSCPKFLDIIRETITNKQISTPTTAAAALRLFFHDCFPNGCDASVLVSSTAFNTAERDSSINLSLPGDGFDVVIRAKTALELACPNTVSCSDIIAVAVRDLLVTVGGPYYEISLGRRDSRTSKSSLVSDLLPLPSMQISKLIDQFSSRGFSVQEMVALSGAHTIGFSHCKEFTNRVNPNNSTGYNPRFAVALKKACSNSKNDPTISVFNDVMTPNKFDNMYFQNIPKGLGLLESDHGLFSDPRTRPFVELYARDQSRFFNDFAGAMQKLSLHGVLTGRRGEIRRRCDAIN

SEQ ID NO: 45083 - DNA, 1730 bp, Arabidopsis thaliana
  misc_feature (1)..(1730): Ceres Seq. ID no. 13575843
  misc_feature (1)..(1730): Ortholog of  Ceres SEQ ID NO 13595861 as cited in SEQ ID NO 58153
  misc_feature (1)..(1730): Ortholog of  Ceres SEQ ID NO 13584292 as cited in SEQ ID NO 63687
gaaaaaccataaaaataaaaataagtggagaaatcaaaatcatcgattctcctttgtttcgcctaacccaattcctaaatctcagcatctttcatcaatccaatctctcaaataagcgagagagaaacaaagattatcgaatccttggagacgaaaacatactccaatttgttttaggacatttgggttaccctgaggcttaaggagaatagtggtttagttatttatactgaattttgtgtcattcagactttccgaggattttctgtttggtaccgtttgcctcgtctgtgttttcatttgagctgcatcttaaagtgaaagttcagtgcttaaacagtaataaagtagtatttcaacaggctgctaataagattgctccctttcgcttacacagtgcttaacaagatggctggtgtaaagcgaaaattaagtaccgagtcagatgttcatgctcttcacaaagaactggatgaggtttcatgtcctgtttgcatggatcacccacataatgctgttctactgctgtgcagctctcatgacaaaggttgcaggtcctacatctgtgataccagttaccgacattccaattgccttgaccggtttaagaaattgcattctgaatccgcaaatgaccctactcccgaggcgaacttggcttcaagggaacataataacgaatctctatacgagcatggtacagccagtcgaagcagttttcaccgtgagtctggaaaccgaggctcttcttgggattccgaatcactgaggaggaggaggagagttgaggaagaagttgagtcagaagatatcacaaatttgaaatgtcctctatgccggggtactgttttaggatggaaggttgtagaagaagtaagaacgtatcttgatcataagaaccgaagttgctcccgagaatcctgctcatttactggcaactaccaggatctgcgccgccatgccaggaggactcacccaacaactcgtccttcagacactgatccatcaagagagagagcttggaggcggcttgagaaccagagggagtatggagatatagtcagtgcaatccgttctgccatgcccggtgctgttgtagtaggagattatgttatagaaaacggagataggtttgcaggtgagagggaaacgggaaatggtgggagcgacctttggaccactttactattgtttcagatgattggctctcttgacaatggaggttctagcgctagtgggagtggtggtggatcaagatcccacaggtcaagggcatggaggaatcatcggcgttcatcttcagataggccgtacctttggggggagaatctattgggtctacaagatgagcgcaataacaacgatgatgaagagtttcgtttgcagaatgatgcaggcggtgcttctactcctgttccaagaagaagaaggagatttggacgtcctagatcaagcggaaatcatccgcgataagctgaagcgtcccggtgatatcgatatctctcgggtcagaaccaggccgatgcaaagggaaaggttttactaaaaacccgagaggcttaggattgtttggttttatgtaaatgtcattttgagccttggctcattgtatactactaagtatggcttcttatgcaatgtcttttgttacttaactcgtggattattttcttttgcgttgtgatgaagtttgttatttaggaaatcgaccacgtataaatattttatct

SEQ ID NO: 45084 - protein, 354 aa, Arabidopsis thaliana
  peptide (1)..(354): Ceres Seq. ID no. 13575844
MAGVKRKLSTESDVHALHKELDEVSCPVCMDHPHNAVLLLCSSHDKGCRSYICDTSYRHSNCLDRFKKLHSESANDPTPEANLASREHNNESLYEHGTASRSSFHRESGNRGSSWDSESLRRRRRVEEEVESEDITNLKCPLCRGTVLGWKVVEEVRTYLDHKNRSCSRESCSFTGNYQDLRRHARRTHPTTRPSDTDPSRERAWRRLENQREYGDIVSAIRSAMPGAVVVGDYVIENGDRFAGERETGNGGSDLWTTLLLFQMIGSLDNGGSSASGSGGGSRSHRSRAWRNHRRSSSDRPYLWGENLLGLQDERNNNDDEEFRLQNDAGGASTPVPRRRRRFGRPRSSGNHPR

SEQ ID NO: 45085 - protein, 325 aa, Arabidopsis thaliana
  peptide (1)..(325): Ceres Seq. ID no. 13575845
MDHPHNAVLLLCSSHDKGCRSYICDTSYRHSNCLDRFKKLHSESANDPTPEANLASREHNNESLYEHGTASRSSFHRESGNRGSSWDSESLRRRRRVEEEVESEDITNLKCPLCRGTVLGWKVVEEVRTYLDHKNRSCSRESCSFTGNYQDLRRHARRTHPTTRPSDTDPSRERAWRRLENQREYGDIVSAIRSAMPGAVVVGDYVIENGDRFAGERETGNGGSDLWTTLLLFQMIGSLDNGGSSASGSGGGSRSHRSRAWRNHRRSSSDRPYLWGENLLGLQDERNNNDDEEFRLQNDAGGASTPVPRRRRRFGRPRSSGNHPR

SEQ ID NO: 45086 - DNA, 1954 bp, Arabidopsis thaliana
  misc_feature (1)..(1954): Ceres Seq. ID no. 12560262
  misc_feature (1)..(1954): Ortholog of  Ceres SEQ ID NO 13599900 as cited in SEQ ID NO 531
  misc_feature (1)..(1954): Ortholog of  Ceres SEQ ID NO 13659971 as cited in SEQ ID NO 67565
  misc_feature (1)..(1954): Ortholog of  Ceres SEQ ID NO 13500385 as cited in SEQ ID NO 67583
atccgacggcaaaaggagaattaagatttttaactttaaacgagagtttcgtttatttactcaaaaatttacttctgaaatctctatttgaatttcggggaaaaaaatcctaagtaagggaatgcagagagatggtcggagtatcgccggtgaagactaagctgtgtgatcggtttaaccgatccgtcggcggcaggaattgccaccggaaacacgtcgaggacgggtgatccagttttctaaactctcgtctctcgaattcttcgaagatatcgaaaaactgtaaatcttttttttcttctacttttttacaaaattctctaatcatcgttgtaaagtaaaaaaccatggtcggagcaaaaccggtggagaatggatctgacggtggtagtagtacggggctgcttcacggccgttacgagctagggcgtcttctaggtcacggaacattcgcgaaggtgtaccacgctcgtaacatacaaaccggaaaaagcgtggcgatgaaagtcgtcggaaaagagaaagtggtgaaagttggtatggttgatcagatcaaacgagagatctctgtgatgaggatggtgaaacatccaaacatcgtcgagcttcacgaagtcatggcgagtaaatccaagatctatttcgccatggagcttgtacgaggcggtgagttattcgctaaggtggctaaaggaagactacgtgaagacgtagctcgtgtttatttccagcaattgatctcagccgttgatttctgtcatagccgtggtgtttatcaccgagatctgaaaccggagaatctcttgttagatgaagaaggtaatctcaaggtgactgattttggtctctctgctttcactgagcatttgaaacaagacggacttcttcatacaacttgtggaactccggcttatgttgcgccggaggttatattgaagaaaggatacgacggagctaaggcggatctgtggtcttgtggtgttatactttttgtgcttcttgctggttatttgccgtttcaagatgataatcttgtgaatatgtataggaagatttacagaggagatttcaaatgtcctggttggctttcttctgatgctagacggcttgtgactaagcttcttgatccgaatccgaatacgaggattactattgagaaggttatggattcgccttggttcaagaaacaagcaacgagatcaagaaacgaaccagtggctgccacaatcacaaccacggaagaggatgttgatttcttggtgcacaagtcgaaggaagagacggagacgttaaacgcgtttcatataatcgcgttatcggaagggtttgatttgtcgccgttgtttgaggagaagaagaaagaggagaaaagagagatgagattcgcgacgtctcggccagcgagtagcgtgatttcgagtttggaagaagcggcgagagttgggaataagtttgatgtgaggaagagtgagagtagagtaaggattgaaggtaaacagaatggtcggaaagggaaattggcggtggaagcggagatattcgcggtggctccgtcgtttgttgtcgtggaagtgaagaaagatcatggagatacgcttgagtacaacaacttctgcagtactgctcttagaccagctctcaaggacattttctggacctctacacctgcttgaatttgatgaattcttgcgtgtttcaaatttttatgttgtaatatatattgttggattctagattcgattcgtgattcttgtttttgattcttaatgtggtatcatagtttggatcgttcaaaaagttgtaagtcttttgtgtgtgtttgagtcgtggccgatatgttgcgtcacgaagcagagaatgttgtgtgtggtgtagaatggtgtgttaaagattccatcatcaacaaataataatcatgactcttttaagaatgttaaagagtcaatttttatgc

SEQ ID NO: 45087 - protein, 441 aa, Arabidopsis thaliana [sequence omitted]

SEQ ID NO: 45088 - protein, 390 aa, Arabidopsis thaliana
  peptide (1)..(390): Ceres Seq. ID no. 12560264
MKVVGKEKVVKVGMVDQIKREISVMRMVKHPNIVELHEVMASKSKIYFAMELVRGGELFAKVAKGRLREDVARVYFQQLISAVDFCHSRGVYHRDLKPENLLLDEEGNLKVTDFGLSAFTEHLKQDGLLHTTCGTPAYVAPEVILKKGYDGAKADLWSCGVILFVLLAGYLPFQDDNLVNMYRKIYRGDFKCPGWLSSDARRLVTKLLDPNPNTRITIEKVMDSPWFKKQATRSRNEPVAATITTTEEDVDFLVHKSKEETETLNAFHIIALSEGFDLSPLFEEKKKEEKREMRFATSRPASSVISSLEEAARVGNKFDVRKSESRVRIEGKQNGRKGKLAVEAEIFAVAPSFVVVEVKKDHGDTLEYNNFCSTALRPALKDIFWTSTPA

SEQ ID NO: 45089 - protein, 377 aa, Arabidopsis thaliana
  peptide (1)..(377): Ceres Seq. ID no. 12560265
MVDQIKREISVMRMVKHPNIVELHEVMASKSKIYFAMELVRGGELFAKVAKGRLREDVARVYFQQLISAVDFCHSRGVYHRDLKPENLLLDEEGNLKVTDFGLSAFTEHLKQDGLLHTTCGTPAYVAPEVILKKGYDGAKADLWSCGVILFVLLAGYLPFQDDNLVNMYRKIYRGDFKCPGWLSSDARRLVTKLLDPNPNTRITIEKVMDSPWFKKQATRSRNEPVAATITTTEEDVDFLVHKSKEETETLNAFHIIALSEGFDLSPLFEEKKKEEKREMRFATSRPASSVISSLEEAARVGNKFDVRKSESRVRIEGKQNGRKGKLAVEAEIFAVAPSFVVVEVKKDHGDTLEYNNFCSTALRPALKDIFWTSTPA

SEQ ID NO: 45090 - DNA, 2474 bp, Arabidopsis thaliana
  misc_feature (1)..(2474): Ceres Seq. ID no. 12560266
  misc_feature (1)..(2474): Ortholog of  Ceres SEQ ID NO 13594958 as cited in SEQ ID NO 55996
  misc_feature (1)..(2474): Ortholog of  Ceres SEQ ID NO 15180204 as cited in SEQ ID NO 0
gatcatattcatcaccaaccgaaaacgcctctggatctcgccagatccaattcggaccaaatcagaacccaaaattcgactcacttgtctcactcgactcgaatctccattctttgtctgaaagtttcttcctttttgtttaaccaatggcgacctttatcaatctggaggattccccaatgtttcagaaacaggtttgttccttggaggggacagctgacgagcttaaagatcgttgtcagaagctatacaaaggtgttaagaagtttatggggactttgggagaggcatctaaaggagaaagtgcttttgcagcttgtctggaagaatttgggggtggacctgatgatcctatcagtctttcaattggagggcccgttatatccaaattcataaatgcacttcgagagcttgcctcttataaggagtttctttgctcacaggtggagcatgtgctacttgagaggttgatgaactttattagtgttgatctacaagaagctaaggagtctcgccatcgatttgataaagctgctcattcgtatgatcagtcgcgcgaaaagtttgtgtctttaaagaagaatacaagaggagaaattgtggcagagttggaagaggatctggagaattcaaagtcaacatttgagaagagccgtttcaatctagtgaattcactgatgactattgaagcgaaaaagaagtatgagtttttagaatctattagcgcaattatggatgcccatctgagatatttcaaacttggatatgacttgttgaatcaactggaaccatttatccatcagatattaacatatgctcagcaatcaaaagaacagtctaagattgaacaagatcgactagcaagacgcattcaagaattcaggacccagtctgaattagacagccaacagctggtcgctaatgcagagtcgtctggtgctaacgggaaccgtgttggtgggaatatcccttacaaaaataccgaaacaagtttaacagcagacaaggaagtaattaaacaggggtatctattaaagcgttcgtcaagtttgagaactgattggaaaagaaagttttttgtccttgatagtcatggctccatgtactattacagaactaatggtaataaatcaatgggatctcatcatcactatagtggatcatctgaccataatactggagtttttggtcgatttcgggcaagacataatcgatcaggttcgctcactgagggcagcttaggctataatactattgatcttcgcacttctttgataaaactagacgcagaagacatggatcttcgtctctgtttcagaattatttctcctcaaaaaacttacacacttcaggctgaaaatggagcagataggatggactgggtaaataagatcacaaaagctatagggacgcttctcaattctcattttctgcaacagtcacctgtgcgatacttggataaagacaactccagttctgctcctgctaatgctgtcgtctccggggatcaaattcgacataatgattcaagacaaaatatcggggatgatgtctcaacaatactcagaggacttccgggaaataatgcatgtgcagagtgcaatgctcctgagcccgattgggcatcgttaaatcttggagttttgttgtgcattcaatgctctggtgttcacaggaatctcggggttcatatatccaaggtgaggtccctctcattagatgtgaaagtgtgggagccaacgatcttggacttatttagaaatttgggtaatgtatactgtaattcactgtgggagggactacttcaccttgacgatgactgcgaagacggatcagcattgtcgcatgcttcagtttcaaaaccatgtccagaagattcctttagtgtgaaggagaaatacattctaggaaagtacctggagaaagcattagtcatcaaggatgaaagtgaagcaaacctttctgctgcgagtagaatatgggaagctgttcaaagcagaaacatacgagaaatctatcgacttatagttactactggggatgtaaatatcatcaataccaagtttgatgatataactgatatcgatgcatatcaccatattgatgcagcagagaaagcagtaaagaaaagacatgatccaactgtatgtcagagaattaaagaatccaacgaaccaagaagctgtcttcaaggatgctccttgctccatgtggcttgtcacattggtgactctgtcttgcttgaattgttgttgcagtttggtgctgacctaaacataagagattatcacggaaggactccgttgcaccattgcatatcatcagggaaccacaaatttgcaaagattctactgcgaagaggagcacgtccgtcgatagaggacgatggagggctaagcgttctagaaagagcgatggaaatgggagcgataactgatgaagagctctttcttctcttagccgagtgcgcataa

SEQ ID NO: 45091 - protein, 775 aa, Arabidopsis thaliana
  peptide (1)..(775): Ceres Seq. ID no. 12560267
MATFINLEDSPMFQKQVCSLEGTADELKDRCQKLYKGVKKFMGTLGEASKGESAFAACLEEFGGGPDDPISLSIGGPVISKFINALRELASYKEFLCSQVEHVLLERLMNFISVDLQEAKESRHRFDKAAHSYDQSREKFVSLKKNTRGEIVAELEEDLENSKSTFEKSRFNLVNSLMTIEAKKKYEFLESISAIMDAHLRYFKLGYDLLNQLEPFIHQILTYAQQSKEQSKIEQDRLARRIQEFRTQSELDSQQLVANAESSGANGNRVGGNIPYKNTETSLTADKEVIKQGYLLKRSSSLRTDWKRKFFVLDSHGSMYYYRTNGNKSMGSHHHYSGSSDHNTGVFGRFRARHNRSGSLTEGSLGYNTIDLRTSLIKLDAEDMDLRLCFRIISPQKTYTLQAENGADRMDWVNKITKAIGTLLNSHFLQQSPVRYLDKDNSSSAPANAVVSGDQIRHNDSRQNIGDDVSTILRGLPGNNACAECNAPEPDWASLNLGVLLCIQCSGVHRNLGVHISKVRSLSLDVKVWEPTILDLFRNLGNVYCNSLWEGLLHLDDDCEDGSALSHASVSKPCPEDSFSVKEKYILGKYLEKALVIKDESEANLSAASRIWEAVQSRNIREIYRLIVTTGDVNIINTKFDDITDIDAYHHIDAAEKAVKKRHDPTVCQRIKESNEPRSCLQGCSLLHVACHIGDSVLLELLLQFGADLNIRDYHGRTPLHHCISSGNHKFAKILLRRGARPSIEDDGGLSVLERAMEMGAITDEELFLLLAECA

SEQ ID NO: 45092 - protein, 764 aa, Arabidopsis thaliana
  peptide (1)..(764): Ceres Seq. ID no. 12560268
MFQKQVCSLEGTADELKDRCQKLYKGVKKFMGTLGEASKGESAFAACLEEFGGGPDDPISLSIGGPVISKFINALRELASYKEFLCSQVEHVLLERLMNFISVDLQEAKESRHRFDKAAHSYDQSREKFVSLKKNTRGEIVAELEEDLENSKSTFEKSRFNLVNSLMTIEAKKKYEFLESISAIMDAHLRYFKLGYDLLNQLEPFIHQILTYAQQSKEQSKIEQDRLARRIQEFRTQSELDSQQLVANAESSGANGNRVGGNIPYKNTETSLTADKEVIKQGYLLKRSSSLRTDWKRKFFVLDSHGSMYYYRTNGNKSMGSHHHYSGSSDHNTGVFGRFRARHNRSGSLTEGSLGYNTIDLRTSLIKLDAEDMDLRLCFRIISPQKTYTLQAENGADRMDWVNKITKAIGTLLNSHFLQQSPVRYLDKDNSSSAPANAVVSGDQIRHNDSRQNIGDDVSTILRGLPGNNACAECNAPEPDWASLNLGVLLCIQCSGVHRNLGVHISKVRSLSLDVKVWEPTILDLFRNLGNVYCNSLWEGLLHLDDDCEDGSALSHASVSKPCPEDSFSVKEKYILGKYLEKALVIKDESEANLSAASRIWEAVQSRNIREIYRLIVTTGDVNIINTKFDDITDIDAYHHIDAAEKAVKKRHDPTVCQRIKESNEPRSCLQGCSLLHVACHIGDSVLLELLLQFGADLNIRDYHGRTPLHHCISSGNHKFAKILLRRGARPSIEDDGGLSVLERAMEMGAITDEELFLLLAECA

SEQ ID NO: 45093 - protein, 734 aa, Arabidopsis thaliana
  peptide (1)..(734): Ceres Seq. ID no. 12560269
MGTLGEASKGESAFAACLEEFGGGPDDPISLSIGGPVISKFINALRELASYKEFLCSQVEHVLLERLMNFISVDLQEAKESRHRFDKAAHSYDQSREKFVSLKKNTRGEIVAELEEDLENSKSTFEKSRFNLVNSLMTIEAKKKYEFLESISAIMDAHLRYFKLGYDLLNQLEPFIHQILTYAQQSKEQSKIEQDRLARRIQEFRTQSELDSQQLVANAESSGANGNRVGGNIPYKNTETSLTADKEVIKQGYLLKRSSSLRTDWKRKFFVLDSHGSMYYYRTNGNKSMGSHHHYSGSSDHNTGVFGRFRARHNRSGSLTEGSLGYNTIDLRTSLIKLDAEDMDLRLCFRIISPQKTYTLQAENGADRMDWVNKITKAIGTLLNSHFLQQSPVRYLDKDNSSSAPANAVVSGDQIRHNDSRQNIGDDVSTILRGLPGNNACAECNAPEPDWASLNLGVLLCIQCSGVHRNLGVHISKVRSLSLDVKVWEPTILDLFRNLGNVYCNSLWEGLLHLDDDCEDGSALSHASVSKPCPEDSFSVKEKYILGKYLEKALVIKDESEANLSAASRIWEAVQSRNIREIYRLIVTTGDVNIINTKFDDITDIDAYHHIDAAEKAVKKRHDPTVCQRIKESNEPRSCLQGCSLLHVACHIGDSVLLELLLQFGADLNIRDYHGRTPLHHCISSGNHKFAKILLRRGARPSIEDDGGLSVLERAMEMGAITDEELFLLLAECA

SEQ ID NO: 45094 - DNA, 1319 bp, Arabidopsis thaliana
  misc_feature (1)..(1319): Ceres Seq. ID no. 12560286
  misc_feature (1)..(1319): Ortholog of  Ceres SEQ ID NO 13595651 as cited in SEQ ID NO 56804
aactctatttctatcattcgtcttctctgcagacgatttctctctgcaagctcccaaagtcgaaaactttatcagcaatggcggttttgttgtcatctttctctccactaggaatcaacattgacatgaataagaatctgggtgtttcgtattcttctttccctcaaattcatctctttaagggttctactccactgcgtgttcgaacattcgtcgtctcgagtcgtaaaaattcaggaactggtttggcaagtgaggataagaaattgttgctggaacgatatggttatgatgctaatgatgactttgggtctcaatctaagaaggcgagaaggaaagaagagaaaatgagtggaaggaatagtcaacaagtagaagaagttgttgttgtacagccaagaacaactcataggttactgcaggttcttgcaggaacggcgaaacgaaagaaattgctttctcttaagggaatggatgtgagacctatgatggaagttgttaaaggagcagcttttggaattctccaggctgctggtggttgtccaacgtctctgcgtcctggtaggtggttggatttgtatagtggtacagggtctgttgggattgaagcaatcagtcgaggatgttctgaggcacattttgttgagatggatccttgggttgtttcaaatgttctacaaccaaacttggaacacactgggtttgttgatgcttcggttatacacactgctcgagttgaaaacttcctggaacgtgctgataaattagtaggtaaggatggagtgtttgattatatcagcgttacgccaccttacatggaggttgattatgaggttctgatggatcagattgctaagtcaccagcgattggggaaaatacttttattttggtcgagtacccatcacgaacaacaatgcttgattcatgtggatgccttgaaaagatgactgatagaaggtttggccggacacatctagctatatatggaccaaaatgggctcagaagccaagaaaatcttaaagccacagtgattgtcgacagttatatctggccatttttttcggtttaaggcaatgaagagagactgtgactgaagagctagttccttctaacctttgaatactagtgtgcttttgtccgtcagtcgccattttgtttgtagccaaatactaaagctggatacaagttgcagtcttatgatagttctaaaatcggtaatggtgtatgtcggcttgtgtgtgtctgtgaagtagagatatagctgtaatctgtatacagtttgagatatgaagtcagttagagtttctcctttttact

SEQ ID NO: 45095 - protein, 339 aa, Arabidopsis thaliana
  peptide (1)..(339): Ceres Seq. ID no. 12560287
LYFYHSSSLQTISLCKLPKSKTLSAMAVLLSSFSPLGINIDMNKNLGVSYSSFPQIHLFKGSTPLRVRTFVVSSRKNSGTGLASEDKKLLLERYGYDANDDFGSQSKKARRKEEKMSGRNSQQVEEVVVVQPRTTHRLLQVLAGTAKRKKLLSLKGMDVRPMMEVVKGAAFGILQAAGGCPTSLRPGRWLDLYSGTGSVGIEAISRGCSEAHFVEMDPWVVSNVLQPNLEHTGFVDASVIHTARVENFLERADKLVGKDGVFDYISVTPPYMEVDYEVLMDQIAKSPAIGENTFILVEYPSRTTMLDSCGCLEKMTDRRFGRTHLAIYGPKWAQKPRKS

SEQ ID NO: 45096 - protein, 314 aa, Arabidopsis thaliana
  peptide (1)..(314): Ceres Seq. ID no. 12560288
MAVLLSSFSPLGINIDMNKNLGVSYSSFPQIHLFKGSTPLRVRTFVVSSRKNSGTGLASEDKKLLLERYGYDANDDFGSQSKKARRKEEKMSGRNSQQVEEVVVVQPRTTHRLLQVLAGTAKRKKLLSLKGMDVRPMMEVVKGAAFGILQAAGGCPTSLRPGRWLDLYSGTGSVGIEAISRGCSEAHFVEMDPWVVSNVLQPNLEHTGFVDASVIHTARVENFLERADKLVGKDGVFDYISVTPPYMEVDYEVLMDQIAKSPAIGENTFILVEYPSRTTMLDSCGCLEKMTDRRFGRTHLAIYGPKWAQKPRKS

SEQ ID NO: 45097 - protein, 298 aa, Arabidopsis thaliana
  peptide (1)..(298): Ceres Seq. ID no. 12560289
MNKNLGVSYSSFPQIHLFKGSTPLRVRTFVVSSRKNSGTGLASEDKKLLLERYGYDANDDFGSQSKKARRKEEKMSGRNSQQVEEVVVVQPRTTHRLLQVLAGTAKRKKLLSLKGMDVRPMMEVVKGAAFGILQAAGGCPTSLRPGRWLDLYSGTGSVGIEAISRGCSEAHFVEMDPWVVSNVLQPNLEHTGFVDASVIHTARVENFLERADKLVGKDGVFDYISVTPPYMEVDYEVLMDQIAKSPAIGENTFILVEYPSRTTMLDSCGCLEKMTDRRFGRTHLAIYGPKWAQKPRKS

SEQ ID NO: 45098 - DNA, 1529 bp, Arabidopsis thaliana; identical to SEQ ID NO: 21463
  misc_feature (1)..(1529): Ceres Seq. ID no. 13591513
  misc_feature (1)..(1529): Ortholog of  Ceres SEQ ID NO 14315626 as cited in SEQ ID NO 52943
  misc_feature (1)..(1529): Ortholog of  Ceres SEQ ID NO 14302742 as cited in SEQ ID NO 66899
  misc_feature (1)..(1529): Ortholog of  Ceres SEQ ID NO 14313536 as cited in SEQ ID NO 67925

SEQ ID NO: 45099 - protein, 405 aa, Arabidopsis thaliana; identical to SEQ ID NO: 21464
  peptide (1)..(405): Ceres Seq. ID no. 13591514

SEQ ID NO: 45100 - protein, 404 aa, Arabidopsis thaliana; identical to SEQ ID NO: 21465
  peptide (1)..(404): Ceres Seq. ID no. 13591515

SEQ ID NO: 45101 - protein, 364 aa, Arabidopsis thaliana; identical to SEQ ID NO: 21466
  peptide (1)..(364): Ceres Seq. ID no. 13591516

SEQ ID NO: 45102 - DNA, 1281 bp, Arabidopsis thaliana
  misc_feature (1)..(1281): Ceres Seq. ID no. 13575859
  misc_feature (1)..(1281): Ortholog of  Ceres SEQ ID NO 13659033 as cited in SEQ ID NO 66372
  misc_feature (1)..(1281): Ortholog of  Ceres SEQ ID NO 13655724 as cited in SEQ ID NO 68973
gatggctgagagcttctgagagcttctgagagagacacagccatggctacaacttcacacaacaaaccctcactcttccctctactctcccttctctgtttcatctccattttcctcctcctctctctatccaaacgcgcttccctctcctctcccaaaactcaccgctccgccaccgtcttccctccaaaacccgacggttccctctcacctctctccgccacttgcgacttctccgaaggctcctggatctacgaccccaaccccagatccaccaggtacaccagtagttgtaaagaaatcttcaaaggatggaattgtattcgtaacaacaaaaccaatggtttcgagatatctaattggcgatggaaacctaaacactgtgatcttccttcgtttgatccactcaaatttcttcagtctcatcgcaataccaacatcggatttgtgggtgattcattgaataggaacatgtttgtatctttattctgtatgttaaagagtgtgacgggtgaattgaagaagtggcgacctgccggtgcagatcgcggattcacgttttcgcagtataatttgactatcgcgtatcatcgaacaaatctattggctcgttatggtagatggtcagccaatgctaagggtggtgagttagaatctcttggatttaaagagggctatagagttgatgttgatattccagacagctcgtgggcgaaggcttcgagtttccatgacattctcattttgaacactgggcattggtggtgggcgccatcaaaatttgaccctgtaaaatctcctatgcttttctttgaaggcggtcggccaatacttccacctatacctcctgctactggcctagaccgggttctaaacaatatggtaaattttgtggagaaaacaaagcgacctggagggatcatattcttccggacacaatcacctaggcactttgaaggaggtgactgggaccaaggtggtacttgtcaacgactgcaacctttgttacctggaaaagttgaggaatttttctcagtggggaacaacggaacaaatgtagaggttcgtctcgtgaatcaacacctctataactccctcaagagtagaagcgccttccacgttttggacataactcgaatgagcgagtacagagccgacgctcatccggcagcagctggtggaaagaatcacgatgactgcatgcattggtgcctcccgggccttaccgacacttggaatgatttattcgttgcaactcttcatacgatcaaagctttgtaa

SEQ ID NO: 45103 - protein, 412 aa, Arabidopsis thaliana
  peptide (1)..(412): Ceres Seq. ID no. 13575860
MATTSHNKPSLFPLLSLLCFISIFLLLSLSKRASLSSPKTHRSATVFPPKPDGSLSPLSATCDFSEGSWIYDPNPRSTRYTSSCKEIFKGWNCIRNNKTNGFEISNWRWKPKHCDLPSFDPLKFLQSHRNTNIGFVGDSLNRNMFVSLFCMLKSVTGELKKWRPAGADRGFTFSQYNLTIAYHRTNLLARYGRWSANAKGGELESLGFKEGYRVDVDIPDSSWAKASSFHDILILNTGHWWWAPSKFDPVKSPMLFFEGGRPILPPIPPATGLDRVLNNMVNFVEKTKRPGGIIFFRTQSPRHFEGGDWDQGGTCQRLQPLLPGKVEEFFSVGNNGTNVEVRLVNQHLYNSLKSRSAFHVLDITRMSEYRADAHPAAAGGKNHDDCMHWCLPGLTDTWNDLFVATLHTIKAL

SEQ ID NO: 45104 - protein, 269 aa, Arabidopsis thaliana
  peptide (1)..(269): Ceres Seq. ID no. 13575861
MFVSLFCMLKSVTGELKKWRPAGADRGFTFSQYNLTIAYHRTNLLARYGRWSANAKGGELESLGFKEGYRVDVDIPDSSWAKASSFHDILILNTGHWWWAPSKFDPVKSPMLFFEGGRPILPPIPPATGLDRVLNNMVNFVEKTKRPGGIIFFRTQSPRHFEGGDWDQGGTCQRLQPLLPGKVEEFFSVGNNGTNVEVRLVNQHLYNSLKSRSAFHVLDITRMSEYRADAHPAAAGGKNHDDCMHWCLPGLTDTWNDLFVATLHTIKAL

SEQ ID NO: 45105 - protein, 262 aa, Arabidopsis thaliana
  peptide (1)..(262): Ceres Seq. ID no. 13575862
MLKSVTGELKKWRPAGADRGFTFSQYNLTIAYHRTNLLARYGRWSANAKGGELESLGFKEGYRVDVDIPDSSWAKASSFHDILILNTGHWWWAPSKFDPVKSPMLFFEGGRPILPPIPPATGLDRVLNNMVNFVEKTKRPGGIIFFRTQSPRHFEGGDWDQGGTCQRLQPLLPGKVEEFFSVGNNGTNVEVRLVNQHLYNSLKSRSAFHVLDITRMSEYRADAHPAAAGGKNHDDCMHWCLPGLTDTWNDLFVATLHTIKAL

SEQ ID NO: 45106 - DNA, 2810 bp, Arabidopsis thaliana; identical to SEQ ID NO: 44848
  misc_feature (1)..(2810): Ceres Seq. ID no. 12650352
  misc_feature (1)..(2810): Ortholog of  Ceres SEQ ID NO 13598023 as cited in SEQ ID NO 66487

SEQ ID NO: 45107 - protein, 761 aa, Arabidopsis thaliana; identical to SEQ ID NO: 44849
  peptide (1)..(761): Ceres Seq. ID no. 12650353

SEQ ID NO: 45108 - protein, 556 aa, Arabidopsis thaliana; identical to SEQ ID NO: 44850
  peptide (1)..(556): Ceres Seq. ID no. 12650354

SEQ ID NO: 45109 - DNA, 2089 bp, Arabidopsis thaliana
  misc_feature (1)..(2089): Ceres Seq. ID no. 12560303
  misc_feature (1)..(2089): Ortholog of  Ceres SEQ ID NO 14304220 as cited in SEQ ID NO 53418
accttctcattacacttgcatgtgcaacgacccgaccctatacccgacccggcccacattttaaacccattttagccttttctgtttccgccgccgactgatcggaataatcgatcaaagagagaacaactgaatcttcgccggatactacgccgatgacgattgcggcagcgccagcacgccagacagatcgatcagccactggtttcaaccctgcttacgtcacgacggcgaaggcggtgagcgttccggttcaagttcctccggcgactgtggtttccgaaggattaggtaaagatgcgttgatctcatggttcagaggagaattcgctgcggcaaacgcgataatcgacgcgatgtgctcgcatctaaggatagctgaagaagcggtatctggatcggagtacgaagctgtattcgcggcgatccatcgccgtcgtctgaattggatccctgttcttcagatgcagaagtatcattccatcgctgaagtagcgatcgagcttcagaaagtggcggctaagaaagcggaggatctgaaacagaagaaaacagaggaggaggcggaggaagatctgaaagaggtggtggcgacggaggaagaggaagtgaagaaagagtgttttaacggcgagaaagtaacggagaatgacgtaaacggagatgtagaagacgttgaagatgattcaccaactagtgatatcactgattcaggttctcatcaggatgttcaccaaactgttgttgcggatactgcacatcagattatatgccatagccatgaagattgtgatgcacgttcatgtgagatcaaacctatcaaaggtttccaagctaaagaacaagtcaaaggccacactgtgaatgttgtgaaaggactaaagctgtatgaagagttacttaaagaagatgagatatctaaattgttagactttgtggcagaactacgagaagctggcataaacgggaagcttgcaggtgagagctttatactgttcaacaaacagattaaagggaacaagagagagctgattcagcttggtgtccccatctttggtcatgtcaaggcggatgaaaactctaacgacaccaacaactctgttaacatcgagccaattccaccacttcttgagagtgtcattgatcactttgtcacatggagactcatcccagaatacaagagacctaacggctgtgtcatcaacttctttgaagagggtgaatactcacagcctttcctcaaaccacctcacttagaacaaccaatctccactcttgtcctctctgaatcaacaatggcctatggacgcattctctcaagtgacaacgaaggcaacttcagaggacctttgacactctctctcaaacaaggatctttgttggtgatgagagggaacagtgcagacatggcaagacatgtaatgtgtccatcacaaaacaaaagagtaagcatcacattctttcgtattcgacctgacacatatcataaccattcacaacccaacagtcctcgcaacgacggtgtcatgacaatgtggcaaccctaccaaatgacaccaactccattcctcaatggttatgatcattcaattgacatgatgccaaaacttggagtcctacgtcctccaatggtcatgatggcaccaccaccggttcaaccaatgatattaccaagtcccaatgtgatgggaaccggtggtggtaccggtgttttcttaccatgggcctctgttaatagctcaagaaaacatgtgaagcatttgcctccacgcgcgcagaagaagcgattacttccgcttcctcctgctgcttcttcttctccagctggaggatccacctctgagcctgtgatcactgtaggttaatcctattcgacttcttcagcaaaaagaaaaaaaaacttggaattggtctttttctaagcaatgctctgtttcttctctgttctgtttctttttttgttctttcaaattcagtttaggttaactcaggttttatagatagaattaagtttgttacatcccccgaggcatgtgttttctactttgtgtacgattttattatcagtatattctcaaaatgttacctt

SEQ ID NO: 45110 - protein, 569 aa, Arabidopsis thaliana
  peptide (1)..(569): Ceres Seq. ID no. 12560304
MTIAAAPARQTDRSATGFNPAYVTTAKAVSVPVQVPPATVVSEGLGKDALISWFRGEFAAANAIIDAMCSHLRIAEEAVSGSEYEAVFAAIHRRRLNWIPVLQMQKYHSIAEVAIELQKVAAKKAEDLKQKKTEEEAEEDLKEVVATEEEEVKKECFNGEKVTENDVNGDVEDVEDDSPTSDITDSGSHQDVHQTVVADTAHQIICHSHEDCDARSCEIKPIKGFQAKEQVKGHTVNVVKGLKLYEELLKEDEISKLLDFVAELREAGINGKLAGESFILFNKQIKGNKRELIQLGVPIFGHVKADENSNDTNNSVNIEPIPPLLESVIDHFVTWRLIPEYKRPNGCVINFFEEGEYSQPFLKPPHLEQPISTLVLSESTMAYGRILSSDNEGNFRGPLTLSLKQGSLLVMRGNSADMARHVMCPSQNKRVSITFFRIRPDTYHNHSQPNSPRNDGVMTMWQPYQMTPTPFLNGYDHSIDMMPKLGVLRPPMVMMAPPPVQPMILPSPNVMGTGGGTGVFLPWASVNSSRKHVKHLPPRAQKKRLLPLPPAASSSPAGGSTSEPVITVG

SEQ ID NO: 45111 - protein, 502 aa, Arabidopsis thaliana
  peptide (1)..(502): Ceres Seq. ID no. 12560305
MCSHLRIAEEAVSGSEYEAVFAAIHRRRLNWIPVLQMQKYHSIAEVAIELQKVAAKKAEDLKQKKTEEEAEEDLKEVVATEEEEVKKECFNGEKVTENDVNGDVEDVEDDSPTSDITDSGSHQDVHQTVVADTAHQIICHSHEDCDARSCEIKPIKGFQAKEQVKGHTVNVVKGLKLYEELLKEDEISKLLDFVAELREAGINGKLAGESFILFNKQIKGNKRELIQLGVPIFGHVKADENSNDTNNSVNIEPIPPLLESVIDHFVTWRLIPEYKRPNGCVINFFEEGEYSQPFLKPPHLEQPISTLVLSESTMAYGRILSSDNEGNFRGPLTLSLKQGSLLVMRGNSADMARHVMCPSQNKRVSITFFRIRPDTYHNHSQPNSPRNDGVMTMWQPYQMTPTPFLNGYDHSIDMMPKLGVLRPPMVMMAPPPVQPMILPSPNVMGTGGGTGVFLPWASVNSSRKHVKHLPPRAQKKRLLPLPPAASSSPAGGSTSEPVITVG

SEQ ID NO: 45112 - protein, 466 aa, Arabidopsis thaliana
  peptide (1)..(466): Ceres Seq. ID no. 12560306
MQKYHSIAEVAIELQKVAAKKAEDLKQKKTEEEAEEDLKEVVATEEEEVKKECFNGEKVTENDVNGDVEDVEDDSPTSDITDSGSHQDVHQTVVADTAHQIICHSHEDCDARSCEIKPIKGFQAKEQVKGHTVNVVKGLKLYEELLKEDEISKLLDFVAELREAGINGKLAGESFILFNKQIKGNKRELIQLGVPIFGHVKADENSNDTNNSVNIEPIPPLLESVIDHFVTWRLIPEYKRPNGCVINFFEEGEYSQPFLKPPHLEQPISTLVLSESTMAYGRILSSDNEGNFRGPLTLSLKQGSLLVMRGNSADMARHVMCPSQNKRVSITFFRIRPDTYHNHSQPNSPRNDGVMTMWQPYQMTPTPFLNGYDHSIDMMPKLGVLRPPMVMMAPPPVQPMILPSPNVMGTGGGTGVFLPWASVNSSRKHVKHLPPRAQKKRLLPLPPAASSSPAGGSTSEPVITVG

SEQ ID NO: 45113 - DNA, 1800 bp, Arabidopsis thaliana
  misc_feature (1)..(1800): Ceres Seq. ID no. 13575871
  misc_feature (1)..(1800): Ortholog of  Ceres SEQ ID NO 13593889 as cited in SEQ ID NO 53305
  misc_feature (1)..(1800): Ortholog of  Ceres SEQ ID NO 13581959 as cited in SEQ ID NO 56156
  misc_feature (1)..(1800): Ortholog of  Ceres SEQ ID NO 15171809 as cited in SEQ ID NO 57329
aaaaaaaggaaggaaaaacaaaaaatcaaaagctgagaaagtaaatgggaaacgacgactgagactcttcttctccttctccttcttcttctacttatttcatcgtttcatttcttaggtttctgatttcatcacaacctctggatttgatttttgattcggaggtatataaaaaaatgtttagtggggtttgcgattcgatgaactagggtttgtaatttcactatcttcttcttctcttcgatcgtttactcatcgggtgagaaggaagcgtctttcatgtgttcttccgtgtaatcgactgttttattgggcttagtagctctagtttggtcaaagaattcgtaacaagtgaatcttagattgggaagatgctagaaggagcaaagttcaacgtgcttgctgttgggaatcatcacaacaacgacaacaattactatgcttttacgcaagagttttatcaaaaacttaatgaaggttcaaacatgtccatggagagtatgcagacgagtaacgctggaggatctgtctcaatgtctgtggataacagtagcgttggttccagcgatgctcttattggccacccgggtttgaagcctgtacgccattactcactctcggttggtcaaagcgtgtttcgcccgggaagagttacccatgcgttgaatgatgatgctttggctcaagcactgatggataccaggtatccaactgaagggctgacgaactatgatgagtggacgattgatctgaggaaactcaacatgggtcctgcctttgctcaaggggcttttggtaaattatacaaagggacatacaacggtgaagatgtagctatcaaaatacttgagcggccagagaacagcccagaaaaggcacagttcatggaacaacagtttcagcaagaggtgtctatgcttgctaatttgaagcacccaaacattgtgaggttcattggtgcatgtcgcaagccaatggtgtggtgtatagtgactgaatacgccaaaggaggttcagtgaggcagtttttgactaggagacagaaccgagccgtccctttgaagttagctgttaaacaggctttggatgttgctaggggtatggcttatgtccatggacgcaacttcatacacagagatctcaagtcagataaccttctcatctcagcagataagtccatcaagattgcagattttggtgttgcaagaattgaagttcaaaccgaaggaatgacaccagaaactggaacttacagatggatggctccagagatgatacagcatagagcctacaatcaaaaagtggatgtgtatagtttcgggattgtgctgtgggagttaatcacaggactcttaccgttccagaacatgacagctgtacaggcagcgtttgcggttgtaaacagaggagtgcgtccaacagtcccaaacgattgtctcccggtgctgagtgacattatgactcgatgttgggatgctaatccagaagtccgtccatgttttgtggaggttgtgaagctgcttgaagctgcagaaacagagataatgacgacagcgagaaaagcccgtttcagatgttgcttgagccagccgatgacgattgactaaataatccccccctcaagaaaataacaaagaaagaaagaagaagaagaagatataagaaaaagggctttagatataagtttgtgtgtcagttatgtgtctctgtgtgtgtttgtgtatctataaaaatatgaaatgtattttgttttctcaagataggagaagtaagtaaccccaccaccaccattttagactt

SEQ ID NO: 45114 - protein, 411 aa, Arabidopsis thaliana
  peptide (1)..(411): Ceres Seq. ID no. 13575872
MLEGAKFNVLAVGNHHNNDNNYYAFTQEFYQKLNEGSNMSMESMQTSNAGGSVSMSVDNSSVGSSDALIGHPGLKPVRHYSLSVGQSVFRPGRVTHALNDDALAQALMDTRYPTEGLTNYDEWTIDLRKLNMGPAFAQGAFGKLYKGTYNGEDVAIKILERPENSPEKAQFMEQQFQQEVSMLANLKHPNIVRFIGACRKPMVWCIVTEYAKGGSVRQFLTRRQNRAVPLKLAVKQALDVARGMAYVHGRNFIHRDLKSDNLLISADKSIKIADFGVARIEVQTEGMTPETGTYRWMAPEMIQHRAYNQKVDVYSFGIVLWELITGLLPFQNMTAVQAAFAVVNRGVRPTVPNDCLPVLSDIMTRCWDANPEVRPCFVEVVKLLEAAETEIMTTARKARFRCCLSQPMTID

SEQ ID NO: 45115 - protein, 373 aa, Arabidopsis thaliana
  peptide (1)..(373): Ceres Seq. ID no. 13575873
MSMESMQTSNAGGSVSMSVDNSSVGSSDALIGHPGLKPVRHYSLSVGQSVFRPGRVTHALNDDALAQALMDTRYPTEGLTNYDEWTIDLRKLNMGPAFAQGAFGKLYKGTYNGEDVAIKILERPENSPEKAQFMEQQFQQEVSMLANLKHPNIVRFIGACRKPMVWCIVTEYAKGGSVRQFLTRRQNRAVPLKLAVKQALDVARGMAYVHGRNFIHRDLKSDNLLISADKSIKIADFGVARIEVQTEGMTPETGTYRWMAPEMIQHRAYNQKVDVYSFGIVLWELITGLLPFQNMTAVQAAFAVVNRGVRPTVPNDCLPVLSDIMTRCWDANPEVRPCFVEVVKLLEAAETEIMTTARKARFRCCLSQPMTID

SEQ ID NO: 45116 - protein, 371 aa, Arabidopsis thaliana
  peptide (1)..(371): Ceres Seq. ID no. 13575874
MESMQTSNAGGSVSMSVDNSSVGSSDALIGHPGLKPVRHYSLSVGQSVFRPGRVTHALNDDALAQALMDTRYPTEGLTNYDEWTIDLRKLNMGPAFAQGAFGKLYKGTYNGEDVAIKILERPENSPEKAQFMEQQFQQEVSMLANLKHPNIVRFIGACRKPMVWCIVTEYAKGGSVRQFLTRRQNRAVPLKLAVKQALDVARGMAYVHGRNFIHRDLKSDNLLISADKSIKIADFGVARIEVQTEGMTPETGTYRWMAPEMIQHRAYNQKVDVYSFGIVLWELITGLLPFQNMTAVQAAFAVVNRGVRPTVPNDCLPVLSDIMTRCWDANPEVRPCFVEVVKLLEAAETEIMTTARKARFRCCLSQPMTID

SEQ ID NO: 45117 - DNA, 3225 bp, Arabidopsis thaliana
  misc_feature (1)..(3225): Ceres Seq. ID no. 12560311
  misc_feature (1)..(3225): Ortholog of  Ceres SEQ ID NO 14308128 as cited in SEQ ID NO 51081
  misc_feature (1)..(3225): Ortholog of  Ceres SEQ ID NO 15171088 as cited in SEQ ID NO 54178
  misc_feature (1)..(3225): Ortholog of  Ceres SEQ ID NO 13590691 as cited in SEQ ID NO 66290
gacgaagacacacacagacaaacaaatcctagcttagcaccgtcgcgaccgaattcgaaattccggtaacccaatcgccgggaaaatccaccgctcgtggctaccgatattgattctaatcggatctagcggctccctttcttcgtccagatctcgtacttcattcgacctcgattcgctgtgcaagttacgatggaggcgatcgatgagttgtctcagctttcggattcgatgagacaagcggcgtctctgctcgctgacgaagatcccgatgagacctcttcttctagacggccagctacttctctcaacgtcgttgccctagggaatgtgggagctggaaagtctgcagttctaaatagcctaattgggcatccagttctgccgacgggtgagaatggtgcgacacgggctcctattatcattgatttgagtagagaagaatcactgagcagcaaggcaataatcttgcaaattgacaataaaaatcaacaagtttctgcaagtgcactaaggcattcactacaagataggcttagcaaaggagcttcaggaaggggtcgtgatgaaatatacctaaaacttcgtaccagcacagctccaccactgaaattgattgatttgcctggactggaccagcgaattgtggacgattctatgattggtgaacatgcacagcacaacgatgctatattgctggttgttgtgcctgctagccaggcatctgaaatttcgtcatctcgagccctgaagatcgcaaaggagtatgatccagagagtactaggacagtaggaattatcagcaaaattgatcaggcagcagagaacccaaagtcccttgcagcagttcaggcgcttctttcaaatcaaggacctccaaaaacaactgatattccatgggttgcacttattggccaatctgtctcaattgcatcagcgcagtctggaggcagtgagaactctttagaaactgcttggcgtgctgagagtgaaagccttaaatccattttgactggtgctccacaaagcaaacttggcagaattgccctggtcgacactcttgctagccagatccgtagcagaatgaagctcaggcttccgaacatcttaactggactccagggtaagtctcaaatagtgcaggacgaattagcgaggcttggtgagcaattggttagcagtgctgaaggcacaagggcaatagctttggagctttgtcgtgagtttgaagacaaatttcttctccatttagctggtggtgaaggaagtggttggaaagttgttgcaagttttgaaggcaatttccccaatcgtatcaaaaagcttccgttggatagacattttgacttgaacaatgtcaaaaggatcgtgttggaggctgatggttatcaaccttatctcatatctccagagaaagggttgagatcgttaataaaaaccgttcttgagttggctaaagacccagcacgactatgtgttgatgaggttcaccgagtgcttgttgacatagtttcagcttccgcgaatgccacacctggtcttgggagatatcctccttttaagagagaggttgtagctatagcaagtgccgcacttgatggattcaagaatgaagctaagaagatggtagttgcattagttgatatggagcgtgcatttgtaccacctcagcacttcatccgcctcgtacaaagaagaatggaaaggcagcgtcgtgaggaggagctaaaaggtcgttcctctaaaaagggacaagatgcagagcagtctctcttaaacagggctactagtcctcagccagatgggccatcatcaactggtggtagcttaaaatctttgagagacaaattaatgccacaagataaagataaagataaagaaaaagagactccggaggtgtctggtctgaagactgctggacctgagggagagataactgcagggtacttaatgaagaaaagtgcaaagacaaatgggtggagtaggcgatggtttgttctgaatgaaaaaactggaaagcttggttatacaaaaaaacaagaagaaagaaacttccgcggcactgtaactttggaggaatgcagtatcgaagaaatttctgatgatgaaggagaaaaatcaaagagctcgaaagataagaaatcaaatggaccggattcaaaaggaccaggccttgtatttaagataacttgcagggttccatataagactgtacttaaagctcacaatgcgttggttctcaaggccgagagcatggttgataagaatgaatggataaataagctgcaaaaggttatccaggcccgaggaggccaagtgggtagcgcttccatgagacaaagtctttcagaaggctcacttgataagatggtaaggaaaccggtcgacccggaagaggaattacggtggatgtcccaagaagtacggggttatgttgaagctgttctcaacagtctagctgccaatgttccaaaggctgttgttctctgtcaagtggagaaatccaaggaagacatgctgaatcagctatacagctctatcagcgcaattggtaatgagaggattgaatcattgattcaagaggatcagaacgtcaaaagacgaagagaccgttaccagaaacagtcctctcttctctcaaagctcactaggcagcttagcattcacgataaccgagcagctgctgcttcaagctggtctgacaatagtggcactgaaagcagcccgagaaccaatggagggtcatcaggagaggactggatgaatgcgtttaacgcagctgctagtggacctgactcattgaagagatatggatctggcggccatagccgtcgttacagtgatccagcacagaatggtgaggattcttctggatctggtggcagctcccgtcgcaccacaccaaaccggctcccaccagctccgccacagtctggatcatcttacaggtattagaaacctgtttggtttccaggattgttattgaacgaaccataaaacacattcttttctttctttttctgccctttcggattggtccctgtttctgggactatttttcttatgtctcactagtttaaaaaaaaaaaaaccagaatgataatatgatgatgatgtacttgcgtgtgtttgtagatagatatttgttagagagacacatatatatgagtttggtcttcatattggtcatatgctttatattaaagaaaatgttacttttctttt

SEQ ID NO: 45118 - protein, 920 aa, Arabidopsis thaliana
  peptide (1)..(920): Ceres Seq. ID no. 12560312
MEAIDELSQLSDSMRQAASLLADEDPDETSSSRRPATSLNVVALGNVGAGKSAVLNSLIGHPVLPTGENGATRAPIIIDLSREESLSSKAIILQIDNKNQQVSASALRHSLQDRLSKGASGRGRDEIYLKLRTSTAPPLKLIDLPGLDQRIVDDSMIGEHAQHNDAILLVVVPASQASEISSSRALKIAKEYDPESTRTVGIISKIDQAAENPKSLAAVQALLSNQGPPKTTDIPWVALIGQSVSIASAQSGGSENSLETAWRAESESLKSILTGAPQSKLGRIALVDTLASQIRSRMKLRLPNILTGLQGKSQIVQDELARLGEQLVSSAEGTRAIALELCREFEDKFLLHLAGGEGSGWKVVASFEGNFPNRIKKLPLDRHFDLNNVKRIVLEADGYQPYLISPEKGLRSLIKTVLELAKDPARLCVDEVHRVLVDIVSASANATPGLGRYPPFKREVVAIASAALDGFKNEAKKMVVALVDMERAFVPPQHFIRLVQRRMERQRREEELKGRSSKKGQDAEQSLLNRATSPQPDGPSSTGGSLKSLRDKLMPQDKDKDKEKETPEVSGLKTAGPEGEITAGYLMKKSAKTNGWSRRWFVLNEKTGKLGYTKKQEERNFRGTVTLEECSIEEISDDEGEKSKSSKDKKSNGPDSKGPGLVFKITCRVPYKTVLKAHNALVLKAESMVDKNEWINKLQKVIQARGGQVGSASMRQSLSEGSLDKMVRKPVDPEEELRWMSQEVRGYVEAVLNSLAANVPKAVVLCQVEKSKEDMLNQLYSSISAIGNERIESLIQEDQNVKRRRDRYQKQSSLLSKLTRQLSIHDNRAAAASSWSDNSGTESSPRTNGGSSGEDWMNAFNAAASGPDSLKRYGSGGHSRRYSDPAQNGEDSSGSGGSSRRTTPNRLPPAPPQSGSSYRY

SEQ ID NO: 45119 - protein, 907 aa, Arabidopsis thaliana
  peptide (1)..(907): Ceres Seq. ID no. 12560313
MRQAASLLADEDPDETSSSRRPATSLNVVALGNVGAGKSAVLNSLIGHPVLPTGENGATRAPIIIDLSREESLSSKAIILQIDNKNQQVSASALRHSLQDRLSKGASGRGRDEIYLKLRTSTAPPLKLIDLPGLDQRIVDDSMIGEHAQHNDAILLVVVPASQASEISSSRALKIAKEYDPESTRTVGIISKIDQAAENPKSLAAVQALLSNQGPPKTTDIPWVALIGQSVSIASAQSGGSENSLETAWRAESESLKSILTGAPQSKLGRIALVDTLASQIRSRMKLRLPNILTGLQGKSQIVQDELARLGEQLVSSAEGTRAIALELCREFEDKFLLHLAGGEGSGWKVVASFEGNFPNRIKKLPLDRHFDLNNVKRIVLEADGYQPYLISPEKGLRSLIKTVLELAKDPARLCVDEVHRVLVDIVSASANATPGLGRYPPFKREVVAIASAALDGFKNEAKKMVVALVDMERAFVPPQHFIRLVQRRMERQRREEELKGRSSKKGQDAEQSLLNRATSPQPDGPSSTGGSLKSLRDKLMPQDKDKDKEKETPEVSGLKTAGPEGEITAGYLMKKSAKTNGWSRRWFVLNEKTGKLGYTKKQEERNFRGTVTLEECSIEEISDDEGEKSKSSKDKKSNGPDSKGPGLVFKITCRVPYKTVLKAHNALVLKAESMVDKNEWINKLQKVIQARGGQVGSASMRQSLSEGSLDKMVRKPVDPEEELRWMSQEVRGYVEAVLNSLAANVPKAVVLCQVEKSKEDMLNQLYSSISAIGNERIESLIQEDQNVKRRRDRYQKQSSLLSKLTRQLSIHDNRAAAASSWSDNSGTESSPRTNGGSSGEDWMNAFNAAASGPDSLKRYGSGGHSRRYSDPAQNGEDSSGSGGSSRRTTPNRLPPAPPQSGSSYRY

SEQ ID NO: 45120 - protein, 765 aa, Arabidopsis thaliana
  peptide (1)..(765): Ceres Seq. ID no. 12560314
MIGEHAQHNDAILLVVVPASQASEISSSRALKIAKEYDPESTRTVGIISKIDQAAENPKSLAAVQALLSNQGPPKTTDIPWVALIGQSVSIASAQSGGSENSLETAWRAESESLKSILTGAPQSKLGRIALVDTLASQIRSRMKLRLPNILTGLQGKSQIVQDELARLGEQLVSSAEGTRAIALELCREFEDKFLLHLAGGEGSGWKVVASFEGNFPNRIKKLPLDRHFDLNNVKRIVLEADGYQPYLISPEKGLRSLIKTVLELAKDPARLCVDEVHRVLVDIVSASANATPGLGRYPPFKREVVAIASAALDGFKNEAKKMVVALVDMERAFVPPQHFIRLVQRRMERQRREEELKGRSSKKGQDAEQSLLNRATSPQPDGPSSTGGSLKSLRDKLMPQDKDKDKEKETPEVSGLKTAGPEGEITAGYLMKKSAKTNGWSRRWFVLNEKTGKLGYTKKQEERNFRGTVTLEECSIEEISDDEGEKSKSSKDKKSNGPDSKGPGLVFKITCRVPYKTVLKAHNALVLKAESMVDKNEWINKLQKVIQARGGQVGSASMRQSLSEGSLDKMVRKPVDPEEELRWMSQEVRGYVEAVLNSLAANVPKAVVLCQVEKSKEDMLNQLYSSISAIGNERIESLIQEDQNVKRRRDRYQKQSSLLSKLTRQLSIHDNRAAAASSWSDNSGTESSPRTNGGSSGEDWMNAFNAAASGPDSLKRYGSGGHSRRYSDPAQNGEDSSGSGGSSRRTTPNRLPPAPPQSGSSYRY

SEQ ID NO: 45121 - DNA, 1365 bp, Arabidopsis thaliana
  misc_feature (1)..(1365): Ceres Seq. ID no. 13575879
  misc_feature (1)..(1365): Ortholog of  Ceres SEQ ID NO 15177676 as cited in SEQ ID NO 52631
  misc_feature (1)..(1365): Ortholog of  Ceres SEQ ID NO 14314212 as cited in SEQ ID NO 57401
  misc_feature (1)..(1365): Ortholog of  Ceres SEQ ID NO 13596376 as cited in SEQ ID NO 68056
gataaaactcatcattcctcattcatctctaacaatggcgtcttctcgaatcatcatcttctccgttcttcttctctccatcttctcactctcatcatctgcccaaccatctttccgccccaaagctctccttctcccagtaacaaaagacccatctaccctccagtacacaaccgtcatcaaccaacgcacacctctcgtccccgcttccgtcgtattcgacctcggtggtcgagaattctgggtcgactgtgaccaaggctacgtctccaccacttaccgctctcctcgctgcaactccgctgtctgctcacgcgccggctccatcgcctgcggcacatgcttctctcctccgagacctggctgtagtaacaacacttgcggcgcttttccagataactccatcaccggatgggcaacctcgggcgaatttgctttagacgttgtgtctatccagtccactaacggatccaatccgggtcggttcgttaaaatccccaatctaatattcagttgcggatcaacgtctcttcttaaaggactcgctaaaggagccgttggtatggctggaatgggacgtcacaacatcggcttaccgttgcagttcgccgccgcgtttagcttcaaccgcaaattcgccgtgtgtcttacttccggtagaggcgtcgccttcttcggcaacggaccttacgttttcctccccgggatccagatctcaaggcttcaaaagacaccgcttctcatcaatccagggaccactgtttttgagttttcaaaaggcgagaagtcgccggagtattttatcggcgtgacggcgattaagatcgtcgagaaaacacttccaatcgatccaacgcttttgaagataaacgcaagtactggaataggaggaaccaaaatcagctccgtcaatccttacacggtgttggagtcatcgatctacaaagcttttacgtcggagtttattagacaagcagcggcgaggagcatcaagagagtagcgtcggtgaaaccgttcggcgcgtgtttcagcacgaagaacgttggcgtcacgcgcctaggatacgccgtaccggagattcagctcgtgcttcatagcaaagacgtcgtttggagaatctttggagctaactcgatggtgagtgtcagtgatgacgtcatctgtttgggtttcgttgacggaggagtcaacccaggagcctctgtggtgatcggagggttccagttggaggataatttgatcgaatttgatttggcgagtaacaaatttgggtttagttccacgttattgggccgtcaaactaactgcgccaactttaatttcacttccactgcttgattaaatttagttgatgcactttctcc

SEQ ID NO: 45122 - protein, 445 aa, Arabidopsis thaliana
  peptide (1)..(445): Ceres Seq. ID no. 13575880
IKLIIPHSSLTMASSRIIIFSVLLLSIFSLSSSAQPSFRPKALLLPVTKDPSTLQYTTVINQRTPLVPASVVFDLGGREFWVDCDQGYVSTTYRSPRCNSAVCSRAGSIACGTCFSPPRPGCSNNTCGAFPDNSITGWATSGEFALDVVSIQSTNGSNPGRFVKIPNLIFSCGSTSLLKGLAKGAVGMAGMGRHNIGLPLQFAAAFSFNRKFAVCLTSGRGVAFFGNGPYVFLPGIQISRLQKTPLLINPGTTVFEFSKGEKSPEYFIGVTAIKIVEKTLPIDPTLLKINASTGIGGTKISSVNPYTVLESSIYKAFTSEFIRQAAARSIKRVASVKPFGACFSTKNVGVTRLGYAVPEIQLVLHSKDVVWRIFGANSMVSVSDDVICLGFVDGGVNPGASVVIGGFQLEDNLIEFDLASNKFGFSSTLLGRQTNCANFNFTSTA

SEQ ID NO: 45123 - protein, 434 aa, Arabidopsis thaliana
  peptide (1)..(434): Ceres Seq. ID no. 13575881
MASSRIIIFSVLLLSIFSLSSSAQPSFRPKALLLPVTKDPSTLQYTTVINQRTPLVPASVVFDLGGREFWVDCDQGYVSTTYRSPRCNSAVCSRAGSIACGTCFSPPRPGCSNNTCGAFPDNSITGWATSGEFALDVVSIQSTNGSNPGRFVKIPNLIFSCGSTSLLKGLAKGAVGMAGMGRHNIGLPLQFAAAFSFNRKFAVCLTSGRGVAFFGNGPYVFLPGIQISRLQKTPLLINPGTTVFEFSKGEKSPEYFIGVTAIKIVEKTLPIDPTLLKINASTGIGGTKISSVNPYTVLESSIYKAFTSEFIRQAAARSIKRVASVKPFGACFSTKNVGVTRLGYAVPEIQLVLHSKDVVWRIFGANSMVSVSDDVICLGFVDGGVNPGASVVIGGFQLEDNLIEFDLASNKFGFSSTLLGRQTNCANFNFTSTA

SEQ ID NO: 45124 - protein, 258 aa, Arabidopsis thaliana
  peptide (1)..(258): Ceres Seq. ID no. 13575882
MAGMGRHNIGLPLQFAAAFSFNRKFAVCLTSGRGVAFFGNGPYVFLPGIQISRLQKTPLLINPGTTVFEFSKGEKSPEYFIGVTAIKIVEKTLPIDPTLLKINASTGIGGTKISSVNPYTVLESSIYKAFTSEFIRQAAARSIKRVASVKPFGACFSTKNVGVTRLGYAVPEIQLVLHSKDVVWRIFGANSMVSVSDDVICLGFVDGGVNPGASVVIGGFQLEDNLIEFDLASNKFGFSSTLLGRQTNCANFNFTSTA

SEQ ID NO: 45125 - DNA, 1583 bp, Arabidopsis thaliana
  misc_feature (1)..(1583): Ceres Seq. ID no. 13575883
  misc_feature (1)..(1583): Ortholog of  Ceres SEQ ID NO 15177037 as cited in SEQ ID NO 60242
gaaaagaaaacaaaattcgagaagaaagccaaaaagaaaaagaagagagaatgctctcagtctcagcctctcctcaccaccactaaccccagaagaatcctcacagacagagagagagagagagaatcagaatgggtttgatatcagcgaaagagacgaagaacaacactagaggaatgggtttgctcttagtcttcttccccgaccaccacaacaacaacgacgactctccttcttcttcttcttcttctccggcaacaacaactctcttccgctccagatcttctcgtcttctcctctccaaagctcaatccacaatctcaatctgcatcctcctcctcttcctcactctcttcctcttcactctctccaccttcgaaccttcctctggctttcccgccgtttcttcttctcgtcctcaccgtcgatttctcctcaaccgcgacatctccgcctcttctgaatctcgtcgtcgttataaccgattcgctctccaaggtatgggtactctgtttctcagaggaaccaagagcatgcacgatttgattgttgttcatatctcttccgatactacggaagacgatctccgtctcttcatgcgcttgatccaccgctccggtgtcacttccaaatccgacgtcgttttactcttcaattcgggtacgagattcactgaaatgatcgaagaagagaacgactcgttcttaaaactcgttgatgttcatcggaattcgaattcgtcgaatcaaatcgactccgtttggggatttaatctcacgaaattcatgaagaagcaatcgaaatcatcatcgtctgagccaatttgggggaagaagacgcatcgagctaattacaacgatacgtcgtcgttgaataactcgaccgagtcaaccgagttgttgacacatggctcagtagtgggtttcgacgtgactgagttggatcctgaaaactcgctatccgggtttatggatcacgttccgataagtttgagaagatgggcgtgttacccaatgctgctaggtcgagtaagacgcaatttcaaacacgttatgctcgtggacgctaaaacctccttgttcctcggtgacccgctaacccggattcgtaaccggagccttgagtcagtcctcttcttctctaaacacagtagtagtagcaagaaaagctccgaggttaatccggcgattctgatcggtggagctaaaggaatcaggaggttatcgagctcgatgcacactgagatcgtgagagcgacgattcagcagcagcataagaagaagaactcggttacggaatcggtggtgttgagccaactcgttgggaatgttcacatgacgaagaattttgaagtggttacgagtgagtcggtggtaccggaagcgagttcactggctgagttaaggacgagaaactcggcggcttcgtcgataaagaatcatgatataatacaaagaggtggtggtaatagtaatagtaatcatattattgatattatggcgattattatgaaacgtatttgttcttgtgaattagattcttctgtttataattactgttagcattattttaaaagagtttac

SEQ ID NO: 45126 - protein, 476 aa, Arabidopsis thaliana
  peptide (1)..(476): Ceres Seq. ID no. 13575884
MGLISAKETKNNTRGMGLLLVFFPDHHNNNDDSPSSSSSSPATTTLFRSRSSRLLLSKAQSTISICILLLFLTLFLFTLSTFEPSSGFPAVSSSRPHRRFLLNRDISASSESRRRYNRFALQGMGTLFLRGTKSMHDLIVVHISSDTTEDDLRLFMRLIHRSGVTSKSDVVLLFNSGTRFTEMIEEENDSFLKLVDVHRNSNSSNQIDSVWGFNLTKFMKKQSKSSSSEPIWGKKTHRANYNDTSSLNNSTESTELLTHGSVVGFDVTELDPENSLSGFMDHVPISLRRWACYPMLLGRVRRNFKHVMLVDAKTSLFLGDPLTRIRNRSLESVLFFSKHSSSSKKSSEVNPAILIGGAKGIRRLSSSMHTEIVRATIQQQHKKKNSVTESVVLSQLVGNVHMTKNFEVVTSESVVPEASSLAELRTRNSAASSIKNHDIIQRGGGNSNSNHIIDIMAIIMKRICSCELDSSVYNYC

SEQ ID NO: 45127 - protein, 461 aa, Arabidopsis thaliana
  peptide (1)..(461): Ceres Seq. ID no. 13575885
MGLLLVFFPDHHNNNDDSPSSSSSSPATTTLFRSRSSRLLLSKAQSTISICILLLFLTLFLFTLSTFEPSSGFPAVSSSRPHRRFLLNRDISASSESRRRYNRFALQGMGTLFLRGTKSMHDLIVVHISSDTTEDDLRLFMRLIHRSGVTSKSDVVLLFNSGTRFTEMIEEENDSFLKLVDVHRNSNSSNQIDSVWGFNLTKFMKKQSKSSSSEPIWGKKTHRANYNDTSSLNNSTESTELLTHGSVVGFDVTELDPENSLSGFMDHVPISLRRWACYPMLLGRVRRNFKHVMLVDAKTSLFLGDPLTRIRNRSLESVLFFSKHSSSSKKSSEVNPAILIGGAKGIRRLSSSMHTEIVRATIQQQHKKKNSVTESVVLSQLVGNVHMTKNFEVVTSESVVPEASSLAELRTRNSAASSIKNHDIIQRGGGNSNSNHIIDIMAIIMKRICSCELDSSVYNYC

SEQ ID NO: 45128 - protein, 353 aa, Arabidopsis thaliana
  peptide (1)..(353): Ceres Seq. ID no. 13575886
MGTLFLRGTKSMHDLIVVHISSDTTEDDLRLFMRLIHRSGVTSKSDVVLLFNSGTRFTEMIEEENDSFLKLVDVHRNSNSSNQIDSVWGFNLTKFMKKQSKSSSSEPIWGKKTHRANYNDTSSLNNSTESTELLTHGSVVGFDVTELDPENSLSGFMDHVPISLRRWACYPMLLGRVRRNFKHVMLVDAKTSLFLGDPLTRIRNRSLESVLFFSKHSSSSKKSSEVNPAILIGGAKGIRRLSSSMHTEIVRATIQQQHKKKNSVTESVVLSQLVGNVHMTKNFEVVTSESVVPEASSLAELRTRNSAASSIKNHDIIQRGGGNSNSNHIIDIMAIIMKRICSCELDSSVYNYC

SEQ ID NO: 45129 - DNA, 2828 bp, Arabidopsis thaliana
  misc_feature (1)..(2828): Ceres Seq. ID no. 13575899
  misc_feature (1)..(2828): Ortholog of  Ceres SEQ ID NO 13663060 as cited in SEQ ID NO 60964
  misc_feature (1)..(2828): Ortholog of  Ceres SEQ ID NO 13598532 as cited in SEQ ID NO 65204
  misc_feature (1)..(2828): Ortholog of  Ceres SEQ ID NO 13656849 as cited in SEQ ID NO 65764
  misc_feature (1)..(2828): Ortholog of  Ceres SEQ ID NO 13656501 as cited in SEQ ID NO 69206
acatgcgtctctcagaaatctctccgccccagatccatctctctctcaagcaaacactcttaaacccttttgatttctcctcataattattctcgaaagctccattgtttattagttattcctgcaaattattcaattttaccattttgcttctggtttttttagtcgtctctctctctcttcaatctcttgaaaggtacttgctttatgcacaaaagttataatcctgggtttttttgtactacactgtagttattaatgcctgaacaatcttcttgatctgggtacattttgcagattgagtaaaaatcattcctttttttttctgggttatatacactgttcttcgagttctagggttccttaatttcgtttctcctttttggaaagtctctgactttatgtgttttaatgggtctagttttttcatgtggtccatttaattagctagtggaagaagatggatgaattgtgtaaagattatttttggttctaagtatcaaaaaaatttgggggtaaattgagggagatgggttgtgtttgtggtaagccttctgctattgaagatagcaaagatagtccaagagagcgtttctcaagcaaatcctcttctgagtttagagtttcaagaccggttgcttcttctagaagggaggagccgcttaggattaaggaacggtctgatgttgttagtgtaagaccagtgttgagtaataagcaatccaatgtttcgttgcatttgcgtggagagaatttgagtagaagagagaagaggattgagaatgttgctgctacttcacctcttgcaatgagtattaccatagctaaagcaactgaaggagagtatgtagctgcaggttggcctccatggctggcttctgtagctggagaagctatcaggggatgggttcctcggcgtgcggattcttttgagaagttggacaaaattggtcagggcacttatagtaatgtatatagggctcgcgacctggatcagaagaaaattgtggctttgaagaaagttaggtttgataacttggagccagaaagtgtgcgttttatggctagagaaatccagatattacgccggcttgatcatcctaatatcataaagctagaaggcttagttacgtcaagaatgtcttgcagcttatatcttgttttcgagtacatggaacacgatttagctgggctagcctcgcatcccgcgataaaattttctgaatcacaggttaagtgctacctgcagcaactattacatggactagaccattgtcacagtcgtggtgtactccatcgggatataaaaggctcaaacctgctaatagataatagtggagttttaaagattgctgactttggattagctagtttctttgatcctcgtcaaactcagcctttgaccagtcgtgtggtaactctttggtaccgtccacctgagcttttgctcggagcaactcgctatggagcagcagttgatttgtggagtgcaggttgcattcttgctgaactatatgcaggcaagcctattatgcctggtagaaccgaggtggaacagttgcacaagattttcaagctatgtggctcgcctaccgaggactattgggtaaaatcaaggttgcctcatgcaacaattttcaagcctactcaaccatataaacgcttagtgggtgaaacattcaaggagtttcctcagccagctttagcccttcttgaaactctcctttcagtcaatcctgacgatcgtggaactgccactgcagctctcaagagtgagttcttctccaccagacctcttccatgtgatccttcaagcttgcctaaatatcctcccagcaaagagctcgatgcaagaatgcgggatgaggaaagtagaagacaagttggaggaaacagggaccaaagacaccaagaaagaagaggaactaaggaatctcgagccatcccagcccctgacgcaaatgcagagctggttgcatcaatgcagaaaaggcagagccagtctactaatagaagtcgaagcgagaagtttaatccacatcctgaagaagttgcatccggtttcccaatcgatccaccaaggccgtcatcacaagcatttgaaccaaacagagaatctcagggcaatataattcctcacaagagagcttcacattctggtcctctatcacgtagatctgcttccgcaaagggtagacggaattaccaagattctcaaaaggtttcatccatagctgattactcagcaatgcctggttttgccgcaacaagaacaggcgcaccacaacaagagacttgcagaggaatgactcggcttccaggttcattcaaggaaacgtctgaagaagcaaaccaggaagagaatggtcgaagcaacaagaaagaccctattctcttgggttatggatcaaaagggcacaagattcattactcaggaccgttagtggttccatcaggaaacatggatcaagtgttgaaagaccatgaccgacatatccaagaagctgtgagaagagcacgaatcgataaggctcgagtcaagaaacttcaagctgacgaagcttcgagccaacaagtcgcaaccaatcatccctcatctgtttctagccgttgatccatcagtgaggcaaaagtaaatgatcaaaccgaacctcatttgcctgaaaccttttaacacggcgtattttgagtgaaaaataattgtattttattgattcaaagattatatatcatcatagaatcaaatcttttcacgttttagcttccctgtaatgtgatattattttattataagaaagctgtagaaacagagttatatatcataattt

SEQ ID NO: 45130 - protein, 694 aa, Arabidopsis thaliana
  peptide (1)..(694): Ceres Seq. ID no. 13575900
MGCVCGKPSAIEDSKDSPRERFSSKSSSEFRVSRPVASSRREEPLRIKERSDVVSVRPVLSNKQSNVSLHLRGENLSRREKRIENVAATSPLAMSITIAKATEGEYVAAGWPPWLASVAGEAIRGWVPRRADSFEKLDKIGQGTYSNVYRARDLDQKKIVALKKVRFDNLEPESVRFMAREIQILRRLDHPNIIKLEGLVTSRMSCSLYLVFEYMEHDLAGLASHPAIKFSESQVKCYLQQLLHGLDHCHSRGVLHRDIKGSNLLIDNSGVLKIADFGLASFFDPRQTQPLTSRVVTLWYRPPELLLGATRYGAAVDLWSAGCILAELYAGKPIMPGRTEVEQLHKIFKLCGSPTEDYWVKSRLPHATIFKPTQPYKRLVGETFKEFPQPALALLETLLSVNPDDRGTATAALKSEFFSTRPLPCDPSSLPKYPPSKELDARMRDEESRRQVGGNRDQRHQERRGTKESRAIPAPDANAELVASMQKRQSQSTNRSRSEKFNPHPEEVASGFPIDPPRPSSQAFEPNRESQGNIIPHKRASHSGPLSRRSASAKGRRNYQDSQKVSSIADYSAMPGFAATRTGAPQQETCRGMTRLPGSFKETSEEANQEENGRSNKKDPILLGYGSKGHKIHYSGPLVVPSGNMDQVLKDHDRHIQEAVRRARIDKARVKKLQADEASSQQVATNHPSSVSSR

SEQ ID NO: 45131 - protein, 601 aa, Arabidopsis thaliana
  peptide (1)..(601): Ceres Seq. ID no. 13575901
MSITIAKATEGEYVAAGWPPWLASVAGEAIRGWVPRRADSFEKLDKIGQGTYSNVYRARDLDQKKIVALKKVRFDNLEPESVRFMAREIQILRRLDHPNIIKLEGLVTSRMSCSLYLVFEYMEHDLAGLASHPAIKFSESQVKCYLQQLLHGLDHCHSRGVLHRDIKGSNLLIDNSGVLKIADFGLASFFDPRQTQPLTSRVVTLWYRPPELLLGATRYGAAVDLWSAGCILAELYAGKPIMPGRTEVEQLHKIFKLCGSPTEDYWVKSRLPHATIFKPTQPYKRLVGETFKEFPQPALALLETLLSVNPDDRGTATAALKSEFFSTRPLPCDPSSLPKYPPSKELDARMRDEESRRQVGGNRDQRHQERRGTKESRAIPAPDANAELVASMQKRQSQSTNRSRSEKFNPHPEEVASGFPIDPPRPSSQAFEPNRESQGNIIPHKRASHSGPLSRRSASAKGRRNYQDSQKVSSIADYSAMPGFAATRTGAPQQETCRGMTRLPGSFKETSEEANQEENGRSNKKDPILLGYGSKGHKIHYSGPLVVPSGNMDQVLKDHDRHIQEAVRRARIDKARVKKLQADEASSQQVATNHPSSVSSR

SEQ ID NO: 45132 - protein, 517 aa, Arabidopsis thaliana
  peptide (1)..(517): Ceres Seq. ID no. 13575902
MAREIQILRRLDHPNIIKLEGLVTSRMSCSLYLVFEYMEHDLAGLASHPAIKFSESQVKCYLQQLLHGLDHCHSRGVLHRDIKGSNLLIDNSGVLKIADFGLASFFDPRQTQPLTSRVVTLWYRPPELLLGATRYGAAVDLWSAGCILAELYAGKPIMPGRTEVEQLHKIFKLCGSPTEDYWVKSRLPHATIFKPTQPYKRLVGETFKEFPQPALALLETLLSVNPDDRGTATAALKSEFFSTRPLPCDPSSLPKYPPSKELDARMRDEESRRQVGGNRDQRHQERRGTKESRAIPAPDANAELVASMQKRQSQSTNRSRSEKFNPHPEEVASGFPIDPPRPSSQAFEPNRESQGNIIPHKRASHSGPLSRRSASAKGRRNYQDSQKVSSIADYSAMPGFAATRTGAPQQETCRGMTRLPGSFKETSEEANQEENGRSNKKDPILLGYGSKGHKIHYSGPLVVPSGNMDQVLKDHDRHIQEAVRRARIDKARVKKLQADEASSQQVATNHPSSVSSR

SEQ ID NO: 45133 - DNA, 3822 bp, Arabidopsis thaliana
  misc_feature (1)..(3822): Ceres Seq. ID no. 12560354
  misc_feature (1)..(3822): Ortholog of  Ceres SEQ ID NO 13600310 as cited in SEQ ID NO 5086
atggccgatcagagaagtaaaaccaatagatggaactgggaggtgagtgggttcgaaccgaggaagtcttcttccaatgcatcgtttgcggagagtactggtcaccgtacgactggtcctctgcttcgccggaactcgatttcgactccctcgcttccgcctaagcaagcaattgcatctaaggttaacggattaaaggagaaagttaagcttgcgaaagaagattacttggagttgagacaagaagctactgatcttcaggagtattctaatgctaagcttgacagggttacacgttacttaggtgttttggctgagaaaagtcgtaaattggatcagtttgtccttgagactgaggctaggatatctccacttatcaatgagaagaaaagactgttcaatgacttgttaacggccaaagggaacataaaggtattttgccgtgcaaggccattgtttgaggatgaaggtccctctgttatagagttccctggggattgcaccatatgtgtaaacactagtgatgatactctgtccaatcccaagaaggactttgaatttgaccgagtttacggacctcatgttggacaagctgcactgtttagcgatgtccaaccttttgttcaatctgcactggatggatctaacgtctccatattgtcatatggacaaactaatgcagggaagacatacaccatggaaggttcgaatcacgatcgtggtttatatgctcgatgttttgaggaactcttcgacctagccaattcggattcaacttcgacatcacgattcagtttctctctttcagtgtttgagatctataatgaacagatcagggatctactttcggaaactcagagcaacttgcccaatatcaacatggatttacatgaatctgttatagaactcggacaggaaaaagttgataatccattggagttcttaggagtcttaaaatctgcatttctgaaccggggcaactataaatcaaaatttaatgtgacacatctgattgtctcaatacacatatactatagcaacacgattactggagaaaacatatatagcaagctctctctggttgacttggctggaagtgaaggtttaatcatggaaaatgatagtggagaccacgtcactgatctgctgcatgtcatgaattcgatttcagcgttgggagatgttttatcctcgttgacatccggaaaggattcaattccttatgataattcaattcttacaagagtacttgcagattccctaggaggaagttccaaaacattgatgatcgttaacatctgtccaagtgtgcaaaccttgtctgagacaatctcatgtctcaattatgctgctagagctcggaatactgtaccaagccttggcaatcgagatacaatcaagaaatggagagatgtggcaagtgatgctcggaaggagctgttggagaaggagagagaaaatcagaatctgaaacaagaggttgtgggcttaaaaaaagctcttaaagatgcaaatgaccagtgtgtattactctacagtgaagtgcagagagcgtggaaagtttcatttacattgcaatcagatttaaagtcagagaatattatgcttgtagacaaacatagactagagaaggagcagaattctcagttaaggaatcaaatagctcaatttttacagttggatcaggaacagaagctgcaaatgcaacaacaagattccgccattcaaaatctccaggctaaaattacagacttggaatcacaagtaagtgaagccgttagatctgacacaacaagaacaggagatgccttgcaatctcaggacatattttctccaataccaaaagcggttgagggtacaactgattcttcttctgttaccaagaaacttgaggaagaattgaaaaaacgtgatgcactgattgagaggttgcatgaagaaaacgaaaagttgtttgacagattaacagaaaggtcaatggctgtttcgacccaggtgttgagtccctcattaagagcttcgccaaacattcagcctgccaatgttaacaggggtgaaggatattcggcagaagccgttgctttaccatctacaccaaataagaataacggagcgattacgttagtaaaatctggcactgatttagtaaaaaccactccagctggagaatacttgacagctgcattgaatgactttgaccctgaagaatatgaaggtcttgctgccattgctgacggcgcaaacaagctactaatgctggttttggcagctgtcatcaaggctggtgcttccagagagcatgaaatccttgctgagattagagattctgtcttttcatttattcggaaaatggaaccaagaagagtaatggataccatgcttgtttcccgagttaggatactatacataaggtccttactggcacgatcaccggagcttcagactatcagggtctctcctgtcgagtgctttcttgagaagcctaatactggtagaagtaaaagcactagcaggggtagcagcccaggtagatcccctgttcgatatcttgatacgcagatccatggctttaaagtaaatataaaggcagaaaggagaaacaagttggcatctgtggtatcaagaatgcgtggacttgaacaggatgctgggaggcagcaagttactggagttaagctgcgggaaatgcaagatgaagccaaaagttttgctattgggaacaaagccttggctgcgttatttgttcacactccggctggtgaactgcagcgacagattcggctatggcttgcagaaaattttgagtttctttccgtgacctcagatgatgtatcgggaggaaacggtggccaactagagcttctttccacagcaattatggatggttggatggctggactaggggccgctgtgccacctcatacagatgctctcgggcagcttctgtccgagtatgcaaaacgtgtctatacttctcaaatgcagcacatgaaggatattgctggtaccttggcggcagaagaggcagaagatgctggtcaagtgtctaagcttcgatcagctcttgagtccgttgaccacaaaagaagaaagattttacaacaaatgaaaagtgatgcagctttgcttaacctggaagaaggcagttctcctattccaaacccttcgacggcagctgaagactcaagattagcatctctcatttctctggatggcattttgaagcaagtcaaggaaatcacaagacaagcctctgtccatgttttgagtaaaagcaagaagaaagcattacttgagtcccttgatgaactcactgagcggatgccttctcttcttgatatcgaccatccatgcgcacaaagagaaattgctacagcacaccagttggtcgagacgattcctgaacaagaggacactaatattctggaacaatcacacgaccggagaccctcattagaatcaatatcctcaggtgaaactgatgtatctcagtggaacgttttgcaattcaacacaggctcttcagccccattcatcataaaatgtggaggcaacaacaactcagagctcgtgatcaaggctgatgcacgcgttcaagagcccaaaggaggtgaaattgtcagagttgtcccaagaccttctgtgctagtaaacatgagcttagaggaaatgaaacaaatgtttgtgcaattacccgaagctctaagtttgctggctttagctagaacagctgatggcacaagagctcgctactctagactctacaaaactctggccatgaaggttccctctcttaaggaccttgttagtgaactggagtaa

SEQ ID NO: 45134 - protein, 1273 aa, Arabidopsis thaliana
  peptide (1)..(1273): Ceres Seq. ID no. 12560355
MADQRSKTNRWNWEVSGFEPRKSSSNASFAESTGHRTTGPLLRRNSISTPSLPPKQAIASKVNGLKEKVKLAKEDYLELRQEATDLQEYSNAKLDRVTRYLGVLAEKSRKLDQFVLETEARISPLINEKKRLFNDLLTAKGNIKVFCRARPLFEDEGPSVIEFPGDCTICVNTSDDTLSNPKKDFEFDRVYGPHVGQAALFSDVQPFVQSALDGSNVSILSYGQTNAGKTYTMEGSNHDRGLYARCFEELFDLANSDSTSTSRFSFSLSVFEIYNEQIRDLLSETQSNLPNINMDLHESVIELGQEKVDNPLEFLGVLKSAFLNRGNYKSKFNVTHLIVSIHIYYSNTITGENIYSKLSLVDLAGSEGLIMENDSGDHVTDLLHVMNSISALGDVLSSLTSGKDSIPYDNSILTRVLADSLGGSSKTLMIVNICPSVQTLSETISCLNYAARARNTVPSLGNRDTIKKWRDVASDARKELLEKERENQNLKQEVVGLKKALKDANDQCVLLYSEVQRAWKVSFTLQSDLKSENIMLVDKHRLEKEQNSQLRNQIAQFLQLDQEQKLQMQQQDSAIQNLQAKITDLESQVSEAVRSDTTRTGDALQSQDIFSPIPKAVEGTTDSSSVTKKLEEELKKRDALIERLHEENEKLFDRLTERSMAVSTQVLSPSLRASPNIQPANVNRGEGYSAEAVALPSTPNKNNGAITLVKSGTDLVKTTPAGEYLTAALNDFDPEEYEGLAAIADGANKLLMLVLAAVIKAGASREHEILAEIRDSVFSFIRKMEPRRVMDTMLVSRVRILYIRSLLARSPELQTIRVSPVECFLEKPNTGRSKSTSRGSSPGRSPVRYLDTQIHGFKVNIKAERRNKLASVVSRMRGLEQDAGRQQVTGVKLREMQDEAKSFAIGNKALAALFVHTPAGELQRQIRLWLAENFEFLSVTSDDVSGGNGGQLELLSTAIMDGWMAGLGAAVPPHTDALGQLLSEYAKRVYTSQMQHMKDIAGTLAAEEAEDAGQVSKLRSALESVDHKRRKILQQMKSDAALLNLEEGSSPIPNPSTAAEDSRLASLISLDGILKQVKEITRQASVHVLSKSKKKALLESLDELTERMPSLLDIDHPCAQREIATAHQLVETIPEQEDTNILEQSHDRRPSLESISSGETDVSQWNVLQFNTGSSAPFIIKCGGNNNSELVIKADARVQEPKGGEIVRVVPRPSVLVNMSLEEMKQMFVQLPEALSLLALARTADGTRARYSRLYKTLAMKVPSLKDLVSELE

SEQ ID NO: 45135 - protein, 1041 aa, Arabidopsis thaliana
  peptide (1)..(1041): Ceres Seq. ID no. 12560356
MEGSNHDRGLYARCFEELFDLANSDSTSTSRFSFSLSVFEIYNEQIRDLLSETQSNLPNINMDLHESVIELGQEKVDNPLEFLGVLKSAFLNRGNYKSKFNVTHLIVSIHIYYSNTITGENIYSKLSLVDLAGSEGLIMENDSGDHVTDLLHVMNSISALGDVLSSLTSGKDSIPYDNSILTRVLADSLGGSSKTLMIVNICPSVQTLSETISCLNYAARARNTVPSLGNRDTIKKWRDVASDARKELLEKERENQNLKQEVVGLKKALKDANDQCVLLYSEVQRAWKVSFTLQSDLKSENIMLVDKHRLEKEQNSQLRNQIAQFLQLDQEQKLQMQQQDSAIQNLQAKITDLESQVSEAVRSDTTRTGDALQSQDIFSPIPKAVEGTTDSSSVTKKLEEELKKRDALIERLHEENEKLFDRLTERSMAVSTQVLSPSLRASPNIQPANVNRGEGYSAEAVALPSTPNKNNGAITLVKSGTDLVKTTPAGEYLTAALNDFDPEEYEGLAAIADGANKLLMLVLAAVIKAGASREHEILAEIRDSVFSFIRKMEPRRVMDTMLVSRVRILYIRSLLARSPELQTIRVSPVECFLEKPNTGRSKSTSRGSSPGRSPVRYLDTQIHGFKVNIKAERRNKLASVVSRMRGLEQDAGRQQVTGVKLREMQDEAKSFAIGNKALAALFVHTPAGELQRQIRLWLAENFEFLSVTSDDVSGGNGGQLELLSTAIMDGWMAGLGAAVPPHTDALGQLLSEYAKRVYTSQMQHMKDIAGTLAAEEAEDAGQVSKLRSALESVDHKRRKILQQMKSDAALLNLEEGSSPIPNPSTAAEDSRLASLISLDGILKQVKEITRQASVHVLSKSKKKALLESLDELTERMPSLLDIDHPCAQREIATAHQLVETIPEQEDTNILEQSHDRRPSLESISSGETDVSQWNVLQFNTGSSAPFIIKCGGNNNSELVIKADARVQEPKGGEIVRVVPRPSVLVNMSLEEMKQMFVQLPEALSLLALARTADGTRARYSRLYKTLAMKVPSLKDLVSELE

SEQ ID NO: 45136 - protein, 980 aa, Arabidopsis thaliana
  peptide (1)..(980): Ceres Seq. ID no. 12560357
MDLHESVIELGQEKVDNPLEFLGVLKSAFLNRGNYKSKFNVTHLIVSIHIYYSNTITGENIYSKLSLVDLAGSEGLIMENDSGDHVTDLLHVMNSISALGDVLSSLTSGKDSIPYDNSILTRVLADSLGGSSKTLMIVNICPSVQTLSETISCLNYAARARNTVPSLGNRDTIKKWRDVASDARKELLEKERENQNLKQEVVGLKKALKDANDQCVLLYSEVQRAWKVSFTLQSDLKSENIMLVDKHRLEKEQNSQLRNQIAQFLQLDQEQKLQMQQQDSAIQNLQAKITDLESQVSEAVRSDTTRTGDALQSQDIFSPIPKAVEGTTDSSSVTKKLEEELKKRDALIERLHEENEKLFDRLTERSMAVSTQVLSPSLRASPNIQPANVNRGEGYSAEAVALPSTPNKNNGAITLVKSGTDLVKTTPAGEYLTAALNDFDPEEYEGLAAIADGANKLLMLVLAAVIKAGASREHEILAEIRDSVFSFIRKMEPRRVMDTMLVSRVRILYIRSLLARSPELQTIRVSPVECFLEKPNTGRSKSTSRGSSPGRSPVRYLDTQIHGFKVNIKAERRNKLASVVSRMRGLEQDAGRQQVTGVKLREMQDEAKSFAIGNKALAALFVHTPAGELQRQIRLWLAENFEFLSVTSDDVSGGNGGQLELLSTAIMDGWMAGLGAAVPPHTDALGQLLSEYAKRVYTSQMQHMKDIAGTLAAEEAEDAGQVSKLRSALESVDHKRRKILQQMKSDAALLNLEEGSSPIPNPSTAAEDSRLASLISLDGILKQVKEITRQASVHVLSKSKKKALLESLDELTERMPSLLDIDHPCAQREIATAHQLVETIPEQEDTNILEQSHDRRPSLESISSGETDVSQWNVLQFNTGSSAPFIIKCGGNNNSELVIKADARVQEPKGGEIVRVVPRPSVLVNMSLEEMKQMFVQLPEALSLLALARTADGTRARYSRLYKTLAMKVPSLKDLVSELE

SEQ ID NO: 45137 - DNA, 2592 bp, Arabidopsis thaliana
  misc_feature (1)..(2592): Ceres Seq. ID no. 13575906
  misc_feature (1)..(2592): Ortholog of  Ceres SEQ ID NO 13656404 as cited in SEQ ID NO 65806
  misc_feature (1)..(2592): Ortholog of  Ceres SEQ ID NO 12779935 as cited in SEQ ID NO 66774
  misc_feature (1)..(2592): Ortholog of  Ceres SEQ ID NO 13598695 as cited in SEQ ID NO 67368
  misc_feature (1)..(2592): Ortholog of  Ceres SEQ ID NO 13591174 as cited in SEQ ID NO 68289
gatctcttcctttgattcttcttctaatcttcttcaatggcgattccaaggtttagctctctgttacggtgtagaaaatgggctaaaagtgactggcttgtcgcttctataggatgcgtattgatcgtttttttcctctctttcttcttcgatcccacttcagactctgtcccctccgttgaccgatctcggccaatcatatctcctagcgatctggtcaagctgaagttgtcgagtgtagctaaagagagaggagctttttgtttggatggaagcttgcctgggtaccactttcatgagggttctggatctggctcccaaagctggcttgttcatttggagggtggaggctggtgcaacacagttgcgtcatgttctgctcgagcattgactaaattaggttcttccaactactttgaacaagaagtggcctttcaaggtgttttaagtagtgacccatctcaaaatcctgaattctttaactggaacaaggttgcgataaggtactgtgatggtgcttctttttctggacgccctgaagctgaattcaagaatggcacacggcttttcttccggggccagcttatttgggaggctattattgatgaacttttgtcaatgggcatgtcagatgccaaacaggccatacttacaggatgttctgccggtggcttggcaagtcttatacattgtgactactttcgagatcatcttccaaaagatgcagctgtcaaatgtgtttctgatggaggctactttctcaacgtgcctgatgtccttggaaacccaacaatgaggtctttctatcatgatgttgttaatttgcagggcgtagagaagagcttggatcagaaatgtgtagccaaaacggagccatctaagtgtatgtttcctcaagaattcctgaaaaacataagaactccggtatttcttgtcaatccagcctacgatttttggcagattcaacatgtcttggtaccaacttctgcggatccagataaaagttgggcaaagtgcagactcaatattaaggaatgtgatgccgaacagattaaagttctacacggttttcgcagttctatgatgactgcaattggggaatttcatcagaacaaagatggtgggatgttcatagattcctgctatgctcattgccagacagtcatgtccgtgacatggcactccctgacctcaccaagaatcgaaaataagaaaaccggtgaagctaatcgattgtccatacccgtgcaatccttcttgttacaacatgaatttcacatgaacttgccttatatcctcattttaccacttcctctgcttgtggactttttcgattctccagaagcttcttcagcaagggagcagtcacttcctcaaaattctcaatccggaacatggtctaagagtgactggcttctcgcttcaatcggaatagtcttgatcgtttattccttttctttgtccttcaattcaacttcagactctatcccctccgttgaccgtagcgatctagttaaactgaagctgtcgagtaaagctaaagagagaggagctttttgcttagatggaagcttacctggttatcactttcataagggttcaggatctggctccaatagctggcttctttatttagagggtggaggcgggtgccgtacaattgagtcatgttctgctagagcaatgactaggttaggttcttccaacttctttgaacatgaagtgcctttttttggcgttttaagcagtgacccatctcaaaaccctgacttctttaactggaacagagttatgatacggtactgtgatggtgcttgtttttctggacaccctgaagctgaattcaagaatgaaacacggcttttcttccgcggccagctcatttgggaggctatcatggatgaattgttgtcgatgggcatgtcacatgcgaaacgtgccatgctcacaggatgttctgctggtggcttgtctactctaatacattgtgactactttcgagaccatctgcctaaagatgcaactgttaaatgtgtttccgatggaggctatattcttaatgtgcttgatgtccttggaaacccaacaatgggatctttctttcatgatgttgttaccctgcagagcgtagataagagcttggatcagaattgtgttgccaaaatggaaccatctaagtgtatgtttcctcaagaatctcttaaaaacataagaactccggtatttcttgtcaacacagcctacgattattggcagattcaaaacggcctggtaccagattctccggatctagatgaaagatggaaaatttgtagactcaatattcaggaatgtgatgccgcacaaatgaaagttctgcatggtttccgcagttccctgatcgatgcgataggagaatttcatgtgaacaaagagggtgggatgtttataaattcgtgcaattctcattgccagataagagagtcatggcattccgcaacctcaacaagaatcgaaaataagacgattgcagagtctgtaggtgattggtacttcaaccgaaaaccggtgaagctaatcgattgtccttatccgtgcaatgcctcttgttga

SEQ ID NO: 45138 - protein, 851 aa, Arabidopsis thaliana
  peptide (1)..(851): Ceres Seq. ID no. 13575907
MAIPRFSSLLRCRKWAKSDWLVASIGCVLIVFFLSFFFDPTSDSVPSVDRSRPIISPSDLVKLKLSSVAKERGAFCLDGSLPGYHFHEGSGSGSQSWLVHLEGGGWCNTVASCSARALTKLGSSNYFEQEVAFQGVLSSDPSQNPEFFNWNKVAIRYCDGASFSGRPEAEFKNGTRLFFRGQLIWEAIIDELLSMGMSDAKQAILTGCSAGGLASLIHCDYFRDHLPKDAAVKCVSDGGYFLNVPDVLGNPTMRSFYHDVVNLQGVEKSLDQKCVAKTEPSKCMFPQEFLKNIRTPVFLVNPAYDFWQIQHVLVPTSADPDKSWAKCRLNIKECDAEQIKVLHGFRSSMMTAIGEFHQNKDGGMFIDSCYAHCQTVMSVTWHSLTSPRIENKKTGEANRLSIPVQSFLLQHEFHMNLPYILILPLPLLVDFFDSPEASSAREQSLPQNSQSGTWSKSDWLLASIGIVLIVYSFSLSFNSTSDSIPSVDRSDLVKLKLSSKAKERGAFCLDGSLPGYHFHKGSGSGSNSWLLYLEGGGGCRTIESCSARAMTRLGSSNFFEHEVPFFGVLSSDPSQNPDFFNWNRVMIRYCDGACFSGHPEAEFKNETRLFFRGQLIWEAIMDELLSMGMSHAKRAMLTGCSAGGLSTLIHCDYFRDHLPKDATVKCVSDGGYILNVLDVLGNPTMGSFFHDVVTLQSVDKSLDQNCVAKMEPSKCMFPQESLKNIRTPVFLVNTAYDYWQIQNGLVPDSPDLDERWKICRLNIQECDAAQMKVLHGFRSSLIDAIGEFHVNKEGGMFINSCNSHCQIRESWHSATSTRIENKTIAESVGDWYFNRKPVKLIDCPYPCNASC

SEQ ID NO: 45139 - protein, 657 aa, Arabidopsis thaliana
  peptide (1)..(657): Ceres Seq. ID no. 13575908
MGMSDAKQAILTGCSAGGLASLIHCDYFRDHLPKDAAVKCVSDGGYFLNVPDVLGNPTMRSFYHDVVNLQGVEKSLDQKCVAKTEPSKCMFPQEFLKNIRTPVFLVNPAYDFWQIQHVLVPTSADPDKSWAKCRLNIKECDAEQIKVLHGFRSSMMTAIGEFHQNKDGGMFIDSCYAHCQTVMSVTWHSLTSPRIENKKTGEANRLSIPVQSFLLQHEFHMNLPYILILPLPLLVDFFDSPEASSAREQSLPQNSQSGTWSKSDWLLASIGIVLIVYSFSLSFNSTSDSIPSVDRSDLVKLKLSSKAKERGAFCLDGSLPGYHFHKGSGSGSNSWLLYLEGGGGCRTIESCSARAMTRLGSSNFFEHEVPFFGVLSSDPSQNPDFFNWNRVMIRYCDGACFSGHPEAEFKNETRLFFRGQLIWEAIMDELLSMGMSHAKRAMLTGCSAGGLSTLIHCDYFRDHLPKDATVKCVSDGGYILNVLDVLGNPTMGSFFHDVVTLQSVDKSLDQNCVAKMEPSKCMFPQESLKNIRTPVFLVNTAYDYWQIQNGLVPDSPDLDERWKICRLNIQECDAAQMKVLHGFRSSLIDAIGEFHVNKEGGMFINSCNSHCQIRESWHSATSTRIENKTIAESVGDWYFNRKPVKLIDCPYPCNASC

SEQ ID NO: 45140 - protein, 655 aa, Arabidopsis thaliana
  peptide (1)..(655): Ceres Seq. ID no. 13575909
MSDAKQAILTGCSAGGLASLIHCDYFRDHLPKDAAVKCVSDGGYFLNVPDVLGNPTMRSFYHDVVNLQGVEKSLDQKCVAKTEPSKCMFPQEFLKNIRTPVFLVNPAYDFWQIQHVLVPTSADPDKSWAKCRLNIKECDAEQIKVLHGFRSSMMTAIGEFHQNKDGGMFIDSCYAHCQTVMSVTWHSLTSPRIENKKTGEANRLSIPVQSFLLQHEFHMNLPYILILPLPLLVDFFDSPEASSAREQSLPQNSQSGTWSKSDWLLASIGIVLIVYSFSLSFNSTSDSIPSVDRSDLVKLKLSSKAKERGAFCLDGSLPGYHFHKGSGSGSNSWLLYLEGGGGCRTIESCSARAMTRLGSSNFFEHEVPFFGVLSSDPSQNPDFFNWNRVMIRYCDGACFSGHPEAEFKNETRLFFRGQLIWEAIMDELLSMGMSHAKRAMLTGCSAGGLSTLIHCDYFRDHLPKDATVKCVSDGGYILNVLDVLGNPTMGSFFHDVVTLQSVDKSLDQNCVAKMEPSKCMFPQESLKNIRTPVFLVNTAYDYWQIQNGLVPDSPDLDERWKICRLNIQECDAAQMKVLHGFRSSLIDAIGEFHVNKEGGMFINSCNSHCQIRESWHSATSTRIENKTIAESVGDWYFNRKPVKLIDCPYPCNASC

SEQ ID NO: 45141 - DNA, 1670 bp, Arabidopsis thaliana
  misc_feature (1)..(1670): Ceres Seq. ID no. 12560366
  misc_feature (1)..(1670): Ortholog of  Ceres SEQ ID NO 13660287 as cited in SEQ ID NO 67316
  misc_feature (1)..(1670): Ortholog of  Ceres SEQ ID NO 14307892 as cited in SEQ ID NO 67490
aagtttatacagttttaaaacattctctctatctccctccggctaggctgtagctgttcgccatgggagacgcagagagcacctccaaaactagcttgctgctcccggtggaaagagttgaaaacgtgacatggagagatctgcgagatggattattcaccgcagaactcaagaggcttatctgctttgccgctcctatggcggctgttgttatcgctcagttcatgttgcagatcatctcaatggtgatggttggtcacctcggaaatctctccctcgctagtgcctctctcgcctcctccttctgcaacgtcaccggcttcagcttcatcgtaggattgtcatgtgccttagatactttgagtggtcaagcttatggagctaagctatatcggaaagtaggagttcagacttacacagcaatgttctgtcttgcattagtatgtctccctctcactctcatatggttaaacatggaaacgcttcttgtattccttggccaagatccttctattgctcacgaagccggcagatatgctgcttgcctcatcccaggactgtttgcttacgctgttctacagcctctcactcgctacttccaaaaccagagcatgattacacctctcctcatcacctcttgttttgtgttctgtctccatgttcctctctgctggcttttggtttataagtcagggcttggtaatcttggaggagccttagctctcagtttttcgaactgtctttataccattatccttggatctttaatgtgcttctcctctgcctgttctgagacacgcgcaccgctctccatggagatatttgacggcattggagagttcttcagatatgctcttccttctgcggctatgatttgcctggagtggtggtcatatgaactcataatattactctctggtctcttacccaacccacagctggagacttctgtgctctctgtctgtctccaaacaactgcgacagtctattcgatacatcttgcaatcgcagctgcagcaagcacaagaatctcaaatgagttaggtgctggaaactctcgagcagctaatattgtggtctacgcagcaatgtctcttgcagtagtggaaatattaatattgagtacttctctattagtcggcaggaatgttttcggccatgttttcagcagtgacaaggaaaccatcgactatgttgcaaagatggctccattggtctctatttctctcatactggacggtttacaaggggttctctcaggtattgcaaggggatgcggatggcaacatataggagcttacataaacttaggagctttctatctctgggggatacccattgctgcatctttagccttctggattcatctgaaaggtgttggcctttggattggaatccaagccggtgccgttctgcaaacgcttctgcttactcttgtcacgggctgcacaaactgggaaagccaggccgataaagcgagaaatcgaatggctttggcctatggaacgtaaggcgctgcagaacagctaaagatcatagtgagcataggttcctccggttttaccagttttgtagcagacgaattgctgtatgttactttgtggttattggaaggtttggttgtaataatactgcacaattttcatcagtattaataagcatccttcttc

SEQ ID NO: 45142 - protein, 482 aa, Arabidopsis thaliana
  peptide (1)..(482): Ceres Seq. ID no. 12560367
MGDAESTSKTSLLLPVERVENVTWRDLRDGLFTAELKRLICFAAPMAAVVIAQFMLQIISMVMVGHLGNLSLASASLASSFCNVTGFSFIVGLSCALDTLSGQAYGAKLYRKVGVQTYTAMFCLALVCLPLTLIWLNMETLLVFLGQDPSIAHEAGRYAACLIPGLFAYAVLQPLTRYFQNQSMITPLLITSCFVFCLHVPLCWLLVYKSGLGNLGGALALSFSNCLYTIILGSLMCFSSACSETRAPLSMEIFDGIGEFFRYALPSAAMICLEWWSYELIILLSGLLPNPQLETSVLSVCLQTTATVYSIHLAIAAAASTRISNELGAGNSRAANIVVYAAMSLAVVEILILSTSLLVGRNVFGHVFSSDKETIDYVAKMAPLVSISLILDGLQGVLSGIARGCGWQHIGAYINLGAFYLWGIPIAASLAFWIHLKGVGLWIGIQAGAVLQTLLLTLVTGCTNWESQADKARNRMALAYGT

SEQ ID NO: 45143 - protein, 437 aa, Arabidopsis thaliana
  peptide (1)..(437): Ceres Seq. ID no. 12560368
MAAVVIAQFMLQIISMVMVGHLGNLSLASASLASSFCNVTGFSFIVGLSCALDTLSGQAYGAKLYRKVGVQTYTAMFCLALVCLPLTLIWLNMETLLVFLGQDPSIAHEAGRYAACLIPGLFAYAVLQPLTRYFQNQSMITPLLITSCFVFCLHVPLCWLLVYKSGLGNLGGALALSFSNCLYTIILGSLMCFSSACSETRAPLSMEIFDGIGEFFRYALPSAAMICLEWWSYELIILLSGLLPNPQLETSVLSVCLQTTATVYSIHLAIAAAASTRISNELGAGNSRAANIVVYAAMSLAVVEILILSTSLLVGRNVFGHVFSSDKETIDYVAKMAPLVSISLILDGLQGVLSGIARGCGWQHIGAYINLGAFYLWGIPIAASLAFWIHLKGVGLWIGIQAGAVLQTLLLTLVTGCTNWESQADKARNRMALAYGT

SEQ ID NO: 45144 - protein, 428 aa, Arabidopsis thaliana
  peptide (1)..(428): Ceres Seq. ID no. 12560369
MLQIISMVMVGHLGNLSLASASLASSFCNVTGFSFIVGLSCALDTLSGQAYGAKLYRKVGVQTYTAMFCLALVCLPLTLIWLNMETLLVFLGQDPSIAHEAGRYAACLIPGLFAYAVLQPLTRYFQNQSMITPLLITSCFVFCLHVPLCWLLVYKSGLGNLGGALALSFSNCLYTIILGSLMCFSSACSETRAPLSMEIFDGIGEFFRYALPSAAMICLEWWSYELIILLSGLLPNPQLETSVLSVCLQTTATVYSIHLAIAAAASTRISNELGAGNSRAANIVVYAAMSLAVVEILILSTSLLVGRNVFGHVFSSDKETIDYVAKMAPLVSISLILDGLQGVLSGIARGCGWQHIGAYINLGAFYLWGIPIAASLAFWIHLKGVGLWIGIQAGAVLQTLLLTLVTGCTNWESQADKARNRMALAYGT

SEQ ID NO: 45145 - DNA, 1741 bp, Arabidopsis thaliana
  misc_feature (1)..(1741): Ceres Seq. ID no. 13575914
  misc_feature (1)..(1741): Ortholog of  Ceres SEQ ID NO 15171476 as cited in SEQ ID NO 55569
  misc_feature (1)..(1741): Ortholog of  Ceres SEQ ID NO 14312069 as cited in SEQ ID NO 59191
gagcagcaagcttcttcttctgcatactggtcattgattggttaatcagagctctctcttttcttttcctatctctagagactagagaaatggctctctatctctcttcttcacgactcatcacctttctctctttcatcttgcttctctccaatggcttctcgtcctcttcctctcgccctagcatccaccatcgtcaccacctggacaaccacaattacaaagacgctctctccaagtccattctcttcttcgaaggtcaaagatccggaaagcttcctccaaaccagagaatgacttggagaagcaactctggtctctctgatggctctgctctcaacgtggatttggtgggaggatactacgatgcaggggacaatatgaagtttggattcccaatggcattcacaaccacaatgctctcatggagtttaattgagtttggtggtctcatgaaatctgagttaccaaacgcaaaagacgctattcgttgggctactgactttctcctcaaagccacttcacatcctgataccatttatgttcaggttggtgatcctaacatggaccatgcttgttgggagagaccagaagacatggacacaccaagaagtgtgtttaaagtcgacaagaacaatcctggttctgatatcgccggtgaaatcgccgccgctcttgccgctgcttcaattgttttcagaaaatgtgatccttcttactccaatcacctcctccaacgagccattacggtttttacatttgcggacaaatacagaggaccctacagtgcaggtctggccccagaagtttgtccattctactgttcttactctggatatcaggatgaattgttatggggagctgcttggttacaaaaagcaacaaataacccaacatatctcaattacatcaaagctaatggacaaatccttggagctgatgagtttgataacatgtttagttgggataataagcacgttggtgctagaatccttctctccaaggagtttctgattcagaaagtgaagtcacttgaagaatacaaagagcatgctgatagtttcatttgctctgttctacctggagcatcctcttcccaatatacaccaggtgggctattgttcaagatgggtgagagcaacatgcaatacgtgacgtctacatcgttcttgctcttgacctacgccaaatacttaacctctgctcgcaccgtcgcttattgcggtggctccgtcgtcacccctgcccgcctccgctccatcgcaaagaaacaggtggattatctacttggaggcaacccgttgaagatgtcatacatggttggttatggtctgaaatatccacgtcggattcaccaccgtggctcatctctcccctccgttgcagtccacccgaccaggatccagtgccacgacggcttctccttgtttacctctcaatctcctaatcctaacgacctagtcggtgcagtagtcggtggtccggaccagaacgatcaattccctgacgaacggtccgactacggacggtcagagccagcaacttacattaacgctccacttgttggagctttggcttatcttgctcgatcctaaggccaactttaactaagcttaaaccgcatttaattgttggtttacaatgttaattagtagtaatgattttataaatgaatggccaagattgtccgatccggctgaatgaatgttttagatgatgtggtatttgattttaattttct

SEQ ID NO: 45146 - protein, 530 aa, Arabidopsis thaliana
  peptide (1)..(530): Ceres Seq. ID no. 13575915
AASFFFCILVIDWLIRALSFLFLSLETREMALYLSSSRLITFLSFILLLSNGFSSSSSRPSIHHRHHLDNHNYKDALSKSILFFEGQRSGKLPPNQRMTWRSNSGLSDGSALNVDLVGGYYDAGDNMKFGFPMAFTTTMLSWSLIEFGGLMKSELPNAKDAIRWATDFLLKATSHPDTIYVQVGDPNMDHACWERPEDMDTPRSVFKVDKNNPGSDIAGEIAAALAAASIVFRKCDPSYSNHLLQRAITVFTFADKYRGPYSAGLAPEVCPFYCSYSGYQDELLWGAAWLQKATNNPTYLNYIKANGQILGADEFDNMFSWDNKHVGARILLSKEFLIQKVKSLEEYKEHADSFICSVLPGASSSQYTPGGLLFKMGESNMQYVTSTSFLLLTYAKYLTSARTVAYCGGSVVTPARLRSIAKKQVDYLLGGNPLKMSYMVGYGLKYPRRIHHRGSSLPSVAVHPTRIQCHDGFSLFTSQSPNPNDLVGAVVGGPDQNDQFPDERSDYGRSEPATYINAPLVGALAYLARS

SEQ ID NO: 45147 - protein, 501 aa, Arabidopsis thaliana
  peptide (1)..(501): Ceres Seq. ID no. 13575916
MALYLSSSRLITFLSFILLLSNGFSSSSSRPSIHHRHHLDNHNYKDALSKSILFFEGQRSGKLPPNQRMTWRSNSGLSDGSALNVDLVGGYYDAGDNMKFGFPMAFTTTMLSWSLIEFGGLMKSELPNAKDAIRWATDFLLKATSHPDTIYVQVGDPNMDHACWERPEDMDTPRSVFKVDKNNPGSDIAGEIAAALAAASIVFRKCDPSYSNHLLQRAITVFTFADKYRGPYSAGLAPEVCPFYCSYSGYQDELLWGAAWLQKATNNPTYLNYIKANGQILGADEFDNMFSWDNKHVGARILLSKEFLIQKVKSLEEYKEHADSFICSVLPGASSSQYTPGGLLFKMGESNMQYVTSTSFLLLTYAKYLTSARTVAYCGGSVVTPARLRSIAKKQVDYLLGGNPLKMSYMVGYGLKYPRRIHHRGSSLPSVAVHPTRIQCHDGFSLFTSQSPNPNDLVGAVVGGPDQNDQFPDERSDYGRSEPATYINAPLVGALAYLARS

SEQ ID NO: 45148 - protein, 433 aa, Arabidopsis thaliana
  peptide (1)..(433): Ceres Seq. ID no. 13575917
MTWRSNSGLSDGSALNVDLVGGYYDAGDNMKFGFPMAFTTTMLSWSLIEFGGLMKSELPNAKDAIRWATDFLLKATSHPDTIYVQVGDPNMDHACWERPEDMDTPRSVFKVDKNNPGSDIAGEIAAALAAASIVFRKCDPSYSNHLLQRAITVFTFADKYRGPYSAGLAPEVCPFYCSYSGYQDELLWGAAWLQKATNNPTYLNYIKANGQILGADEFDNMFSWDNKHVGARILLSKEFLIQKVKSLEEYKEHADSFICSVLPGASSSQYTPGGLLFKMGESNMQYVTSTSFLLLTYAKYLTSARTVAYCGGSVVTPARLRSIAKKQVDYLLGGNPLKMSYMVGYGLKYPRRIHHRGSSLPSVAVHPTRIQCHDGFSLFTSQSPNPNDLVGAVVGGPDQNDQFPDERSDYGRSEPATYINAPLVGALAYLARS

SEQ ID NO: 45149 - DNA, 3264 bp, Arabidopsis thaliana
  misc_feature (1)..(3264): Ceres Seq. ID no. 12600209
  misc_feature (1)..(3264): Ortholog of  Ceres SEQ ID NO 13654989 as cited in SEQ ID NO 63117
  misc_feature (1)..(3264): Ortholog of  Ceres SEQ ID NO 13657138 as cited in SEQ ID NO 65923
  misc_feature (1)..(3264): Ortholog of  Ceres SEQ ID NO 13584744 as cited in SEQ ID NO 69137
agactagagaagaaaaaccaaaaaccctaaaaaaagaaaaagagagagattgttttcacattttcgcggttttcttcttctccttgtatttatctctgaagtcgtgcttttgatgtgaaaggagaagaagcttgaagacagacaactttaaagttgacgaaaccaatgcttctggtgaagttttgagcttttgagcgatcttttgggtcttgctcttgctcttgaggcagagaacccatagacagttgttttgtctgtttgttggtgtcagatccaaaatcaagaggctgttatagctttgacttggaagtgatttgacacaatgaaggaagaagattcaaaaaaaataagagggtaggaatctatttggtcgcttttgcttcctcctattctggggagaatttgggatcttggagttgaatccgttgtgagaagaaggatctttttgagcttgtgtactgtgtcctctcagttgattcatcgcagagagaagaggtcctgtcatgtctatgagttttgtattcatctgaaaggtcttactggaatgacttatcaaaggggagagtctttggttcctgtcttgatttccaacttggtgggggcataggccaaataatgcaaacctaaaatccttgtttcttccagaatcttgtgagctttttaatctctccaacaaagtacaatttctctgaggattgtgttattacacagagaaaacaaaaagagggtccaagaaaatctcttgcattctcttctcctctctctggtattggtatcttcaaatgagtcgactacagaagcgagggaaacaggaaaagcctgttgtatctgatggagctcaaaaggttattgttgctgttaaagcatctagggagattccaaagactgccttgatttgggctttgactcatgttgttcagcctggggattgcattacccttattgttgttgtcccttctcacaactccggacgaaaactttggggtttcactaagagtttccctatgtttgctggggattgtgcaagtggtcatcggaaatcacattctgaagcactaccggagattaaaagtgatctcactgacacttgttcccaaatgattctccagcttcatgatgtctatgacccgaataagataaatgtcaagattaagattgtttctggatcaccctgtggagcagttgctgctgagtcgaagaaagcgcaagcgaactgggtagtaatggacaaacacctcaagcaggaagagaaacggtgtatggatgaattgcaatgcaacattgtggtgatgaagcgttcgcaggcaaaagttctacgcttaaaccttgttggatctcctaagaaagatgctggaaaagagtgtcccttaccatctggaccagaagcagcatctgagaaacactcaaagaacactaaaggattgttagatgctgatagaggactacctgtcactcctactagcagccctgagctggggacaccgttcacaagtacagaagccgggacttcatctgtgtcgagctccgacctgggaacttcacctttcttcacattgggaatgaacggatacatgaagaaggatggagcattggtgatcaaggagaatgatggtcttgatgattctggctctgaaacagagagtgaaaaccaatcattagcgtcaacgagtatgagattccagccatggatatcagaatatattggcacccatcgccactcatcccaggaggccgaagaaagcttattatggaaaaatgatgacagggcacaaatatccactacaaaggctttgcttgaaaagttctctaaacttgatgttgaagttgggttgtcgtctagtcgaaggatggatttagagtttagtggaaacgtaagagatgcaatatcactctctcgaagtgctcctcctggtccacctcctctctgttcaatttgccagcacaaggcgccagtatttgggaaacccccaaggctgtttacatacgctgaattagagcttgcaacgggtgggttttcacaggctaacttcttggctgagggtggttatggatctgttcatcggggtgtgctaccagaaggccaggtagttgcagtaaagcaacacaaattggccagttctcaaggagatgtagagttttgctccgaagtggaagttctcagctgtgctcagcacagaaacgtcgttatgctaattggtttctgcattgaagacagcagacggctcttggtctatgaatacatttgcaatggttcacttgactctcatctatacggtcgtcaaaaggaaactctggaatggccagcacggcaaaagattgctgttggagctgcaagaggtcttcggtatcttcacgaagagtgcagagttggctgtattgtccacagagacatgcgtcctaacaacatcctcatcactcatgataatgagccactggttggagattttggtctagcaagatggcagcctgatggggaaatgggtgtagatacacgagtgataggaaccttcggctatctagctcccgaatatgctcaaagcgggcaaatcacagaaaaagctgatgtctactcgttcggggttgttctagttgagctagtcactggccgcaaagccattgatatcaccaggccgaaaggccagcaatgcctgactgaatgggcacgtcctctactggaagaatatgcgatagatgaacttatcgatccgaggcttgggaaccgttttgtagaaagtgaggtcatttgtatgcttcatgcagcttcgttgtgcatacgtagagatccacatttgaggccacgcatgtctcaggtgttgcgtatactggaaggagatatgataatggatggaaactacgcatcaactccaggttcagaggcaggcaaccgaagcgggaggttctgggcggatcattacagcggtcagctaacgaatgatggctcggataggttcagtgaaaggctgtctgttgaaacgccaagactagctttgagggagagggaaagaagccagaggtttgaactaaaccataacaagcaatactaatcacactactttgctttatgataagtttagttgatagggtatttagtaaagtcctctgttttaagtgatgtggtccaaagctggcaacacagctttttttgtttgtatagtggggtaagatgcaaaaacagttgctaaatatgttatcaaggaatttaaaattgtttttggtaaaggagtattaaaagaacaaaacaacaagagaggctttttctccttt

SEQ ID NO: 45150 - protein, 753 aa, Arabidopsis thaliana
  peptide (1)..(753): Ceres Seq. ID no. 12600210
MSRLQKRGKQEKPVVSDGAQKVIVAVKASREIPKTALIWALTHVVQPGDCITLIVVVPSHNSGRKLWGFTKSFPMFAGDCASGHRKSHSEALPEIKSDLTDTCSQMILQLHDVYDPNKINVKIKIVSGSPCGAVAAESKKAQANWVVMDKHLKQEEKRCMDELQCNIVVMKRSQAKVLRLNLVGSPKKDAGKECPLPSGPEAASEKHSKNTKGLLDADRGLPVTPTSSPELGTPFTSTEAGTSSVSSSDLGTSPFFTLGMNGYMKKDGALVIKENDGLDDSGSETESENQSLASTSMRFQPWISEYIGTHRHSSQEAEESLLWKNDDRAQISTTKALLEKFSKLDVEVGLSSSRRMDLEFSGNVRDAISLSRSAPPGPPPLCSICQHKAPVFGKPPRLFTYAELELATGGFSQANFLAEGGYGSVHRGVLPEGQVVAVKQHKLASSQGDVEFCSEVEVLSCAQHRNVVMLIGFCIEDSRRLLVYEYICNGSLDSHLYGRQKETLEWPARQKIAVGAARGLRYLHEECRVGCIVHRDMRPNNILITHDNEPLVGDFGLARWQPDGEMGVDTRVIGTFGYLAPEYAQSGQITEKADVYSFGVVLVELVTGRKAIDITRPKGQQCLTEWARPLLEEYAIDELIDPRLGNRFVESEVICMLHAASLCIRRDPHLRPRMSQVLRILEGDMIMDGNYASTPGSEAGNRSGRFWADHYSGQLTNDGSDRFSERLSVETPRLALRERERSQRFELNHNKQY

SEQ ID NO: 45151 - protein, 679 aa, Arabidopsis thaliana
  peptide (1)..(679): Ceres Seq. ID no. 12600211
MFAGDCASGHRKSHSEALPEIKSDLTDTCSQMILQLHDVYDPNKINVKIKIVSGSPCGAVAAESKKAQANWVVMDKHLKQEEKRCMDELQCNIVVMKRSQAKVLRLNLVGSPKKDAGKECPLPSGPEAASEKHSKNTKGLLDADRGLPVTPTSSPELGTPFTSTEAGTSSVSSSDLGTSPFFTLGMNGYMKKDGALVIKENDGLDDSGSETESENQSLASTSMRFQPWISEYIGTHRHSSQEAEESLLWKNDDRAQISTTKALLEKFSKLDVEVGLSSSRRMDLEFSGNVRDAISLSRSAPPGPPPLCSICQHKAPVFGKPPRLFTYAELELATGGFSQANFLAEGGYGSVHRGVLPEGQVVAVKQHKLASSQGDVEFCSEVEVLSCAQHRNVVMLIGFCIEDSRRLLVYEYICNGSLDSHLYGRQKETLEWPARQKIAVGAARGLRYLHEECRVGCIVHRDMRPNNILITHDNEPLVGDFGLARWQPDGEMGVDTRVIGTFGYLAPEYAQSGQITEKADVYSFGVVLVELVTGRKAIDITRPKGQQCLTEWARPLLEEYAIDELIDPRLGNRFVESEVICMLHAASLCIRRDPHLRPRMSQVLRILEGDMIMDGNYASTPGSEAGNRSGRFWADHYSGQLTNDGSDRFSERLSVETPRLALRERERSQRFELNHNKQY

SEQ ID NO: 45152 - protein, 648 aa, Arabidopsis thaliana
  peptide (1)..(648): Ceres Seq. ID no. 12600212
MILQLHDVYDPNKINVKIKIVSGSPCGAVAAESKKAQANWVVMDKHLKQEEKRCMDELQCNIVVMKRSQAKVLRLNLVGSPKKDAGKECPLPSGPEAASEKHSKNTKGLLDADRGLPVTPTSSPELGTPFTSTEAGTSSVSSSDLGTSPFFTLGMNGYMKKDGALVIKENDGLDDSGSETESENQSLASTSMRFQPWISEYIGTHRHSSQEAEESLLWKNDDRAQISTTKALLEKFSKLDVEVGLSSSRRMDLEFSGNVRDAISLSRSAPPGPPPLCSICQHKAPVFGKPPRLFTYAELELATGGFSQANFLAEGGYGSVHRGVLPEGQVVAVKQHKLASSQGDVEFCSEVEVLSCAQHRNVVMLIGFCIEDSRRLLVYEYICNGSLDSHLYGRQKETLEWPARQKIAVGAARGLRYLHEECRVGCIVHRDMRPNNILITHDNEPLVGDFGLARWQPDGEMGVDTRVIGTFGYLAPEYAQSGQITEKADVYSFGVVLVELVTGRKAIDITRPKGQQCLTEWARPLLEEYAIDELIDPRLGNRFVESEVICMLHAASLCIRRDPHLRPRMSQVLRILEGDMIMDGNYASTPGSEAGNRSGRFWADHYSGQLTNDGSDRFSERLSVETPRLALRERERSQRFELNHNKQY

SEQ ID NO: 45153 - DNA, 3085 bp, Arabidopsis thaliana
  misc_feature (1)..(3085): Ceres Seq. ID no. 13592143
  misc_feature (1)..(3085): Ortholog of  Ceres SEQ ID NO 14308209 as cited in SEQ ID NO 58800
cctygtcgtcctcagatctcatctcactcacaagagagagatagagagagaaaaaggctctgctttctacattatttacgattatacactttccaacatggcggcctctgtagataatcgccaatacgctcgtctcgagccaggtttgaacggcgtggttcgttcttacaaacctcccgttccaggccggtccgattcccctaaggcgcaccagaaccaaaccaccaaccaaaccgtgttcttgaaaccagccaaggttcatgacgatgacgaagacgtgtcgagcgaagacgagaacgagacacacaacagcaacgccgtgtactacaaggagatgataagaaaatccaacgccgagcttgaaccgtccgttttggacccgagggacgaatacacggctgatagctggatcgagcgtaacccttccatggtacgtctcacagggaaacatcccttcaactccgaggcgcctcttaaccgtttaatgcaccacgggtttatcacccctgtcccgttgcactacgttcgtaaccacggccacgtccctaaagcccaatgggccgaatggacggtcgaggtgaccggattcgtcaaacggcccatgaaattcaccatggaccagctcgtctccgagtttgcttaccgcgagttcgccgcgacgctagtctgcgcggggaaccgccgtaaggaacagaacatggtgaagaagtcaaagggattcaactggggatccgccggagtttccacctccgtgtggcgtggtgtccctctctgcgacgtactgcgtcgctgcgggatctttagccgaaaaggcggcgctctcaacgtctgcttcgaagggtcggaggatcttccgggcggtgccggaactgctggttccaaatacggaacgagcatcaagaaggaatatgccatggatccatcaagagacatcattttggcttatatgcaaaacggagagtatctaacaccagaccacggttttccggttcggatcatcatccccggtttcattggtggccggatggttaaatggttgaaacgaatcattgtcacaactaaagaatccgacaatttctaccatttcaaggacaacagagttttaccttctttggtagacgccgaactcgccgacgaagaaggttggtggtataagccagagtacataatcaacgagctaaacataaactccgtgattacgacgccatgtcacgaggagattcttcccatcaacgctttcacaacccaaagaccttatactttaaagggttacgcatattccggaggtggaaaaaaagtgacccgtgtggaggtcacggtagatggtggagagacatggaacgtatgtgcacttgaccatcaagagaagccaaacaagtatgggaagttctggtgttggtgtttttggtcacttgaggttgaggttttggacttgcttagtgccaaagagattgctgttcgtgcatgggacgagactctcaacacgcagcccgagaaaatgatatggaatctcatggggatgatgaataactgctggtttagagtgaagactaacgtgtgcaagccacacaagggagagattgggattgtgttcgagcatccaacgcttcctggtaatgaatctggtggatggatggcgaaggaacgtcacctcgaaaaatcggctgacgcgcctcctagtctaaagaagtctgtctcgacgccgtttatgaacacaactgcgaagatgtactcgatgtccgaggtcaagaagcataattcggctgactcttgctggatcattgtccatggacatatctatgattgtacacgattccttatggatcacccgggtggttcggattcaatcttgatcaatgctggtacggattgtacggaggagtttgaagccattcactcggataaagccaagaagatgcttgaggattaccgtatcggtgagctcatcaccactggttattcctctgactcttcctcgcctaacaactcggttcacggttcatccgccgtgttctcgctgttggctcccattggagaggcgactccggttaggaacctcgctttggttaatccccgggctaaagtcccggttcaactcgtcgaaaagacttccatttctcatgatgttcgtaaattccggtttgctttaccggttgaggatatggttctaggcttaccggttggtaagcacattttcctttgcgccaccatcaatgacaagctctgcctcagagcttacacaccaagcagcaccgttgatgtggttggctacttcgagctcgtggtcaagatttactttggcggtgtccacccaagattccctaacggcgggctcatgtctcagtacctagactctttgcctatagggtcaactttggagattaaaggaccattgggtcacgttgagtatctcggcaagggtagtttcacggttcacggtaaaccaaagtttgctgataaattggcaatgttggcaggtggaaccggaataactccggtttaccaaattatccaagccattctcaaggatccagaggatgagactgaaatgtacgtcatttatgctaaccggaccgaggaagatattctcctaagggaggaactggatggttgggcagagcaatacccggaccggttaaaggtttggtacgtagtggaatcagctaaggaaggttgggcatacagtaccgggtttatttccgaggcgattatgcgagaacatatccctgatggattagatggctcagcccttgccatggcttgcggaccaccaccgatgattcagtttgcggttcagccgaatttggagaagatgcaatataacatcaaggaggatttcttgatattctagtctaaagccaagatatttcaaagtcaaaacgttaagtcgtcaaaaagcctagtgttatgatagattctaaataagtattgagggatttgtttgtatataatgttggttctttaaagtcttggatttggaaatataatgtgttcgttgtattcacgatcgatattttttttcacaataatatacaaaaagtaatttcagaaaaaaaaaaaaaaaaaactcgagggggggcccggt

SEQ ID NO: 45154 - protein, 949 aa, Arabidopsis thaliana
  peptide (1)..(949): Ceres Seq. ID no. 15221079
  misc_feature (1)..(1): Xaa is any aa, unknown or other
XVVLRSHLTHKREIEREKGSAFYIIYDYTLSNMAASVDNRQYARLEPGLNGVVRSYKPPVPGRSDSPKAHQNQTTNQTVFLKPAKVHDDDEDVSSEDENETHNSNAVYYKEMIRKSNAELEPSVLDPRDEYTADSWIERNPSMVRLTGKHPFNSEAPLNRLMHHGFITPVPLHYVRNHGHVPKAQWAEWTVEVTGFVKRPMKFTMDQLVSEFAYREFAATLVCAGNRRKEQNMVKKSKGFNWGSAGVSTSVWRGVPLCDVLRRCGIFSRKGGALNVCFEGSEDLPGGAGTAGSKYGTSIKKEYAMDPSRDIILAYMQNGEYLTPDHGFPVRIIIPGFIGGRMVKWLKRIIVTTKESDNFYHFKDNRVLPSLVDAELADEEGWWYKPEYIINELNINSVITTPCHEEILPINAFTTQRPYTLKGYAYSGGGKKVTRVEVTVDGGETWNVCALDHQEKPNKYGKFWCWCFWSLEVEVLDLLSAKEIAVRAWDETLNTQPEKMIWNLMGMMNNCWFRVKTNVCKPHKGEIGIVFEHPTLPGNESGGWMAKERHLEKSADAPPSLKKSVSTPFMNTTAKMYSMSEVKKHNSADSCWIIVHGHIYDCTRFLMDHPGGSDSILINAGTDCTEEFEAIHSDKAKKMLEDYRIGELITTGYSSDSSSPNNSVHGSSAVFSLLAPIGEATPVRNLALVNPRAKVPVQLVEKTSISHDVRKFRFALPVEDMVLGLPVGKHIFLCATINDKLCLRAYTPSSTVDVVGYFELVVKIYFGGVHPRFPNGGLMSQYLDSLPIGSTLEIKGPLGHVEYLGKGSFTVHGKPKFADKLAMLAGGTGITPVYQIIQAILKDPEDETEMYVIYANRTEEDILLREELDGWAEQYPDRLKVWYVVESAKEGWAYSTGFISEAIMREHIPDGLDGSALAMACGPPPMIQFAVQPNLEKMQYNIKEDFLIF

SEQ ID NO: 45155 - protein, 917 aa, Arabidopsis thaliana
  peptide (1)..(917): Ceres Seq. ID no. 15221080
MAASVDNRQYARLEPGLNGVVRSYKPPVPGRSDSPKAHQNQTTNQTVFLKPAKVHDDDEDVSSEDENETHNSNAVYYKEMIRKSNAELEPSVLDPRDEYTADSWIERNPSMVRLTGKHPFNSEAPLNRLMHHGFITPVPLHYVRNHGHVPKAQWAEWTVEVTGFVKRPMKFTMDQLVSEFAYREFAATLVCAGNRRKEQNMVKKSKGFNWGSAGVSTSVWRGVPLCDVLRRCGIFSRKGGALNVCFEGSEDLPGGAGTAGSKYGTSIKKEYAMDPSRDIILAYMQNGEYLTPDHGFPVRIIIPGFIGGRMVKWLKRIIVTTKESDNFYHFKDNRVLPSLVDAELADEEGWWYKPEYIINELNINSVITTPCHEEILPINAFTTQRPYTLKGYAYSGGGKKVTRVEVTVDGGETWNVCALDHQEKPNKYGKFWCWCFWSLEVEVLDLLSAKEIAVRAWDETLNTQPEKMIWNLMGMMNNCWFRVKTNVCKPHKGEIGIVFEHPTLPGNESGGWMAKERHLEKSADAPPSLKKSVSTPFMNTTAKMYSMSEVKKHNSADSCWIIVHGHIYDCTRFLMDHPGGSDSILINAGTDCTEEFEAIHSDKAKKMLEDYRIGELITTGYSSDSSSPNNSVHGSSAVFSLLAPIGEATPVRNLALVNPRAKVPVQLVEKTSISHDVRKFRFALPVEDMVLGLPVGKHIFLCATINDKLCLRAYTPSSTVDVVGYFELVVKIYFGGVHPRFPNGGLMSQYLDSLPIGSTLEIKGPLGHVEYLGKGSFTVHGKPKFADKLAMLAGGTGITPVYQIIQAILKDPEDETEMYVIYANRTEEDILLREELDGWAEQYPDRLKVWYVVESAKEGWAYSTGFISEAIMREHIPDGLDGSALAMACGPPPMIQFAVQPNLEKMQYNIKEDFLIF

SEQ ID NO: 45156 - protein, 838 aa, Arabidopsis thaliana
  peptide (1)..(838): Ceres Seq. ID no. 15221081
MIRKSNAELEPSVLDPRDEYTADSWIERNPSMVRLTGKHPFNSEAPLNRLMHHGFITPVPLHYVRNHGHVPKAQWAEWTVEVTGFVKRPMKFTMDQLVSEFAYREFAATLVCAGNRRKEQNMVKKSKGFNWGSAGVSTSVWRGVPLCDVLRRCGIFSRKGGALNVCFEGSEDLPGGAGTAGSKYGTSIKKEYAMDPSRDIILAYMQNGEYLTPDHGFPVRIIIPGFIGGRMVKWLKRIIVTTKESDNFYHFKDNRVLPSLVDAELADEEGWWYKPEYIINELNINSVITTPCHEEILPINAFTTQRPYTLKGYAYSGGGKKVTRVEVTVDGGETWNVCALDHQEKPNKYGKFWCWCFWSLEVEVLDLLSAKEIAVRAWDETLNTQPEKMIWNLMGMMNNCWFRVKTNVCKPHKGEIGIVFEHPTLPGNESGGWMAKERHLEKSADAPPSLKKSVSTPFMNTTAKMYSMSEVKKHNSADSCWIIVHGHIYDCTRFLMDHPGGSDSILINAGTDCTEEFEAIHSDKAKKMLEDYRIGELITTGYSSDSSSPNNSVHGSSAVFSLLAPIGEATPVRNLALVNPRAKVPVQLVEKTSISHDVRKFRFALPVEDMVLGLPVGKHIFLCATINDKLCLRAYTPSSTVDVVGYFELVVKIYFGGVHPRFPNGGLMSQYLDSLPIGSTLEIKGPLGHVEYLGKGSFTVHGKPKFADKLAMLAGGTGITPVYQIIQAILKDPEDETEMYVIYANRTEEDILLREELDGWAEQYPDRLKVWYVVESAKEGWAYSTGFISEAIMREHIPDGLDGSALAMACGPPPMIQFAVQPNLEKMQYNIKEDFLIF

SEQ ID NO: 45157 - DNA, 3621 bp, Arabidopsis thaliana
  misc_feature (1)..(3621): Ceres Seq. ID no. 12560421
  misc_feature (1)..(3621): Ortholog of  Ceres SEQ ID NO 14316546 as cited in SEQ ID NO 60020
tatacacacaaactaaactatacgaaaacaaaaacaaagaacaagtgtgaagccaaacgcagaattttgggaaaccatcgcacaagcttccatagatttctctcttgttccttcccgtttcttcctctcccccatatttctctccagctccgcctcactgttccgcgatccaatttccttttccagcaggctataagtgtagttagcacttcttctataaaaagcagtgtctcacatttggatatgaagaaagcatttggtcaaactgtcagagacctcaagagaggggtcaacaagaaagtgcttaaagtacctggaatagaacagaaggttctagatgctaccagcaatgagtcctggggtccgcatggatcacttcttgcggacattgcacatgcttcgagaaattaccatgaataccagattactatgggagtgttatggaaacgtcttagtgactctggaaaaaattggcggcatgtctataaggcattgacagtcttggagtacatggtaggccatggatcagaacgtgtcatagaagaggttaaagaacatgcatatcaaattacgacattatctggttttcagtatattgattccagcggtaaagatcaaggtagcaatgtcaggaagaaggcgcagagccttgtggctttggttaatgacaaagaaagaataacggaggtcagagagaaggctgctgctaacagagataagtatcataactcaatgcataggccgtcaggaggatatggggacaaatatgattacgaaggccgctatggagacagagatgaagggcgaagtagttatgggaaagagagagaatatggttacagggatgatgatagaaatagtcgtgatggcgatcgttattctagagactctgaagaccgatatggaagagatggtaacacggatgacgaataccgtggaaggagcagaagtgttgataattacaatggatcaagaggtaggagctcggacagggaacggcctattgaggatgatggccaatcctcatcgcgggatagtggtgcgccagctgatgatcattctcaagatgggagaggggggctagagagaaagttctctgaacaaaatattggtgctgctccacctagttatgaagaagctgtgagtgaatcacggagccctgtatacagtgaaagggatggtggagagaccccacaagttgctcctccaggagctgctgcttctcctcttgctgaaaacatcagcgtggacaacaaagctgctgattttgttaatgaatcatctcctcagcaagttgaggcttttgatgaatttgatccacgaggttcagtttcagcagcatgtgcacctacagctggtgcttcggttcctgcacctatcccaccaacagtggtttctacgcctgccccgcctgcctcaattaatgcagaaatggatttgcttggctctctttcagatgtattttcaccaaatcccttggctattgtaacatctgattccacttctgttgaaaccaatggacaagcaaacactggtttagctccatcgttttctacttctcagtcatctactcagccttttgatgatccatttggtgactctcctttcaaagccatcacttctgctgacactgagacaagccaacatcagagttttggagttccttttcagccaacaccaccaacttcaaatcctaacaatgaacataactttggttttggggaagcattttcagctgttaccgattctgaacctggcgttcaaaatatgcaagctccaccgaacttatccgtctttcctcaagagcagtttgatacatcgcagagcgaaatcgatattcttgccggcattctcccaccatctggaccgccagtttctctgtctccacaaccagattccactatgccaacatcccaatttcatcccaatggtaactcctatgaaagctatcatcatcaagccgcgcctacagatctaaacatgcaaggacaaacaccgtttggtcaagcttcacaacaatttaacatggtttcacattcacaaaatcatcatgaaggtatgcaattcaacaatgggggcttcacgcaacagccaggctatgcaggtccagcaacctctcaacctccacaatatactcctggtgtatcttcacacccaccaagtgagagttttcctcaccaaccaggttctgccacctcagcaagctcgcaaactccttacgctactacacccaatgtatcagctgggcagtttgatggtgggagtttcatgacacagcaaccttatggtgtgacacaacaagttcatgttgtcccttcccatataccacagcgaactcaatctggacctgttgcagcgtttgggaataataacaatatcgttggagatatgcaccaacctggttctaccccctcatcaagctcgcaaactccttaccctactacgcccaatgcaccaagtggtcagtttgatggtggaaattttatgacacaacaaccttatggtgtgataccgcaagttcatggcgtcccttcccatataccacagcgaactcaatctggacctgttgcagcgcacgggaatagtaacaatgttgttggggatatgttttcaccagctggactaagttccttggagacatcagcatcgcaaccatctctcacacctttaacaggagcaattgaaattgttccccaaaatcagaagaagtttgagccaaaatcaacaatttgggctgatacattaagtagagggctagttaacttcaacatttctggaccgaaaacaaatccattggcggatataggagttgacttcgaggcaatcaacaggaaagagaaacggctagagaaaccaactatcacacaacaacaagtaacatcaactatcaacatggggaaagccatgggatctggtactggcttaggtcgcgctggtgcaggtgctatgagacctccaacaaattcaatggtaggctcaagcatgcccacgggcatgaatgttggtggctatggaggcatgaaccaacaccaacccataggcatgaaccaaaaccatcccatgggcatgaaccaaaacctttccatgggaatgaaccagaactatcccatgggaatgaaccaaaactatccaatgggaatgggcatgaacatgaacatgggcgggtatggacaagggtatccgatgcaaccacaacaaggaatgggcatggctcctcctggtgcaccacaaggcatgaccggtgcctataatccaatgatgggtcaaggcggttacaaccctcagcagcagcaaccatatggtggaggttaccggtaagattcgagccaatcacggttacccattttacttatcatggtaaaaagagaaaacatcaaagaacagaacacaatcagtttgacctggatttgtaaattttatggtcggttcaggtaagttggggtttggtcagtcatattattggattaatacctcagcttcatcagttattttgctttttctttacaaaaataattctcgaccaaattgagttttgttaggaattttgtaacgggtaaagagagagacagagaggcacaaccttcactcggggtttgctatatacatatgtattttgatatt

SEQ ID NO: 45158 - protein, 1105 aa, Arabidopsis thaliana
  peptide (1)..(1105): Ceres Seq. ID no. 12560422
YTHKLNYTKTKTKNKCEAKRRILGNHRTSFHRFLSCSFPFLPLPHISLQLRLTVPRSNFLFQQAISVVSTSSIKSSVSHLDMKKAFGQTVRDLKRGVNKKVLKVPGIEQKVLDATSNESWGPHGSLLADIAHASRNYHEYQITMGVLWKRLSDSGKNWRHVYKALTVLEYMVGHGSERVIEEVKEHAYQITTLSGFQYIDSSGKDQGSNVRKKAQSLVALVNDKERITEVREKAAANRDKYHNSMHRPSGGYGDKYDYEGRYGDRDEGRSSYGKEREYGYRDDDRNSRDGDRYSRDSEDRYGRDGNTDDEYRGRSRSVDNYNGSRGRSSDRERPIEDDGQSSSRDSGAPADDHSQDGRGGLERKFSEQNIGAAPPSYEEAVSESRSPVYSERDGGETPQVAPPGAAASPLAENISVDNKAADFVNESSPQQVEAFDEFDPRGSVSAACAPTAGASVPAPIPPTVVSTPAPPASINAEMDLLGSLSDVFSPNPLAIVTSDSTSVETNGQANTGLAPSFSTSQSSTQPFDDPFGDSPFKAITSADTETSQHQSFGVPFQPTPPTSNPNNEHNFGFGEAFSAVTDSEPGVQNMQAPPNLSVFPQEQFDTSQSEIDILAGILPPSGPPVSLSPQPDSTMPTSQFHPNGNSYESYHHQAAPTDLNMQGQTPFGQASQQFNMVSHSQNHHEGMQFNNGGFTQQPGYAGPATSQPPQYTPGVSSHPPSESFPHQPGSATSASSQTPYATTPNVSAGQFDGGSFMTQQPYGVTQQVHVVPSHIPQRTQSGPVAAFGNNNNIVGDMHQPGSTPSSSSQTPYPTTPNAPSGQFDGGNFMTQQPYGVIPQVHGVPSHIPQRTQSGPVAAHGNSNNVVGDMFSPAGLSSLETSASQPSLTPLTGAIEIVPQNQKKFEPKSTIWADTLSRGLVNFNISGPKTNPLADIGVDFEAINRKEKRLEKPTITQQQVTSTINMGKAMGSGTGLGRAGAGAMRPPTNSMVGSSMPTGMNVGGYGGMNQHQPIGMNQNHPMGMNQNLSMGMNQNYPMGMNQNYPMGMGMNMNMGGYGQGYPMQPQQGMGMAPPGAPQGMTGAYNPMMGQGGYNPQQQQPYGGGYR

SEQ ID NO: 45159 - protein, 1024 aa, Arabidopsis thaliana
  peptide (1)..(1024): Ceres Seq. ID no. 12560423
MKKAFGQTVRDLKRGVNKKVLKVPGIEQKVLDATSNESWGPHGSLLADIAHASRNYHEYQITMGVLWKRLSDSGKNWRHVYKALTVLEYMVGHGSERVIEEVKEHAYQITTLSGFQYIDSSGKDQGSNVRKKAQSLVALVNDKERITEVREKAAANRDKYHNSMHRPSGGYGDKYDYEGRYGDRDEGRSSYGKEREYGYRDDDRNSRDGDRYSRDSEDRYGRDGNTDDEYRGRSRSVDNYNGSRGRSSDRERPIEDDGQSSSRDSGAPADDHSQDGRGGLERKFSEQNIGAAPPSYEEAVSESRSPVYSERDGGETPQVAPPGAAASPLAENISVDNKAADFVNESSPQQVEAFDEFDPRGSVSAACAPTAGASVPAPIPPTVVSTPAPPASINAEMDLLGSLSDVFSPNPLAIVTSDSTSVETNGQANTGLAPSFSTSQSSTQPFDDPFGDSPFKAITSADTETSQHQSFGVPFQPTPPTSNPNNEHNFGFGEAFSAVTDSEPGVQNMQAPPNLSVFPQEQFDTSQSEIDILAGILPPSGPPVSLSPQPDSTMPTSQFHPNGNSYESYHHQAAPTDLNMQGQTPFGQASQQFNMVSHSQNHHEGMQFNNGGFTQQPGYAGPATSQPPQYTPGVSSHPPSESFPHQPGSATSASSQTPYATTPNVSAGQFDGGSFMTQQPYGVTQQVHVVPSHIPQRTQSGPVAAFGNNNNIVGDMHQPGSTPSSSSQTPYPTTPNAPSGQFDGGNFMTQQPYGVIPQVHGVPSHIPQRTQSGPVAAHGNSNNVVGDMFSPAGLSSLETSASQPSLTPLTGAIEIVPQNQKKFEPKSTIWADTLSRGLVNFNISGPKTNPLADIGVDFEAINRKEKRLEKPTITQQQVTSTINMGKAMGSGTGLGRAGAGAMRPPTNSMVGSSMPTGMNVGGYGGMNQHQPIGMNQNHPMGMNQNLSMGMNQNYPMGMNQNYPMGMGMNMNMGGYGQGYPMQPQQGMGMAPPGAPQGMTGAYNPMMGQGGYNPQQQQPYGGGYR

SEQ ID NO: 45160 - protein, 962 aa, Arabidopsis thaliana
  peptide (1)..(962): Ceres Seq. ID no. 12560424
MGVLWKRLSDSGKNWRHVYKALTVLEYMVGHGSERVIEEVKEHAYQITTLSGFQYIDSSGKDQGSNVRKKAQSLVALVNDKERITEVREKAAANRDKYHNSMHRPSGGYGDKYDYEGRYGDRDEGRSSYGKEREYGYRDDDRNSRDGDRYSRDSEDRYGRDGNTDDEYRGRSRSVDNYNGSRGRSSDRERPIEDDGQSSSRDSGAPADDHSQDGRGGLERKFSEQNIGAAPPSYEEAVSESRSPVYSERDGGETPQVAPPGAAASPLAENISVDNKAADFVNESSPQQVEAFDEFDPRGSVSAACAPTAGASVPAPIPPTVVSTPAPPASINAEMDLLGSLSDVFSPNPLAIVTSDSTSVETNGQANTGLAPSFSTSQSSTQPFDDPFGDSPFKAITSADTETSQHQSFGVPFQPTPPTSNPNNEHNFGFGEAFSAVTDSEPGVQNMQAPPNLSVFPQEQFDTSQSEIDILAGILPPSGPPVSLSPQPDSTMPTSQFHPNGNSYESYHHQAAPTDLNMQGQTPFGQASQQFNMVSHSQNHHEGMQFNNGGFTQQPGYAGPATSQPPQYTPGVSSHPPSESFPHQPGSATSASSQTPYATTPNVSAGQFDGGSFMTQQPYGVTQQVHVVPSHIPQRTQSGPVAAFGNNNNIVGDMHQPGSTPSSSSQTPYPTTPNAPSGQFDGGNFMTQQPYGVIPQVHGVPSHIPQRTQSGPVAAHGNSNNVVGDMFSPAGLSSLETSASQPSLTPLTGAIEIVPQNQKKFEPKSTIWADTLSRGLVNFNISGPKTNPLADIGVDFEAINRKEKRLEKPTITQQQVTSTINMGKAMGSGTGLGRAGAGAMRPPTNSMVGSSMPTGMNVGGYGGMNQHQPIGMNQNHPMGMNQNLSMGMNQNYPMGMNQNYPMGMGMNMNMGGYGQGYPMQPQQGMGMAPPGAPQGMTGAYNPMMGQGGYNPQQQQPYGGGYR

SEQ ID NO: 45161 - DNA, 1919 bp, Arabidopsis thaliana
  misc_feature (1)..(1919): Ceres Seq. ID no. 13575934
  misc_feature (1)..(1919): Ortholog of  Ceres SEQ ID NO 14307843 as cited in SEQ ID NO 20508
  misc_feature (1)..(1919): Ortholog of  Ceres SEQ ID NO 15170811 as cited in SEQ ID NO 52649
  misc_feature (1)..(1919): Ortholog of  Ceres SEQ ID NO 13638331 as cited in SEQ ID NO 58047
  misc_feature (1)..(1919): Ortholog of  Ceres SEQ ID NO 15225845 as cited in SEQ ID NO 65125
ggttggattctttctccttcaaatcaaattataaatcccatcaaacagagagagagagagaagaggaggagaattcgaagaataaaagataagaactttgacgttttgaagcttaaagcttgaaacttgtttcatccatggcggctcgtagagtgtcttctcttttatctcgatctttttcagcttcctctcccttactgtttcgttctcaagggagaaattgttacaatggagggatcttaaggagatttggaacctcttctgctgctgctgaggaaatcataaacccatctgttcaagtttctcacacacagctcctcatcaatgggaactttgttgactctgcttctggtaagacgtttccgactcttgatccgaggacaggcgaagtcattgctcatgtagctgaaggcgatgctgaagatatcaatcgagctgtgaaagctgcaaggacggcctttgatgaaggaccttggcctaaaatgagtgcttatgaaaggtcaagagttttgttgaggtttgcagatttggttgagaaacacagcgaagagctcgcgtctctagagacatgggacaatggcaagccttaccaacaatccttgaccgcagagattcccatgtttgcaagattgttccgttactatgctggatgggcggataagattcatggactaacaattccagctgatggaaactatcaagttcacacattacatgaaccgataggtgtagctggacagatcataccgtggaattttccacttttgatgtttgcttggaaagttggtcctgctcttgcttgtggtaacaccattgtcctcaaaaccgctgagcaaacacctctcacggctttctatgctggaaagcttttccttgaagcgggtcttcctcctggtgttctgaatattgtttcgggattcggtgcaacagcaggtgctgccctcgcgagtcatatggatgtagacaagcttgcttttacaggatcgactgatacggggaaagttatacttggattggctgctaacagcaatcttaagcccgtaactctggaacttggagggaaatcaccgttcatcgtattcgaagatgctgatattgataaagctgtagagcttgcacactttgccctcttcttcaaccaggggcaatgttgctgcgcggggtctcggacatttgttcatgagaaagtgtatgatgagtttgttgagaaatcaaaggcacgcgcattgaaacgtgttgttggtgatcctttcaggaaaggcattgaacagggtcctcagatcgatttgaagcaatttgagaaagtgatgaagtacataaagtcaggtatcgaaagcaatgctactcttgaatgtggtggtgatcagattggagacaaaggttacttcatccaacctactgtcttctctaatgttaaggatgacatgcttatcgctcaagacgagattttcggtccagtccaatcgatcttgaagttcagtgatgtggatgaggtgataaagagggcgaacgagacgaagtacgggctagcggcaggggttttcacgaagaatctggacacggcaaacagggtttcaagggctttgaaagctggtaccgtatgggttaactgcttcgacgtatttgatgcagccataccatttggtggttacaagatgagtgggaatgggagagagaaaggcatatacagtctcaataattacttgcagatcaaggcagtcgtcactgctctaaataagcctgcctggatctgatctctggagtgtggtttcagcatcataaatgctcaaacaaaagaaatagactctataaagttacaatagtaataattaaggtcatggtttgtaatttgagtaacggattgtgatacttctaataaatttttcattgttgtttattcatcacatagctgttgttac

SEQ ID NO: 45162 - protein, 538 aa, Arabidopsis thaliana
  peptide (1)..(538): Ceres Seq. ID no. 13575935
MAARRVSSLLSRSFSASSPLLFRSQGRNCYNGGILRRFGTSSAAAEEIINPSVQVSHTQLLINGNFVDSASGKTFPTLDPRTGEVIAHVAEGDAEDINRAVKAARTAFDEGPWPKMSAYERSRVLLRFADLVEKHSEELASLETWDNGKPYQQSLTAEIPMFARLFRYYAGWADKIHGLTIPADGNYQVHTLHEPIGVAGQIIPWNFPLLMFAWKVGPALACGNTIVLKTAEQTPLTAFYAGKLFLEAGLPPGVLNIVSGFGATAGAALASHMDVDKLAFTGSTDTGKVILGLAANSNLKPVTLELGGKSPFIVFEDADIDKAVELAHFALFFNQGQCCCAGSRTFVHEKVYDEFVEKSKARALKRVVGDPFRKGIEQGPQIDLKQFEKVMKYIKSGIESNATLECGGDQIGDKGYFIQPTVFSNVKDDMLIAQDEIFGPVQSILKFSDVDEVIKRANETKYGLAAGVFTKNLDTANRVSRALKAGTVWVNCFDVFDAAIPFGGYKMSGNGREKGIYSLNNYLQIKAVVTALNKPAWI

SEQ ID NO: 45163 - protein, 423 aa, Arabidopsis thaliana
  peptide (1)..(423): Ceres Seq. ID no. 13575936
MSAYERSRVLLRFADLVEKHSEELASLETWDNGKPYQQSLTAEIPMFARLFRYYAGWADKIHGLTIPADGNYQVHTLHEPIGVAGQIIPWNFPLLMFAWKVGPALACGNTIVLKTAEQTPLTAFYAGKLFLEAGLPPGVLNIVSGFGATAGAALASHMDVDKLAFTGSTDTGKVILGLAANSNLKPVTLELGGKSPFIVFEDADIDKAVELAHFALFFNQGQCCCAGSRTFVHEKVYDEFVEKSKARALKRVVGDPFRKGIEQGPQIDLKQFEKVMKYIKSGIESNATLECGGDQIGDKGYFIQPTVFSNVKDDMLIAQDEIFGPVQSILKFSDVDEVIKRANETKYGLAAGVFTKNLDTANRVSRALKAGTVWVNCFDVFDAAIPFGGYKMSGNGREKGIYSLNNYLQIKAVVTALNKPAWI

SEQ ID NO: 45164 - protein, 378 aa, Arabidopsis thaliana
  peptide (1)..(378): Ceres Seq. ID no. 13575937
MFARLFRYYAGWADKIHGLTIPADGNYQVHTLHEPIGVAGQIIPWNFPLLMFAWKVGPALACGNTIVLKTAEQTPLTAFYAGKLFLEAGLPPGVLNIVSGFGATAGAALASHMDVDKLAFTGSTDTGKVILGLAANSNLKPVTLELGGKSPFIVFEDADIDKAVELAHFALFFNQGQCCCAGSRTFVHEKVYDEFVEKSKARALKRVVGDPFRKGIEQGPQIDLKQFEKVMKYIKSGIESNATLECGGDQIGDKGYFIQPTVFSNVKDDMLIAQDEIFGPVQSILKFSDVDEVIKRANETKYGLAAGVFTKNLDTANRVSRALKAGTVWVNCFDVFDAAIPFGGYKMSGNGREKGIYSLNNYLQIKAVVTALNKPAWI

SEQ ID NO: 45165 - DNA, 2012 bp, Arabidopsis thaliana
  misc_feature (1)..(2012): Ceres Seq. ID no. 12560443
  misc_feature (1)..(2012): Ortholog of  Ceres SEQ ID NO 15225419 as cited in SEQ ID NO 0
tccttcttcttcttcttctcacgctcacggcctttggagttttgtgttaccattttcgctcgcgtcattactggtgttagggttttcttcaaaagcttcttaatccgtcgaaattgctcttttctctccctcattacagagataaatggcttcaaagattattgctggcaagccggatgataccgagtatgaaatcattgaaggtgagtctgagagcgctttagcagcggggacaagcccttggatgaattcatcaacgttgaagcttcgacatcgaattggaagaggtcccttcggtgatgtttggctggctactcatcatcagtcaactgaggactatgatgagcatcatgaagtggccatcaaaatgctttatcccatcaaggaagatcaaagaagggttgtggtagataagtttgaagatctcttctctaaatgtcaaggactagagaatgtctgtctgctcaggggagtctctagtatcaatggaaagatatgtgtcgtcatgaaattctacgagggctctcttggtgacaagatggctcggcttaaaggaggaaagctttcactgccagatgttttgagatacggggttgatctggctacagggatcctggagttgcactcaaaagggtttctcattctcaatctcaagccctctaactttcttctcagtgataacgacaaggccatcctcggggatgttgggatcccttatctccttcttagtatccctttaccaagttctgatatgacagagagacttggaactccaaactatatggcaccagaacagtggcaaccggatgtcagaggtcccatgtcctttgagactgattcttggggatttggttgcagcattgttgaaatgctgactggtgtacaaccttggtctgggagatctgccgatgaaatatatgatttggtggtgagaaagcaagaaaagcttagtatccccagtagcataccgcctcctctcgagaacctacttcggggttgctttatgtatgatcttcgaagccgaccttcgatgactgacatcttactcgtcttaaagagcttgcagaactcggaggaggaacaggtcaggagaggcattgatagtagagaaatcaggaagagctcggctactcttggttatacagaatggtttctttcaaaggatcatctgcaagtgcgcgacaccgtgcgttcaagaaagcctgccaattcgtgtaagcatgagaacatggatgtgccagaaggaatggtggttggtttagaacgtgactccacagacccagatggatttgtgctagttaaagtccatggtgtacatgatccattaagggttcacgtatctgttcttgaacgggtaactaacggcttagcttctggagattgggtgcgtctgaaggtcaggaaagacaagaggcactctccggttggtgttctccattcaattgaccgtgagggaaatgtagctgttggatttattgggttgccaactctctggaaagggacatcatcgcagcttcagatggctaaagtatacagtgtgggtcaatttgtgaaactcaaagccaatgttgtcatcccgagattcaaatggatgcgtaaaggtagaggtatttgggcaactggcaggatctctcaggttctaccaaacggttgccttgaagtggacttccctggaatgttaccttttggagaggaacatggaagctatcttgcagatccggctgaagtagagattgtgaatttcaatacatgtcaaggagctgtggaaaaatatcaacatctggaggattttcattgggctgtgagacctttgcttattgctatgggtctattgacagcgatgaagttagggatctgtgtcaggaagaaaataggaaggtcaaaggatgggaaacaacgcgatggctcgactggacaaggtgactgtaagattccggatggtaagggctctgacaaatctaaatggcttgtgttcttttaggtctgctatgagacacagaccttgtctggtc

SEQ ID NO: 45166 - protein, 611 aa, Arabidopsis thaliana
  peptide (1)..(611): Ceres Seq. ID no. 12560444
MASKIIAGKPDDTEYEIIEGESESALAAGTSPWMNSSTLKLRHRIGRGPFGDVWLATHHQSTEDYDEHHEVAIKMLYPIKEDQRRVVVDKFEDLFSKCQGLENVCLLRGVSSINGKICVVMKFYEGSLGDKMARLKGGKLSLPDVLRYGVDLATGILELHSKGFLILNLKPSNFLLSDNDKAILGDVGIPYLLLSIPLPSSDMTERLGTPNYMAPEQWQPDVRGPMSFETDSWGFGCSIVEMLTGVQPWSGRSADEIYDLVVRKQEKLSIPSSIPPPLENLLRGCFMYDLRSRPSMTDILLVLKSLQNSEEEQVRRGIDSREIRKSSATLGYTEWFLSKDHLQVRDTVRSRKPANSCKHENMDVPEGMVVGLERDSTDPDGFVLVKVHGVHDPLRVHVSVLERVTNGLASGDWVRLKVRKDKRHSPVGVLHSIDREGNVAVGFIGLPTLWKGTSSQLQMAKVYSVGQFVKLKANVVIPRFKWMRKGRGIWATGRISQVLPNGCLEVDFPGMLPFGEEHGSYLADPAEVEIVNFNTCQGAVEKYQHLEDFHWAVRPLLIAMGLLTAMKLGICVRKKIGRSKDGKQRDGSTGQGDCKIPDGKGSDKSKWLVFF

SEQ ID NO: 45167 - protein, 578 aa, Arabidopsis thaliana
  peptide (1)..(578): Ceres Seq. ID no. 12560445
MNSSTLKLRHRIGRGPFGDVWLATHHQSTEDYDEHHEVAIKMLYPIKEDQRRVVVDKFEDLFSKCQGLENVCLLRGVSSINGKICVVMKFYEGSLGDKMARLKGGKLSLPDVLRYGVDLATGILELHSKGFLILNLKPSNFLLSDNDKAILGDVGIPYLLLSIPLPSSDMTERLGTPNYMAPEQWQPDVRGPMSFETDSWGFGCSIVEMLTGVQPWSGRSADEIYDLVVRKQEKLSIPSSIPPPLENLLRGCFMYDLRSRPSMTDILLVLKSLQNSEEEQVRRGIDSREIRKSSATLGYTEWFLSKDHLQVRDTVRSRKPANSCKHENMDVPEGMVVGLERDSTDPDGFVLVKVHGVHDPLRVHVSVLERVTNGLASGDWVRLKVRKDKRHSPVGVLHSIDREGNVAVGFIGLPTLWKGTSSQLQMAKVYSVGQFVKLKANVVIPRFKWMRKGRGIWATGRISQVLPNGCLEVDFPGMLPFGEEHGSYLADPAEVEIVNFNTCQGAVEKYQHLEDFHWAVRPLLIAMGLLTAMKLGICVRKKIGRSKDGKQRDGSTGQGDCKIPDGKGSDKSKWLVFF

SEQ ID NO: 45168 - protein, 537 aa, Arabidopsis thaliana
  peptide (1)..(537): Ceres Seq. ID no. 12560446
MLYPIKEDQRRVVVDKFEDLFSKCQGLENVCLLRGVSSINGKICVVMKFYEGSLGDKMARLKGGKLSLPDVLRYGVDLATGILELHSKGFLILNLKPSNFLLSDNDKAILGDVGIPYLLLSIPLPSSDMTERLGTPNYMAPEQWQPDVRGPMSFETDSWGFGCSIVEMLTGVQPWSGRSADEIYDLVVRKQEKLSIPSSIPPPLENLLRGCFMYDLRSRPSMTDILLVLKSLQNSEEEQVRRGIDSREIRKSSATLGYTEWFLSKDHLQVRDTVRSRKPANSCKHENMDVPEGMVVGLERDSTDPDGFVLVKVHGVHDPLRVHVSVLERVTNGLASGDWVRLKVRKDKRHSPVGVLHSIDREGNVAVGFIGLPTLWKGTSSQLQMAKVYSVGQFVKLKANVVIPRFKWMRKGRGIWATGRISQVLPNGCLEVDFPGMLPFGEEHGSYLADPAEVEIVNFNTCQGAVEKYQHLEDFHWAVRPLLIAMGLLTAMKLGICVRKKIGRSKDGKQRDGSTGQGDCKIPDGKGSDKSKWLVFF

SEQ ID NO: 45169 - DNA, 1294 bp, Arabidopsis thaliana
  misc_feature (1)..(1294): Ceres Seq. ID no. 12560447
  misc_feature (1)..(1294): Ortholog of  Ceres SEQ ID NO 14303324 as cited in SEQ ID NO 54563
  misc_feature (1)..(1294): Ortholog of  Ceres SEQ ID NO 14308575 as cited in SEQ ID NO 58782
atcatttttcccttttttctaaaattctctctttgattcctatcttcttctctttattttcactttgtgctttctctgtctctactattatgagtctaaaagtctactagctgttcaatagttttgtctttctgtgtttcttcttcttcaaaaccgaaagaaattcaaaaagagtctttcgctgcttgttagtggggtgaggaacaaatgggaagaacaccttgttgtgacaagattggtttgaagaaaggtccttggacgcctgaagaagatgaggttcttgttgcgcatatcaagaaaaatggacatggaagctggagaacacttcctaaacttgctggtttacttcgctgtgggaagagttgcaggctgagatggacaaactatctgagaccagacataaagagaggtcctttcactgctgatgaagagaaacttgttatccagcttcatgccattctcggcaacaggtgggctgctattgcagcacagcttccaggaagaacagacaacgagatcaagaacttatggaacactcatttgaagaaacgtcttttatctatgggtcttgatcccagaactcatgagccattaccttcatatgggttagctaaacaagctccatcttcaccaacaactcgccacatggctcaatgggaaagtgctagggttgaagctgaggcaaggctttctagagaatcaatgctctttagcccttctttttactctggtgtagtaaaaactgaatgtgatcacttcttacgcatttggaattccgagattggtgaagctttcaggaatctcgctccattagatgaatcaactattactagtcaaagcccttgctcgagggcaacatcgacctcatctgcacttctgaagagctcaacaaattcttggggagggaaagaggttactgtggcgattcatggctcagattattctccatattcaaatgatcttgaagatgattcaacagactctgctcttcaacttctgcttgatttccctataagcgatgatgatatgagcttcttggaagagaacattgacagctactcacaggctcctcctattggtcttgtttccatggtttccaaattctagtcttatgagagcctaatatctaagaaaaagattcaaactttgcttccttttggtttttagtgatgataagtagggatatagtatctatgtaaatcagcattagttagttgaagtacttaatcaaccctttcttttatgatttgatcatgtttgagaaaattgcagaacattaaacaattaaccattc

SEQ ID NO: 45170 - protein, 299 aa, Arabidopsis thaliana
  peptide (1)..(299): Ceres Seq. ID no. 12560448
MGRTPCCDKIGLKKGPWTPEEDEVLVAHIKKNGHGSWRTLPKLAGLLRCGKSCRLRWTNYLRPDIKRGPFTADEEKLVIQLHAILGNRWAAIAAQLPGRTDNEIKNLWNTHLKKRLLSMGLDPRTHEPLPSYGLAKQAPSSPTTRHMAQWESARVEAEARLSRESMLFSPSFYSGVVKTECDHFLRIWNSEIGEAFRNLAPLDESTITSQSPCSRATSTSSALLKSSTNSWGGKEVTVAIHGSDYSPYSNDLEDDSTDSALQLLLDFPISDDDMSFLEENIDSYSQAPPIGLVSMVSKF

SEQ ID NO: 45171 - protein, 181 aa, Arabidopsis thaliana
  peptide (1)..(181): Ceres Seq. ID no. 12560449
MGLDPRTHEPLPSYGLAKQAPSSPTTRHMAQWESARVEAEARLSRESMLFSPSFYSGVVKTECDHFLRIWNSEIGEAFRNLAPLDESTITSQSPCSRATSTSSALLKSSTNSWGGKEVTVAIHGSDYSPYSNDLEDDSTDSALQLLLDFPISDDDMSFLEENIDSYSQAPPIGLVSMVSKF

SEQ ID NO: 45172 - protein, 153 aa, Arabidopsis thaliana
  peptide (1)..(153): Ceres Seq. ID no. 12560450
MAQWESARVEAEARLSRESMLFSPSFYSGVVKTECDHFLRIWNSEIGEAFRNLAPLDESTITSQSPCSRATSTSSALLKSSTNSWGGKEVTVAIHGSDYSPYSNDLEDDSTDSALQLLLDFPISDDDMSFLEENIDSYSQAPPIGLVSMVSKF

SEQ ID NO: 45173 - DNA, 2957 bp, Arabidopsis thaliana; identical to SEQ ID NO: 38468
  misc_feature (1)..(2957): Ceres Seq. ID no. 12560451
  misc_feature (1)..(2957): Ortholog of  Ceres SEQ ID NO 13595870 as cited in SEQ ID NO 62101
  misc_feature (1)..(2957): Ortholog of  Ceres SEQ ID NO 13590241 as cited in SEQ ID NO 63878
  misc_feature (1)..(2957): Ortholog of  Ceres SEQ ID NO 13657939 as cited in SEQ ID NO 66349

SEQ ID NO: 45174 - protein, 809 aa, Arabidopsis thaliana; identical to SEQ ID NO: 38469
  peptide (1)..(809): Ceres Seq. ID no. 12560452

SEQ ID NO: 45175 - protein, 807 aa, Arabidopsis thaliana; identical to SEQ ID NO: 38470
  peptide (1)..(807): Ceres Seq. ID no. 12560453

SEQ ID NO: 45176 - protein, 683 aa, Arabidopsis thaliana; identical to SEQ ID NO: 38471
  peptide (1)..(683): Ceres Seq. ID no. 12560454

SEQ ID NO: 45177 - DNA, 1563 bp, Arabidopsis thaliana
  misc_feature (1)..(1563): Ceres Seq. ID no. 13575945
  misc_feature (1)..(1563): Ortholog of  Ceres SEQ ID NO 15179593 as cited in SEQ ID NO 1057
  misc_feature (1)..(1563): Ortholog of  Ceres SEQ ID NO 14306904 as cited in SEQ ID NO 53566
  misc_feature (1)..(1563): Ortholog of  Ceres SEQ ID NO 13658640 as cited in SEQ ID NO 66419
gagaaaaatcagcaactctggagagagcgtgttcgtcattgaaatcgaagcttggagattcaatatttcttcgatctcgtgttcttcgtctcgtttcgtcggtccagtgttaataaaaaatgagttcaactgtttcaaatccccaaggaatcctgcaaccaggctcatttctgcttccagaatcagaatctatgaaaaaagaggaagcagagttagtttctgtgtgttggaatcaggattcaagttgttttgcagctggaacgagtcatggttttcgtatatataactgtgaacctttcaaagaaactttcaggcgtgagctaaaggacggtggttttaaaatcgtagagatgcttttccgtagcaatatactggcacttgttggtggtggacctaactctcagtatccttcaagcaaagtactaatttgggatgatcatcagagccgttgcattagtgaatttgcatttaggtctgagattcgtgcagtgaaattaagaagggatcggattgttgttgttcttgaacataagatttatgtttataactttatggatcttagacttcttcatcagattgaaactcaagctaatcctagaggattgtgttgcctttctcatcattctaatacgtctgtgttggcttgccctggtctcaatcgaggagagattcgtgttgaacatttcgggcttaacatggtacaaatcataaatgctcatgattcaagtattgcgtgtatgaccttgacattggatggtttgttgcttgcaactgctagtacaaagggaactctgattagaatcttcaacacaatggatggaactcgtttgcaagaggtacgaagaggagtcgacagagcagatatatatagcattgcactttcaccaaatgtgcagtggctggcggtatcaagtgacaaggggactgttcacattttctctcttagagttagggttgttggggaggattcttattccactgaaaatggagctctgttgacacaacaaaattattctaattctctgcaaggccttgtttctccaaccattggtaccaatcccggttcgtcattgtcgtttatgagaggtgttctaccaaagtatttcagctcggaatggtcatatgcacagtttcatgtatcagaagtcacacaattcttcgcagcatttggcagtaacaacacggttgctattatcggcatggatggaagtttctaccgatgcagctttgatcccgtgaacggaggagagatggggcaactggaatatatccactttatgaagatggacaaccgcccgtgataagtcagactcatgcttcactcactcctctaagcctctgtacataaccatgtctatgtaaatagatttggtgagactgcataagatttgattattgcatattgctacttcgagtgaaagggcctgcattactgattgagactatgtgtacatagctacgtagcaagattcatccacaacagtttgcttcgaacactgtattatgtaaattttcagataacactatagaaaagtaataacaatagaaaaaacagttcaatcg

SEQ ID NO: 45178 - protein, 393 aa, Arabidopsis thaliana
  peptide (1)..(393): Ceres Seq. ID no. 13575946
MSSTVSNPQGILQPGSFLLPESESMKKEEAELVSVCWNQDSSCFAAGTSHGFRIYNCEPFKETFRRELKDGGFKIVEMLFRSNILALVGGGPNSQYPSSKVLIWDDHQSRCISEFAFRSEIRAVKLRRDRIVVVLEHKIYVYNFMDLRLLHQIETQANPRGLCCLSHHSNTSVLACPGLNRGEIRVEHFGLNMVQIINAHDSSIACMTLTLDGLLLATASTKGTLIRIFNTMDGTRLQEVRRGVDRADIYSIALSPNVQWLAVSSDKGTVHIFSLRVRVVGEDSYSTENGALLTQQNYSNSLQGLVSPTIGTNPGSSLSFMRGVLPKYFSSEWSYAQFHVSEVTQFFAAFGSNNTVAIIGMDGSFYRCSFDPVNGGEMGQLEYIHFMKMDNRP

SEQ ID NO: 45179 - protein, 369 aa, Arabidopsis thaliana
  peptide (1)..(369): Ceres Seq. ID no. 13575947
MKKEEAELVSVCWNQDSSCFAAGTSHGFRIYNCEPFKETFRRELKDGGFKIVEMLFRSNILALVGGGPNSQYPSSKVLIWDDHQSRCISEFAFRSEIRAVKLRRDRIVVVLEHKIYVYNFMDLRLLHQIETQANPRGLCCLSHHSNTSVLACPGLNRGEIRVEHFGLNMVQIINAHDSSIACMTLTLDGLLLATASTKGTLIRIFNTMDGTRLQEVRRGVDRADIYSIALSPNVQWLAVSSDKGTVHIFSLRVRVVGEDSYSTENGALLTQQNYSNSLQGLVSPTIGTNPGSSLSFMRGVLPKYFSSEWSYAQFHVSEVTQFFAAFGSNNTVAIIGMDGSFYRCSFDPVNGGEMGQLEYIHFMKMDNRP

SEQ ID NO: 45180 - protein, 316 aa, Arabidopsis thaliana
  peptide (1)..(316): Ceres Seq. ID no. 13575948
MLFRSNILALVGGGPNSQYPSSKVLIWDDHQSRCISEFAFRSEIRAVKLRRDRIVVVLEHKIYVYNFMDLRLLHQIETQANPRGLCCLSHHSNTSVLACPGLNRGEIRVEHFGLNMVQIINAHDSSIACMTLTLDGLLLATASTKGTLIRIFNTMDGTRLQEVRRGVDRADIYSIALSPNVQWLAVSSDKGTVHIFSLRVRVVGEDSYSTENGALLTQQNYSNSLQGLVSPTIGTNPGSSLSFMRGVLPKYFSSEWSYAQFHVSEVTQFFAAFGSNNTVAIIGMDGSFYRCSFDPVNGGEMGQLEYIHFMKMDNRP

SEQ ID NO: 45181 - DNA, 846 bp, Arabidopsis thaliana
  misc_feature (1)..(846): Ceres Seq. ID no. 12560467
  misc_feature (1)..(846): Ortholog of  Ceres SEQ ID NO 15171141 as cited in SEQ ID NO 58212
gagatagagagaaagacgcttctggtcagttttcgttaaacccgccggagaaactagcgactacggtggtcgaacccgtctgacgtcgtagaattcatcgtaatcttcacttcctttcttccccgacaaaatcatcgatctgtgtttgccaatcagattcaccggaacttctagttaggacgattgtgaaaaatgtcgtcatcgttagaacaagaaatcttcttacagtggggaaacaagaagagattgagatgtcttagagccaaagccaaaaagatctctcgttctaaaaactcttctcgctttctaggtcaagataccgtcctccttcaatcctctagattctccagaggatcagaaggagcaatcctcagatctggactaccagatcgccggagaccgtctccggagaaagaggagaggtattatactacgagaggtgtagtggataacattgggaaagattgtttagatggaaacatcaatggagaagatagcaacaacaaggaagagagtatgtggcctaagctctttataacattatcaaacaaagagaaagaagaagatttcatggctatgaaaggttgcaaaccttctcataggcctaagaagagagctaaactcatccaaagaagcttacttaaaagtgttctgaagattcttcagttgtctgtttatagttttgagaataatgtgttgtctgattttaaacagttggtgagtcctggaacatggttggctgatttgtgccctgatagatacgatgttagggtgaagaagagctctaagaagaggcgagcaagagggctaaaagccatgggaaacatggagactgattcagattga

SEQ ID NO: 45182 - protein, 217 aa, Arabidopsis thaliana
  peptide (1)..(217): Ceres Seq. ID no. 12560468
MSSSLEQEIFLQWGNKKRLRCLRAKAKKISRSKNSSRFLGQDTVLLQSSRFSRGSEGAILRSGLPDRRRPSPEKEERYYTTRGVVDNIGKDCLDGNINGEDSNNKEESMWPKLFITLSNKEKEEDFMAMKGCKPSHRPKKRAKLIQRSLLKSVLKILQLSVYSFENNVLSDFKQLVSPGTWLADLCPDRYDVRVKKSSKKRRARGLKAMGNMETDSD

SEQ ID NO: 45183 - protein, 109 aa, Arabidopsis thaliana
  peptide (1)..(109): Ceres Seq. ID no. 12560469
MWPKLFITLSNKEKEEDFMAMKGCKPSHRPKKRAKLIQRSLLKSVLKILQLSVYSFENNVLSDFKQLVSPGTWLADLCPDRYDVRVKKSSKKRRARGLKAMGNMETDSD

SEQ ID NO: 45184 - DNA, 1876 bp, Arabidopsis thaliana; identical to SEQ ID NO: 35125
  misc_feature (1)..(1876): Ceres Seq. ID no. 12600465
  misc_feature (1)..(1876): Ortholog of  Ceres SEQ ID NO 15171626 as cited in SEQ ID NO 57201

SEQ ID NO: 45185 - protein, 366 aa, Arabidopsis thaliana; identical to SEQ ID NO: 35126
  peptide (1)..(366): Ceres Seq. ID no. 12600466

SEQ ID NO: 45186 - protein, 215 aa, Arabidopsis thaliana; identical to SEQ ID NO: 35127
  peptide (1)..(215): Ceres Seq. ID no. 12600467

SEQ ID NO: 45187 - protein, 184 aa, Arabidopsis thaliana; identical to SEQ ID NO: 35128
  peptide (1)..(184): Ceres Seq. ID no. 12600468

SEQ ID NO: 45188 - DNA, 1557 bp, Arabidopsis thaliana
  misc_feature (1)..(1557): Ceres Seq. ID no. 12560470
  misc_feature (1)..(1557): Ortholog of  Ceres SEQ ID NO 13594037 as cited in SEQ ID NO 55666
  misc_feature (1)..(1557): Ortholog of  Ceres SEQ ID NO 13657707 as cited in SEQ ID NO 66407
atggcttcatcatcatcaatatcaaatcacaagattccaaacacactaatgtttttggtgatcgtaaactttttgtacctaattcaaactaattcagctgtcagtatcagttccaattccaactcccacttctcaagattctcgagacatcgaagctcaccatcatcaaaaaccaaacaagggtttcttgcaacggtccaagagagtatgaaccatgctctcttggctcgttctcttgctttcaacctcactctttctcatcgaaccgtacaaacccacacgttcgatcccatccacgactgcctcgagctgctcgacgacacacttgacatgttatctcgcatccatgcggataatgatgaagaagatgtccatacatggctaagcgcagcactcacgaaccaagacacttgtgagcagagccttcaagaaaaatccgagtcatacaaacacggacttgcgatggatttcgtcgcaagaaacctaaccggtttgttgactagctcgcttgacttgttcgtatccgtcaagtcaaaacaccggaaactcttatcgaaacaagagtattttccgacgttcgttccttcgtcggagcaacggaggcttctagaagctccggtggaggagctgaatgttgatgcggtggtggctcctgacggaagtgggacacacaaaaccataggagaagccttgttgtctacgtcattagcgagtagtgggggcaggaccaaaatatacctaaaagccgggacatatcatgagaacatcaacattccgacgaagcagaagaacgttatgttagttggtgacgggaagggtaaaacagtcattgtaggtagcagaagtaacagaggcggctggactacttacaaaactgcaaccgtcgccgctatgggggaagggttcatagcgcgggacatgacattcgtgaacaacgccggacccaaatcggagcaagcggtggcgctccgtgtcggagcagataaatccgtcgtgcatcgatgctcagtggaaggataccaagattcactctacacacactccaaacgacaattctatagagagacggatatcaccggcaccgtcgatttcatattcggaaactccgccgtcgtatttcaatcctgcaacatcgccgcacggaaacctttaccgggtcagagaaacttcgtgacggcgcaaggacggagcaatccgggtcaaaacaccggaatcgcgattcaaaactgcaggatcacggcggaatcgatgacttatcttggtcggccgtggaaggagtattcgaggacggtggtgatgcaatcatttatcggcgggtcgattcatccgtcgggttggtctccttggtcgggtggtttcggtctcaaatctctgttttacggagaatatgggaattcgggtcctggatcatcggtttcgggtcgggttaaatggagtgggtgtcatccgtctttgacggtgacggaagcggaaaaattcactgtggcgagttttattgacgggaatatatggttgccgtcaacgggcgttagtttcgacccaggacttgtgaattga

SEQ ID NO: 45189 - protein, 518 aa, Arabidopsis thaliana
  peptide (1)..(518): Ceres Seq. ID no. 12560471
MASSSSISNHKIPNTLMFLVIVNFLYLIQTNSAVSISSNSNSHFSRFSRHRSSPSSKTKQGFLATVQESMNHALLARSLAFNLTLSHRTVQTHTFDPIHDCLELLDDTLDMLSRIHADNDEEDVHTWLSAALTNQDTCEQSLQEKSESYKHGLAMDFVARNLTGLLTSSLDLFVSVKSKHRKLLSKQEYFPTFVPSSEQRRLLEAPVEELNVDAVVAPDGSGTHKTIGEALLSTSLASSGGRTKIYLKAGTYHENINIPTKQKNVMLVGDGKGKTVIVGSRSNRGGWTTYKTATVAAMGEGFIARDMTFVNNAGPKSEQAVALRVGADKSVVHRCSVEGYQDSLYTHSKRQFYRETDITGTVDFIFGNSAVVFQSCNIAARKPLPGQRNFVTAQGRSNPGQNTGIAIQNCRITAESMTYLGRPWKEYSRTVVMQSFIGGSIHPSGWSPWSGGFGLKSLFYGEYGNSGPGSSVSGRVKWSGCHPSLTVTEAEKFTVASFIDGNIWLPSTGVSFDPGLVN

SEQ ID NO: 45190 - protein, 502 aa, Arabidopsis thaliana
  peptide (1)..(502): Ceres Seq. ID no. 12560472
MFLVIVNFLYLIQTNSAVSISSNSNSHFSRFSRHRSSPSSKTKQGFLATVQESMNHALLARSLAFNLTLSHRTVQTHTFDPIHDCLELLDDTLDMLSRIHADNDEEDVHTWLSAALTNQDTCEQSLQEKSESYKHGLAMDFVARNLTGLLTSSLDLFVSVKSKHRKLLSKQEYFPTFVPSSEQRRLLEAPVEELNVDAVVAPDGSGTHKTIGEALLSTSLASSGGRTKIYLKAGTYHENINIPTKQKNVMLVGDGKGKTVIVGSRSNRGGWTTYKTATVAAMGEGFIARDMTFVNNAGPKSEQAVALRVGADKSVVHRCSVEGYQDSLYTHSKRQFYRETDITGTVDFIFGNSAVVFQSCNIAARKPLPGQRNFVTAQGRSNPGQNTGIAIQNCRITAESMTYLGRPWKEYSRTVVMQSFIGGSIHPSGWSPWSGGFGLKSLFYGEYGNSGPGSSVSGRVKWSGCHPSLTVTEAEKFTVASFIDGNIWLPSTGVSFDPGLVN

SEQ ID NO: 45191 - protein, 449 aa, Arabidopsis thaliana
  peptide (1)..(449): Ceres Seq. ID no. 12560473
MNHALLARSLAFNLTLSHRTVQTHTFDPIHDCLELLDDTLDMLSRIHADNDEEDVHTWLSAALTNQDTCEQSLQEKSESYKHGLAMDFVARNLTGLLTSSLDLFVSVKSKHRKLLSKQEYFPTFVPSSEQRRLLEAPVEELNVDAVVAPDGSGTHKTIGEALLSTSLASSGGRTKIYLKAGTYHENINIPTKQKNVMLVGDGKGKTVIVGSRSNRGGWTTYKTATVAAMGEGFIARDMTFVNNAGPKSEQAVALRVGADKSVVHRCSVEGYQDSLYTHSKRQFYRETDITGTVDFIFGNSAVVFQSCNIAARKPLPGQRNFVTAQGRSNPGQNTGIAIQNCRITAESMTYLGRPWKEYSRTVVMQSFIGGSIHPSGWSPWSGGFGLKSLFYGEYGNSGPGSSVSGRVKWSGCHPSLTVTEAEKFTVASFIDGNIWLPSTGVSFDPGLVN

SEQ ID NO: 45192 - DNA, 771 bp, Arabidopsis thaliana
  misc_feature (1)..(771): Ceres Seq. ID no. 12560474
  misc_feature (1)..(771): Ortholog of  Ceres SEQ ID NO 13599613 as cited in SEQ ID NO 0
  misc_feature (1)..(771): Ortholog of  Ceres SEQ ID NO 15179570 as cited in SEQ ID NO 0
atgctagttaagaaattcgttttggtgcatggtgaagggtttggggcatggtgttggtacaaaactattgcgtcattggaggagtctggactgtctcctgttacggttgacctcgctggatctggatttaatatgacagacgcaaatagtgtttccaccttagaagaatattcaaaaccgttgatcgagctcattcaaaatcttcctgctgaagaaaaggtgattctggtaggtcacagtactggaggggcatgtgtttcatatgcgttagagcggtttccagagaaaatctcaaaagctatattcatttgtgcaactatggttactgatggacaaagacccttcgatgtcttcgctgatgagcttggttctgcagaacggttcatgaaagagtcacagttcttgatctatggaaacggcaaggacaaccccgcgacagggttcatgttcgagaaacaacacatgaaaggcttgtacttcaatcagtcaccaaataaggacattgcattgtcaatgatctcgatgcggcctgtaccattaggtcccatgatggagaagttgtcacttagtgcagaaagatatgggaaaggtcggagattctatgtccagacgctcgatgacttggctctttcaccggacgttcaagagaaactggttcgagagaatagtcccgaagcagtttttaagatcaaaggaagtgatcattgcccattcttctctaaacctcagtctcttcacaagatccttcttgaaatagcacagattccttaa

SEQ ID NO: 45193 - protein, 256 aa, Arabidopsis thaliana
  peptide (1)..(256): Ceres Seq. ID no. 12560475
MLVKKFVLVHGEGFGAWCWYKTIASLEESGLSPVTVDLAGSGFNMTDANSVSTLEEYSKPLIELIQNLPAEEKVILVGHSTGGACVSYALERFPEKISKAIFICATMVTDGQRPFDVFADELGSAERFMKESQFLIYGNGKDNPATGFMFEKQHMKGLYFNQSPNKDIALSMISMRPVPLGPMMEKLSLSAERYGKGRRFYVQTLDDLALSPDVQEKLVRENSPEAVFKIKGSDHCPFFSKPQSLHKILLEIAQIP

SEQ ID NO: 45194 - protein, 212 aa, Arabidopsis thaliana
  peptide (1)..(212): Ceres Seq. ID no. 12560476
MTDANSVSTLEEYSKPLIELIQNLPAEEKVILVGHSTGGACVSYALERFPEKISKAIFICATMVTDGQRPFDVFADELGSAERFMKESQFLIYGNGKDNPATGFMFEKQHMKGLYFNQSPNKDIALSMISMRPVPLGPMMEKLSLSAERYGKGRRFYVQTLDDLALSPDVQEKLVRENSPEAVFKIKGSDHCPFFSKPQSLHKILLEIAQIP

SEQ ID NO: 45195 - protein, 150 aa, Arabidopsis thaliana
  peptide (1)..(150): Ceres Seq. ID no. 12560477
MVTDGQRPFDVFADELGSAERFMKESQFLIYGNGKDNPATGFMFEKQHMKGLYFNQSPNKDIALSMISMRPVPLGPMMEKLSLSAERYGKGRRFYVQTLDDLALSPDVQEKLVRENSPEAVFKIKGSDHCPFFSKPQSLHKILLEIAQIP

SEQ ID NO: 45196 - DNA, 1273 bp, Arabidopsis thaliana
  misc_feature (1)..(1273): Ceres Seq. ID no. 12560478
  misc_feature (1)..(1273): Ortholog of  Ceres SEQ ID NO 14314312 as cited in SEQ ID NO 57283
gaacggataatcgccgttgggaccaaaacgctccaatacggtcagtgacgtcaccgccggtcatcaatgtcaggccacacttatcctcttctctcccattccggtttcctcccaccaaaaaaaaaaaaacttctttttatgttttgtttgtttctattccgatcttatcctacgccgtcactctcctcccggtgcgcacattagcaacactactcccgacgaatggagacgacgacgccgcagtcaaaatcaagtgtgtcccaccgaccgccgttgggaagagaagactggtggagtgaggaagcgacggcgacgctggtagaagcctggggcaatcgttacgtcaagctgaaccacggaaatctccggcagaatgactggaaagacgtcgccgacgccgttaactctagacacggtgataacagccgtaagaagaccgacttacagtgtaagaaccgggtcgatactttgaagaagaagtacaaaacagagaaagctaaactctcgccgtcgacttggcgtttctataaccgcctcgatgttctaatcggtcccgttgtgaagaaatcggctggcggagttgtcaaatcagcgccttttaagaatcatctgaatccaactggatcgaactctactggaagctctcttgaagatgatgatgaggatgatgatgaggttggtgattgggaattcgttgctaggaagcatcctcgtgtggaagaggtagatctgagtgaaggatcaacgtgtagggaactagctacggcgattctcaagtttggagaagtttacgagagaattgaagggaagaagcaacagatgatgattgagttggagaagcagagaatggaagtgacaaaggaggtagagttaaaacgaatgaacatgttgatggagatgcagttagagattgagaaatcaaagcaccggaaacgcgcaagtgcttcaggtaagcaattgtagaattagattggtggaggaaataccatggtgaagcaaagaggagttacttgaatctgaagctcattgaaattggaggatcctgttacttgttttaatctgtaggatggaagttagagaactctttaggatgtctttgtttgttttcttctactttctagcgtgttagtgtacattggtgtactggagcaaatcttccttaactctttagtagctgacaagtatgatctacatttgtgttagtgtccacgtataatgatggcttgtgtatccaaactacagcttctgatgcttaacagttacatgtttatgc

SEQ ID NO: 45197 - protein, 246 aa, Arabidopsis thaliana
  peptide (1)..(246): Ceres Seq. ID no. 12560479
METTTPQSKSSVSHRPPLGREDWWSEEATATLVEAWGNRYVKLNHGNLRQNDWKDVADAVNSRHGDNSRKKTDLQCKNRVDTLKKKYKTEKAKLSPSTWRFYNRLDVLIGPVVKKSAGGVVKSAPFKNHLNPTGSNSTGSSLEDDDEDDDEVGDWEFVARKHPRVEEVDLSEGSTCRELATAILKFGEVYERIEGKKQQMMIELEKQRMEVTKEVELKRMNMLMEMQLEIEKSKHRKRASASGKQL

SEQ ID NO: 45198 - DNA, 2611 bp, Arabidopsis thaliana; identical to SEQ ID NO: 44956
  misc_feature (1)..(2611): Ceres Seq. ID no. 13591498
  misc_feature (1)..(2611): Ortholog of  Ceres SEQ ID NO 15176095 as cited in SEQ ID NO 59699

SEQ ID NO: 45199 - protein, 798 aa, Arabidopsis thaliana; identical to SEQ ID NO: 44957
  peptide (1)..(798): Ceres Seq. ID no. 13591499

SEQ ID NO: 45200 - protein, 757 aa, Arabidopsis thaliana; identical to SEQ ID NO: 44958
  peptide (1)..(757): Ceres Seq. ID no. 13591500

SEQ ID NO: 45201 - protein, 722 aa, Arabidopsis thaliana; identical to SEQ ID NO: 44959
  peptide (1)..(722): Ceres Seq. ID no. 13591501

SEQ ID NO: 45202 - DNA, 2794 bp, Arabidopsis thaliana
  misc_feature (1)..(2794): Ceres Seq. ID no. 12601525
  misc_feature (1)..(2794): Ortholog of  Ceres SEQ ID NO 13600595 as cited in SEQ ID NO 629
gagctctccttgttttttattcctccgacaaggacgaggttccaagagaacttagcttcttgttctacgtacgacaccaaaaattaattcaaaaaagaaaaagaagagagttcaatgagaaaacattctcttgatcgatggcttttaacagctgttcttgtcgttctcctctcgtcttcttcctccttcgcggccaagaaggacgccaagaagaagaagaagagtaataaggaggtgacatatgatggaacctctttgatcatcgatggcaaaagagagcttctttattctggctctattcattacccgagaagcactccggaaatgtggccaagtatcatcaagagagccaagcaaggcggtttgaacacgattcagacatacgttttctggaatgtacatgagcctcaacaaggaaagttcaacttttcgggacgagctgatttggtgaagttcataaagttgattcaaaagaatggaatgtatgtgaccttaaggcttggaccgttcatccaagctgaatggactcatggaggacttccttattggcttagagaagttcctggaattttcttccgtacagacaataaacaattcaaggagcatacagaaaggtatgtacggatgatactcgacaaaatgaaggaggaaagattgtttgcgtcacaaggaggccccattatattaggacagatagaaaacgaatatagcgcggttcaacgtgcatataaacaagacgggttaaactacattaaatgggcatctaatttggtggactcaatgaaactcgggatcccatgggttatgtgcaagcagaacgacgctcctgatcctatgatcaatgcttgtaatggaagacattgcggtgatactttccccggtccaaacagagaaaacaaaccatctttatggactgagaattggactactcagttccgcgtgtttggtgatccgccaactcaaagatcagtagaagatatcgcgtattcagttgctcgattcttctccaagaacggaacccatgtcaactactacatgtaccacggagggactaactttggaagaacctctgcacattatgtgaccactagatactacgatgatgcacctcttgatgaatatggtttagagaaagagcctaagtatggtcatcttaagcatcttcacaacgctcttaacctctgcaagaagccacttctttggggtcagcctaaaaccgagaaacctggaaaagatacagagattagatactacgaacaacctggaaccaaaacttgtgctgctttcttggctaacaacaatactgaagctgcagaaaccatcaaattcaagggcagagaatacgtgatcgcgcctcgttctattagtattcttcccgattgtaaaactgttgtttacaacactgcacagattgtttctcaacacacttcaaggaactttatgaagtctaaaaaggcaaacaagaagtttgatttcaaagttttcacagagacattgcctagtaaactcgaaggtaactcatacatacccgttgagctttatggtttgactaaagacaagacagactatggatggtacacaacaagcttcaaggttcacaagaatcacttacctaccaagaaaggagttaagacttttgtgaggattgctagtcttggacacgcgttgcacgcttggcttaacggagaataccttggaagtggacatggaagccacgaagagaagagttttgttttccaaaaacaggttacactaaaagcaggagagaatcatcttgtaatgcttggtgttctcacaggattcccagacagtggatcttacatggagcatagatacaccggtcctcgtggtatttccatcttaggattgacttctggaacacttgatctcactgagagcagcaaatggggaaacaagatcggtatggaaggtgaaaaacttggaatccacactgaggaaggtttaaagaaggtcgaatggaaaaaattcaccggaaaagcaccaggacttacatggtaccagacatactttgatgcaccagagagcgtaagcgcagcaacgattcgcatgcatggaatgggaaaagggttgatttgggtgaacggagaaggcgttggaagatattggcaatcgttcttgtctccattaggtcaacctacacaaatagagtatcacatccctagatctttcttaaagcccaagaagaaccttcttgttatctttgaggaagagcctaatgtgaagcctgagcttatggactttgccatcgttaacagagacactgtttgttcttacgttggagaaaactacactccaagtgttagacactggactaggaagaaagatcaagttcaagccatcacagataacgtgagtctcacggctactcttaaatgctcaggcactaagaagatcgcagcagttgagttcgctagcttcggaaaccctattggtgtttgtggaaacttcacacttggtacttgtaatgctcctgtttcaaagcaagtcatcgagaagcactgtttggggaaagctgaatgtgtgattccggtgaacaagagcacgtttcaacaagacaagaaggattcatgtaagaacgttgtgaagatgcttgccgtgcaagtcaagtgtggtcgtgggaagaagaactgaagagtgtatatcatcacattacatatggttcatgtattgtgtttagtagaccaatttcaaagtgttgtgacatcgatttttgtcgttctgtttgtatttgatttcttcaatttaactctaatacacgagtaatatattcgaa

SEQ ID NO: 45203 - protein, 845 aa, Arabidopsis thaliana
  peptide (1)..(845): Ceres Seq. ID no. 12601526
MRKHSLDRWLLTAVLVVLLSSSSSFAAKKDAKKKKKSNKEVTYDGTSLIIDGKRELLYSGSIHYPRSTPEMWPSIIKRAKQGGLNTIQTYVFWNVHEPQQGKFNFSGRADLVKFIKLIQKNGMYVTLRLGPFIQAEWTHGGLPYWLREVPGIFFRTDNKQFKEHTERYVRMILDKMKEERLFASQGGPIILGQIENEYSAVQRAYKQDGLNYIKWASNLVDSMKLGIPWVMCKQNDAPDPMINACNGRHCGDTFPGPNRENKPSLWTENWTTQFRVFGDPPTQRSVEDIAYSVARFFSKNGTHVNYYMYHGGTNFGRTSAHYVTTRYYDDAPLDEYGLEKEPKYGHLKHLHNALNLCKKPLLWGQPKTEKPGKDTEIRYYEQPGTKTCAAFLANNNTEAAETIKFKGREYVIAPRSISILPDCKTVVYNTAQIVSQHTSRNFMKSKKANKKFDFKVFTETLPSKLEGNSYIPVELYGLTKDKTDYGWYTTSFKVHKNHLPTKKGVKTFVRIASLGHALHAWLNGEYLGSGHGSHEEKSFVFQKQVTLKAGENHLVMLGVLTGFPDSGSYMEHRYTGPRGISILGLTSGTLDLTESSKWGNKIGMEGEKLGIHTEEGLKKVEWKKFTGKAPGLTWYQTYFDAPESVSAATIRMHGMGKGLIWVNGEGVGRYWQSFLSPLGQPTQIEYHIPRSFLKPKKNLLVIFEEEPNVKPELMDFAIVNRDTVCSYVGENYTPSVRHWTRKKDQVQAITDNVSLTATLKCSGTKKIAAVEFASFGNPIGVCGNFTLGTCNAPVSKQVIEKHCLGKAECVIPVNKSTFQQDKKDSCKNVVKMLAVQVKCGRGKKN

SEQ ID NO: 45204 - protein, 775 aa, Arabidopsis thaliana
  peptide (1)..(775): Ceres Seq. ID no. 12601527
MWPSIIKRAKQGGLNTIQTYVFWNVHEPQQGKFNFSGRADLVKFIKLIQKNGMYVTLRLGPFIQAEWTHGGLPYWLREVPGIFFRTDNKQFKEHTERYVRMILDKMKEERLFASQGGPIILGQIENEYSAVQRAYKQDGLNYIKWASNLVDSMKLGIPWVMCKQNDAPDPMINACNGRHCGDTFPGPNRENKPSLWTENWTTQFRVFGDPPTQRSVEDIAYSVARFFSKNGTHVNYYMYHGGTNFGRTSAHYVTTRYYDDAPLDEYGLEKEPKYGHLKHLHNALNLCKKPLLWGQPKTEKPGKDTEIRYYEQPGTKTCAAFLANNNTEAAETIKFKGREYVIAPRSISILPDCKTVVYNTAQIVSQHTSRNFMKSKKANKKFDFKVFTETLPSKLEGNSYIPVELYGLTKDKTDYGWYTTSFKVHKNHLPTKKGVKTFVRIASLGHALHAWLNGEYLGSGHGSHEEKSFVFQKQVTLKAGENHLVMLGVLTGFPDSGSYMEHRYTGPRGISILGLTSGTLDLTESSKWGNKIGMEGEKLGIHTEEGLKKVEWKKFTGKAPGLTWYQTYFDAPESVSAATIRMHGMGKGLIWVNGEGVGRYWQSFLSPLGQPTQIEYHIPRSFLKPKKNLLVIFEEEPNVKPELMDFAIVNRDTVCSYVGENYTPSVRHWTRKKDQVQAITDNVSLTATLKCSGTKKIAAVEFASFGNPIGVCGNFTLGTCNAPVSKQVIEKHCLGKAECVIPVNKSTFQQDKKDSCKNVVKMLAVQVKCGRGKKN

SEQ ID NO: 45205 - protein, 723 aa, Arabidopsis thaliana
  peptide (1)..(723): Ceres Seq. ID no. 12601528
MYVTLRLGPFIQAEWTHGGLPYWLREVPGIFFRTDNKQFKEHTERYVRMILDKMKEERLFASQGGPIILGQIENEYSAVQRAYKQDGLNYIKWASNLVDSMKLGIPWVMCKQNDAPDPMINACNGRHCGDTFPGPNRENKPSLWTENWTTQFRVFGDPPTQRSVEDIAYSVARFFSKNGTHVNYYMYHGGTNFGRTSAHYVTTRYYDDAPLDEYGLEKEPKYGHLKHLHNALNLCKKPLLWGQPKTEKPGKDTEIRYYEQPGTKTCAAFLANNNTEAAETIKFKGREYVIAPRSISILPDCKTVVYNTAQIVSQHTSRNFMKSKKANKKFDFKVFTETLPSKLEGNSYIPVELYGLTKDKTDYGWYTTSFKVHKNHLPTKKGVKTFVRIASLGHALHAWLNGEYLGSGHGSHEEKSFVFQKQVTLKAGENHLVMLGVLTGFPDSGSYMEHRYTGPRGISILGLTSGTLDLTESSKWGNKIGMEGEKLGIHTEEGLKKVEWKKFTGKAPGLTWYQTYFDAPESVSAATIRMHGMGKGLIWVNGEGVGRYWQSFLSPLGQPTQIEYHIPRSFLKPKKNLLVIFEEEPNVKPELMDFAIVNRDTVCSYVGENYTPSVRHWTRKKDQVQAITDNVSLTATLKCSGTKKIAAVEFASFGNPIGVCGNFTLGTCNAPVSKQVIEKHCLGKAECVIPVNKSTFQQDKKDSCKNVVKMLAVQVKCGRGKKN

SEQ ID NO: 45206 - DNA, 2066 bp, Arabidopsis thaliana; identical to SEQ ID NO: 39017
  misc_feature (1)..(2066): Ceres Seq. ID no. 13495924
  misc_feature (1)..(2066): Ortholog of  Ceres SEQ ID NO 12460981 as cited in SEQ ID NO 65146

SEQ ID NO: 45207 - protein, 573 aa, Arabidopsis thaliana; identical to SEQ ID NO: 39018
  peptide (1)..(573): Ceres Seq. ID no. 13495925

SEQ ID NO: 45208 - protein, 298 aa, Arabidopsis thaliana; identical to SEQ ID NO: 39019
  peptide (1)..(298): Ceres Seq. ID no. 13495926

SEQ ID NO: 45209 - DNA, 1166 bp, Arabidopsis thaliana
  misc_feature (1)..(1166): Ceres Seq. ID no. 13591615
  misc_feature (1)..(1166): Ortholog of  Ceres SEQ ID NO 13593955 as cited in SEQ ID NO 54278
  misc_feature (1)..(1166): Ortholog of  Ceres SEQ ID NO 13655302 as cited in SEQ ID NO 63307
  misc_feature (1)..(1166): Ortholog of  Ceres SEQ ID NO 13597380 as cited in SEQ ID NO 64054
  misc_feature (1)..(1166): Ortholog of  Ceres SEQ ID NO 12625474 as cited in SEQ ID NO 64169
  misc_feature (1)..(1166): Ortholog of  Ceres SEQ ID NO 13597502 as cited in SEQ ID NO 64681
ggtggtgaatgagagagtcaactttaatggagaaagtcacaaggagaactatctcctccttcatcttctttatcgtctcttctaccattctttttctcgccggaaaatcctcggccaaaatttctcataacggtgacaataatgtgacggccttgttcctctttggagactctttcttggatgcaggaaacaataattacattaacaccactacacttgaccaagccaattttccaccttatggtcaaacattctttggcctccccaccggaagattctccgacggtcgtctcatctctgatttcattgcggaatatgcgaatttgccgttaattccgccgtttttggaaccgggaaatagtcaaaagaagctttacggcgtcaactttgcgtctgctggtgctggtgctcttgtggaaacgttccaaggttcggttataaatttgagaacacaattggatcactacaagaaagtggagagattatggaggacaaactttggtaaagaagaaagcaagaagagaatctcaagagctgtctatttgataagcattgggagcaatgactactcaagcattttcttgaccaatcaatctcttcccatttcaatgtctcaacatgttgacattgtcattggtaatctgactacattcattcatgaaatatacaagattggaggacgtaaattcgggttcttgaatgtgcctgacttgggttgttttccggctttacgaattctacaaccgaagaatgatgattcttgcttaagagatgcttcaagattagcaagcatgcataacagagctctgacaaatctcttgtttcaaatgcaaagacaagtcaagggattcaaattctccctatttgacatgaacaaaagccttagactcagaatgcaacatccttctaaatttgggtttaaagaaggggaagaagcttgttgtggaactgggaagtggagaggagtattcagctgtggagggaagagaattgtgaaagaatatcaattgtgtgagaatcctaaagattatattttttgggattcacttcatctcacacaaaatacatataaccaattcgcaaacttaatttggaacggtggacacatgtcagattctctagtggttggtccatacaatatcaataatttatttcagattccttga

SEQ ID NO: 45210 - protein, 385 aa, Arabidopsis thaliana
  peptide (1)..(385): Ceres Seq. ID no. 13591616
MRESTLMEKVTRRTISSFIFFIVSSTILFLAGKSSAKISHNGDNNVTALFLFGDSFLDAGNNNYINTTTLDQANFPPYGQTFFGLPTGRFSDGRLISDFIAEYANLPLIPPFLEPGNSQKKLYGVNFASAGAGALVETFQGSVINLRTQLDHYKKVERLWRTNFGKEESKKRISRAVYLISIGSNDYSSIFLTNQSLPISMSQHVDIVIGNLTTFIHEIYKIGGRKFGFLNVPDLGCFPALRILQPKNDDSCLRDASRLASMHNRALTNLLFQMQRQVKGFKFSLFDMNKSLRLRMQHPSKFGFKEGEEACCGTGKWRGVFSCGGKRIVKEYQLCENPKDYIFWDSLHLTQNTYNQFANLIWNGGHMSDSLVVGPYNINNLFQIP

SEQ ID NO: 45211 - protein, 379 aa, Arabidopsis thaliana
  peptide (1)..(379): Ceres Seq. ID no. 13591617
MEKVTRRTISSFIFFIVSSTILFLAGKSSAKISHNGDNNVTALFLFGDSFLDAGNNNYINTTTLDQANFPPYGQTFFGLPTGRFSDGRLISDFIAEYANLPLIPPFLEPGNSQKKLYGVNFASAGAGALVETFQGSVINLRTQLDHYKKVERLWRTNFGKEESKKRISRAVYLISIGSNDYSSIFLTNQSLPISMSQHVDIVIGNLTTFIHEIYKIGGRKFGFLNVPDLGCFPALRILQPKNDDSCLRDASRLASMHNRALTNLLFQMQRQVKGFKFSLFDMNKSLRLRMQHPSKFGFKEGEEACCGTGKWRGVFSCGGKRIVKEYQLCENPKDYIFWDSLHLTQNTYNQFANLIWNGGHMSDSLVVGPYNINNLFQIP

SEQ ID NO: 45212 - DNA, 2498 bp, Arabidopsis thaliana
  misc_feature (1)..(2498): Ceres Seq. ID no. 12560492
  misc_feature (1)..(2498): Ortholog of  Ceres SEQ ID NO 13662574 as cited in SEQ ID NO 64794
catcgtaatatccactctccgtctctatctctatctctcattctctctcatccaacgctatgatcggagagaaagatctcgccggagatggagagtgttctcgaaccaaaacatcaaagcctcgattctctaatctaaacaaccaaactcatcaagacgacaaaaccggtcagtatcatcagaaaggcgtcgactttctcaacgtccggtccaacaatctcgatggtgggttttcttcaaaatcatcacccagatcaggaaacgagctcactcttagctatctctgtgaaaactccggtaaactcgctgaaagtcttggtcaaaaggggaaagaagtagtcaccttttctgagaattcaagctacgatgataaatgggtcgagagagatttcttcaatttgagagaaatgaatcctaattcttctaaacgtaaggctcacgaagaagaagaagaagctgaagaagaagaagataagaaaagtaacaaaatcgaaaccctaaatctctctttagctttacctgatgtatctctgtctttaacggcgtcaaacgccgtgaaaaggccgagagtggtgacgagcgagagaacaacgacgtcgttttcaaacgatttcacggcgacggcgccgtcgatgtcttactcttactctcatcctttctctcacaacattagctgctcgatgactcgaaactccacagatttcgattgctccgttggtaaagacgatcacatctggtgcgccggcgaaggaaccaacggatctgttcatagccgattcagaccaatcggtgacggcggcgtagcgctcgcgaacaatccagtttccggtaaaccttcaagctctgctgattactctttctttccctcggagttaccggctcggccggggaatgaagtcacgatctccggcgattcgaggaagaaagtagctaacttggaagataacgatgcggttagatcggagagggtgttatacgacatcgtttcgaaatcgatttcttctgtggctttgattattcaagggatggctgatgaaactctagaatcagctaaagagtatctaaggaacttgattgattcaccggagaagaaggagaagctggtgaatcttcagaaccagattgataaaaggtctgatcttagtaaggagacgttatcgaaatgtgttaaagatcagcttgatatcttggtagctgtaagaacagggcttaagtatttcctctctggtaagatcagaatccctatgaacgaattggtagagatctttctcttcttgagatgtaggaatgtgaattgtaagagtctcttgcctgttgatgattgtgaatgcaagatctgttccaacaacaaaggcttttgtagctcttgtatgtgtcctgtttgtttgagatttgattcagctagcaatacttgtagttgggttggttgtgatgtgtgttcgcattggtgtcatgctgcttgtgggattcagaagaatttgatcaaaccgggacatagtttgaaaggtcagagaggtactactgagatgatgtttcattgcattggatgtgctcataagtcagagatgtttggattcgttaaggatgtttttgtgtgttgcgctaagaattggggacttgagactttgatcaaggagcttgattgtgttagaaaggttttccgaggaagtgatgatgcaaaaggcaaagcattgcatcttaaagccaatgaaatggttaagaagctagagagtaaacagatttcccctcttgatgcttctaacttcatcattcagttcttcaactatgctgagtcaataccagaaattcccgacccaccgagagagctaaccgttgcagcggaaacgagctacagaaaagacgaggcatctgtgacgccttcaacatcaaaggatcaaaagaagaagagctttgcgttaacagatgcaatgatgaacagttttgatagtttagagagcatggtgagaatcaaggaggctgaaacaagaatgttccagaagaaagcagacgaggccagaatagaggcagagagtttcaagagaatgatagaaatgaagacggagaagatggaggaggagtacacagagaaactagcgcgtctgtgtctgcaggagacggaggagagaaggaggaataagctggaggagctcaagaagcttgagaattcgcactgcgattacaggaacatgaagctgagaatggaggctgagattgctggattgttgaagagaatggaagttacaagacaacaattggtatgaaggaatccgaaaaacagagcctttcaattatccatttctctgcactctgctccttgtttcgttttgtgggaaatacaaaattagtgataagtgttttatatgtttctctggaaattgtcttctaaatcttttttttaatctataacttccgtttttgattatatttataactatatatattttatatgattatataatacatgtattttgtataaagtaaatcatttgtactgccgt

SEQ ID NO: 45213 - protein, 733 aa, Arabidopsis thaliana
  peptide (1)..(733): Ceres Seq. ID no. 12560493
MIGEKDLAGDGECSRTKTSKPRFSNLNNQTHQDDKTGQYHQKGVDFLNVRSNNLDGGFSSKSSPRSGNELTLSYLCENSGKLAESLGQKGKEVVTFSENSSYDDKWVERDFFNLREMNPNSSKRKAHEEEEEAEEEEDKKSNKIETLNLSLALPDVSLSLTASNAVKRPRVVTSERTTTSFSNDFTATAPSMSYSYSHPFSHNISCSMTRNSTDFDCSVGKDDHIWCAGEGTNGSVHSRFRPIGDGGVALANNPVSGKPSSSADYSFFPSELPARPGNEVTISGDSRKKVANLEDNDAVRSERVLYDIVSKSISSVALIIQGMADETLESAKEYLRNLIDSPEKKEKLVNLQNQIDKRSDLSKETLSKCVKDQLDILVAVRTGLKYFLSGKIRIPMNELVEIFLFLRCRNVNCKSLLPVDDCECKICSNNKGFCSSCMCPVCLRFDSASNTCSWVGCDVCSHWCHAACGIQKNLIKPGHSLKGQRGTTEMMFHCIGCAHKSEMFGFVKDVFVCCAKNWGLETLIKELDCVRKVFRGSDDAKGKALHLKANEMVKKLESKQISPLDASNFIIQFFNYAESIPEIPDPPRELTVAAETSYRKDEASVTPSTSKDQKKKSFALTDAMMNSFDSLESMVRIKEAETRMFQKKADEARIEAESFKRMIEMKTEKMEEEYTEKLARLCLQETEERRRNKLEELKKLENSHCDYRNMKLRMEAEIAGLLKRMEVTRQQLV

SEQ ID NO: 45214 - protein, 617 aa, Arabidopsis thaliana
  peptide (1)..(617): Ceres Seq. ID no. 12560494
MNPNSSKRKAHEEEEEAEEEEDKKSNKIETLNLSLALPDVSLSLTASNAVKRPRVVTSERTTTSFSNDFTATAPSMSYSYSHPFSHNISCSMTRNSTDFDCSVGKDDHIWCAGEGTNGSVHSRFRPIGDGGVALANNPVSGKPSSSADYSFFPSELPARPGNEVTISGDSRKKVANLEDNDAVRSERVLYDIVSKSISSVALIIQGMADETLESAKEYLRNLIDSPEKKEKLVNLQNQIDKRSDLSKETLSKCVKDQLDILVAVRTGLKYFLSGKIRIPMNELVEIFLFLRCRNVNCKSLLPVDDCECKICSNNKGFCSSCMCPVCLRFDSASNTCSWVGCDVCSHWCHAACGIQKNLIKPGHSLKGQRGTTEMMFHCIGCAHKSEMFGFVKDVFVCCAKNWGLETLIKELDCVRKVFRGSDDAKGKALHLKANEMVKKLESKQISPLDASNFIIQFFNYAESIPEIPDPPRELTVAAETSYRKDEASVTPSTSKDQKKKSFALTDAMMNSFDSLESMVRIKEAETRMFQKKADEARIEAESFKRMIEMKTEKMEEEYTEKLARLCLQETEERRRNKLEELKKLENSHCDYRNMKLRMEAEIAGLLKRMEVTRQQLV

SEQ ID NO: 45215 - protein, 542 aa, Arabidopsis thaliana
  peptide (1)..(542): Ceres Seq. ID no. 12560495
MSYSYSHPFSHNISCSMTRNSTDFDCSVGKDDHIWCAGEGTNGSVHSRFRPIGDGGVALANNPVSGKPSSSADYSFFPSELPARPGNEVTISGDSRKKVANLEDNDAVRSERVLYDIVSKSISSVALIIQGMADETLESAKEYLRNLIDSPEKKEKLVNLQNQIDKRSDLSKETLSKCVKDQLDILVAVRTGLKYFLSGKIRIPMNELVEIFLFLRCRNVNCKSLLPVDDCECKICSNNKGFCSSCMCPVCLRFDSASNTCSWVGCDVCSHWCHAACGIQKNLIKPGHSLKGQRGTTEMMFHCIGCAHKSEMFGFVKDVFVCCAKNWGLETLIKELDCVRKVFRGSDDAKGKALHLKANEMVKKLESKQISPLDASNFIIQFFNYAESIPEIPDPPRELTVAAETSYRKDEASVTPSTSKDQKKKSFALTDAMMNSFDSLESMVRIKEAETRMFQKKADEARIEAESFKRMIEMKTEKMEEEYTEKLARLCLQETEERRRNKLEELKKLENSHCDYRNMKLRMEAEIAGLLKRMEVTRQQLV

SEQ ID NO: 45216 - DNA, 2718 bp, Arabidopsis thaliana
  misc_feature (1)..(2718): Ceres Seq. ID no. 12560525
  misc_feature (1)..(2718): Ortholog of  Ceres SEQ ID NO 14310206 as cited in SEQ ID NO 20650
aatccataatcttatcatataatcaaattcgggaaagtttttaagtttcataaactctataaattactctctaccatcttaacctaaaaaacattctcaatcctttgtccaaaatcttgcatatcggcaaaatggcttcgccgtgtttgaccaagtccgattccggtatcaatggcgttgactttaccgaaaaattccggttagaagattccactctcttagccaatggtcaagtcgtcttaaccgatgttccggttaacgttactctcacctcttcaccttacttagtcgacaaagacggtgtaccactcgacgtctctgccggttcattcatcgggtttaacctcgacggagagcccaaaagccaccacgtggcatccatcggaaaactcaagaacattcgtttcatgagcatattccgtttcaaggtttggtggactactcattgggtcggatcaaacggacgtgacatcgagaacgagactcaaatcatcattcttgatcaatccgggtcggattctggacccggatccgggtcgggtcgtccttatgttctcttgctacctcttcttgaaggctccttccgttcatcattccaatccggagaagacgatgacgtggcggtctgtgtcgaatccgggtcgaccgaagtaaccgggtcggagtttcgtcagattgtgtatgtccatgccggggatgacccgttcaagctcgtgaaagacgccatgaaagtgattagggttcatatgaatacgttcaagcttcttgaagagaaatcgccgccgggaattgtcgataaattcgggtggtgcacttgggatgctttttacttgacggtgaatcctgacggagttcataaaggtgttaagtgtctcgtcgacggtggttgtcctccgggattggttcttatcgacgacggttggcaatcgattggacatgattccgatggtattgatgtcgaagggatgaatattaccgtcgccggtgaacaaatgccttgcaggcttctgaagtttgaagagaaccacaaattcaaagactacgtttctccaaaagatcaaaacgacgtcggaatgaaagctttcgtcagagatctgaaagatgaattctccaccgttgattacatctacgtttggcacgcactttgcggttactggggaggtctccgtcctgaagctccggctctgccgccgtcgaccattatccggcccgagctctctccaggacttaaactaacaatggaagatctcgccgtcgataagatcatagagaccggaatcggatttgcctcgccggacttggcgaaagagttctacgaaggtcttcactctcatcttcaaaacgccggtattgacggcgttaaagttgatgtcatccacatattggagatgttatgccagaaatatggcgggagagttgacttggccaaagcttacttcaaggcgttaacgtcgtcagtgaataagcattttaacggtaacggcgttatcgccagcatggagcattgcaatgactttatgttccttggaactgaagccatctctcttggtcgtgtcggtgatgacttttggtgcacggatccatcaggcgatccaaacggtacgttttggctacaaggatgtcacatggtccactgtgcatacaacagtctctggatgggaaatttcattcagcctgattgggacatgtttcagtccacacatccttgtgctgagttccatgctgcttctcgggccatttccggtgggccgatttacatcagtgattgtgtgggcaagcatgattttgatctcttgaagcgtcttgttttgcccaacggttcgattttgaggtgtgagtactatgctctcccaactcgtgaccgtctctttgaggatcctcttcatgatggcaaaaccatgctcaagatttggaacttgaacaagtacactggagttattggagcattcaactgtcaaggaggaggatggtgcagagaaaccagacgtaaccaatgtttctctgaatgcgtcaacacgttaaccgccaccacaagccctaaagacgttgaatggaacagtggaagcagcccaatctccattgcaaacgttgaagagtttgctttgttcttgtctcaatccaagaagcttttgttgtctggactaaacgatgatcttgagctgactttggagcctttcaagtttgagctgatcactgtctctcctgttgtgaccattgagggtaattcagtccggtttgctccgattggactggttaacatgctaaacacaagcggtgcgatccggtctttggtgtataatgatgaatctgttgaggtcggagtttttggtgccggagagtttagggtttatgcatcgaaaaaacctgtgagctgcttaattgatggtgaagttgttgagtttggttatgaagactcaatggtgatggtgcaagtcccttggtctggtccagatggtttgtcttctattcagtatttgttttagagattttgaaggtccttatttgtttccttcttaactccgtaccgttcgttgagtttttgaaagaactccgagccgttttttatatggtttctgagagtaaacaatttatgttggtttttttttgtcaaacatttatgttggcttttttatttgaggattttctttttatcattggtagaatctttgtactgccatattttcgtatttattataaatgatctgttcttttcataat

SEQ ID NO: 45217 - protein, 783 aa, Arabidopsis thaliana
  peptide (1)..(783): Ceres Seq. ID no. 12560526
MASPCLTKSDSGINGVDFTEKFRLEDSTLLANGQVVLTDVPVNVTLTSSPYLVDKDGVPLDVSAGSFIGFNLDGEPKSHHVASIGKLKNIRFMSIFRFKVWWTTHWVGSNGRDIENETQIIILDQSGSDSGPGSGSGRPYVLLLPLLEGSFRSSFQSGEDDDVAVCVESGSTEVTGSEFRQIVYVHAGDDPFKLVKDAMKVIRVHMNTFKLLEEKSPPGIVDKFGWCTWDAFYLTVNPDGVHKGVKCLVDGGCPPGLVLIDDGWQSIGHDSDGIDVEGMNITVAGEQMPCRLLKFEENHKFKDYVSPKDQNDVGMKAFVRDLKDEFSTVDYIYVWHALCGYWGGLRPEAPALPPSTIIRPELSPGLKLTMEDLAVDKIIETGIGFASPDLAKEFYEGLHSHLQNAGIDGVKVDVIHILEMLCQKYGGRVDLAKAYFKALTSSVNKHFNGNGVIASMEHCNDFMFLGTEAISLGRVGDDFWCTDPSGDPNGTFWLQGCHMVHCAYNSLWMGNFIQPDWDMFQSTHPCAEFHAASRAISGGPIYISDCVGKHDFDLLKRLVLPNGSILRCEYYALPTRDRLFEDPLHDGKTMLKIWNLNKYTGVIGAFNCQGGGWCRETRRNQCFSECVNTLTATTSPKDVEWNSGSSPISIANVEEFALFLSQSKKLLLSGLNDDLELTLEPFKFELITVSPVVTIEGNSVRFAPIGLVNMLNTSGAIRSLVYNDESVEVGVFGAGEFRVYASKKPVSCLIDGEVVEFGYEDSMVMVQVPWSGPDGLSSIQYLF

SEQ ID NO: 45218 - protein, 691 aa, Arabidopsis thaliana
  peptide (1)..(691): Ceres Seq. ID no. 12560527
MSIFRFKVWWTTHWVGSNGRDIENETQIIILDQSGSDSGPGSGSGRPYVLLLPLLEGSFRSSFQSGEDDDVAVCVESGSTEVTGSEFRQIVYVHAGDDPFKLVKDAMKVIRVHMNTFKLLEEKSPPGIVDKFGWCTWDAFYLTVNPDGVHKGVKCLVDGGCPPGLVLIDDGWQSIGHDSDGIDVEGMNITVAGEQMPCRLLKFEENHKFKDYVSPKDQNDVGMKAFVRDLKDEFSTVDYIYVWHALCGYWGGLRPEAPALPPSTIIRPELSPGLKLTMEDLAVDKIIETGIGFASPDLAKEFYEGLHSHLQNAGIDGVKVDVIHILEMLCQKYGGRVDLAKAYFKALTSSVNKHFNGNGVIASMEHCNDFMFLGTEAISLGRVGDDFWCTDPSGDPNGTFWLQGCHMVHCAYNSLWMGNFIQPDWDMFQSTHPCAEFHAASRAISGGPIYISDCVGKHDFDLLKRLVLPNGSILRCEYYALPTRDRLFEDPLHDGKTMLKIWNLNKYTGVIGAFNCQGGGWCRETRRNQCFSECVNTLTATTSPKDVEWNSGSSPISIANVEEFALFLSQSKKLLLSGLNDDLELTLEPFKFELITVSPVVTIEGNSVRFAPIGLVNMLNTSGAIRSLVYNDESVEVGVFGAGEFRVYASKKPVSCLIDGEVVEFGYEDSMVMVQVPWSGPDGLSSIQYLF

SEQ ID NO: 45219 - protein, 585 aa, Arabidopsis thaliana
  peptide (1)..(585): Ceres Seq. ID no. 12560528
MKVIRVHMNTFKLLEEKSPPGIVDKFGWCTWDAFYLTVNPDGVHKGVKCLVDGGCPPGLVLIDDGWQSIGHDSDGIDVEGMNITVAGEQMPCRLLKFEENHKFKDYVSPKDQNDVGMKAFVRDLKDEFSTVDYIYVWHALCGYWGGLRPEAPALPPSTIIRPELSPGLKLTMEDLAVDKIIETGIGFASPDLAKEFYEGLHSHLQNAGIDGVKVDVIHILEMLCQKYGGRVDLAKAYFKALTSSVNKHFNGNGVIASMEHCNDFMFLGTEAISLGRVGDDFWCTDPSGDPNGTFWLQGCHMVHCAYNSLWMGNFIQPDWDMFQSTHPCAEFHAASRAISGGPIYISDCVGKHDFDLLKRLVLPNGSILRCEYYALPTRDRLFEDPLHDGKTMLKIWNLNKYTGVIGAFNCQGGGWCRETRRNQCFSECVNTLTATTSPKDVEWNSGSSPISIANVEEFALFLSQSKKLLLSGLNDDLELTLEPFKFELITVSPVVTIEGNSVRFAPIGLVNMLNTSGAIRSLVYNDESVEVGVFGAGEFRVYASKKPVSCLIDGEVVEFGYEDSMVMVQVPWSGPDGLSSIQYLF

SEQ ID NO: 45220 - DNA, 2123 bp, Arabidopsis thaliana
  misc_feature (1)..(2123): Ceres Seq. ID no. 13575963
  misc_feature (1)..(2123): Ortholog of  Ceres SEQ ID NO 13657008 as cited in SEQ ID NO 69164
gaatttagatctggaaaacaaaaataacatatttggacagtgaagaaagaattttgatacactcatagaaaacccgaaaggagaaaagcaaaaaagccagatcacaatctcaaactcgcttcttcttcttcctcactctcttattaggttcagttccttttcgattcttcgtgtggatcgctgtcggtagatttccgatttctttaggttctgctcgaaatcgtggtttagtgtttattatcatcgattcagaaaacggtgggtaaacttgtagcggaagatgaggcggtggccggtggatcaccggcggcgaggtagaaggagattgtcgagttggatatggtttctccttggttctttctctgtcgctggtttagttctcttcatcgttcagcattatcaccatcaacaagatccatcccagcttttacttgagagagacacgagaaccgaaatggtatctcctccccatttaaacttcacggaagaggtcacaagtgcttcctccttctctaggcagttagcagagcaaatgacacttgccaaagcttatgtgtttatagctaaagagcataataatcttcatttagcttgggaattgagttctaagatcagaagttgtcagcttttgctttccaaagcagctatgagaggacaacctatttcgtttgatgaggctaaaccgattattactggtctatcagctcttatctacaaggctcaagatgcacattatgatattgccaccactatgatgaccatgaaatctcacatccaagcacttgaagagcgtgcaaatgcagctactgttcagaccacaatatttgggcaattggttgctgaggcattaccaaagagcctccactgtttgacgataaagctcacatctgattgggtaacagagccatctcgccatgaactggcagatgagaacagaaactcacctagacttgtcgacaacaacctctaccacttctgcatcttctcggacaacgtgattgccacctcggttgttgttaattcaactgtctcgaatgctgatcatccaaagcagcttgttttccacatagtgacgaatcgagtgagctacaaagctatgcaggcctggtttctaagtaatgacttcaagggctcagcaatagagatcaggagcgtagaggagttttcttggttgaatgcttcatattctcctgttgttaagcaactgctggacacagatgcaagagcttactatttcggggaacagacaagtcaagatacgatttccgagccaaaagtgaggaacccaaagtacttgtcattactgaaccatctcagattctacattccggagatctatccacagctagagaagattgttttcctagacgatgatgttgttgttcagaaagatttgactccactcttctccttggatctgcatggaaacgtcaatggagctgtggaaacatgtcttgaagcctttcaccgatattacaagtatctaaatttctcgaacccactcatcagctcaaagttcgacccacaagcatgtggatgggcttttggtatgaacgtttttgatctgatcgcttggaggaatgcaaacgtgactgctcggtaccattactggcaagatcagaacagagaacgaacgctttggaaactcgggacactccctccaggtctactatctttctatggtctcacagagccactggacagaagatggcatgtcttgggtttaggttacgatgtgaacatcgataaccgtctgatcgaaacagcagctgtgattcactataatggtaacatgaagccttggctaaagctggctattggtaggtataaacctttctggttaaagtttttgaactcgagccatccttatttacaagattgtgtcacagcttaaagcaaaagacgttgagagttgaggctaatcaatatcagaagattcttgatttcttatacactttgaagattcttttttttttggaatattgtagatcaaattcagatttccttctgaagactgttttttgttttttttgggtcggaagagaaaacttataatcacacacacattagaggttgaatatattacttacagggataattggtgacctctgttctacgttttt

SEQ ID NO: 45221 - protein, 537 aa, Arabidopsis thaliana
  peptide (1)..(537): Ceres Seq. ID no. 13575964
MRRWPVDHRRRGRRRLSSWIWFLLGSFSVAGLVLFIVQHYHHQQDPSQLLLERDTRTEMVSPPHLNFTEEVTSASSFSRQLAEQMTLAKAYVFIAKEHNNLHLAWELSSKIRSCQLLLSKAAMRGQPISFDEAKPIITGLSALIYKAQDAHYDIATTMMTMKSHIQALEERANAATVQTTIFGQLVAEALPKSLHCLTIKLTSDWVTEPSRHELADENRNSPRLVDNNLYHFCIFSDNVIATSVVVNSTVSNADHPKQLVFHIVTNRVSYKAMQAWFLSNDFKGSAIEIRSVEEFSWLNASYSPVVKQLLDTDARAYYFGEQTSQDTISEPKVRNPKYLSLLNHLRFYIPEIYPQLEKIVFLDDDVVVQKDLTPLFSLDLHGNVNGAVETCLEAFHRYYKYLNFSNPLISSKFDPQACGWAFGMNVFDLIAWRNANVTARYHYWQDQNRERTLWKLGTLPPGLLSFYGLTEPLDRRWHVLGLGYDVNIDNRLIETAAVIHYNGNMKPWLKLAIGRYKPFWLKFLNSSHPYLQDCVTA

SEQ ID NO: 45222 - protein, 479 aa, Arabidopsis thaliana
  peptide (1)..(479): Ceres Seq. ID no. 13575965
MVSPPHLNFTEEVTSASSFSRQLAEQMTLAKAYVFIAKEHNNLHLAWELSSKIRSCQLLLSKAAMRGQPISFDEAKPIITGLSALIYKAQDAHYDIATTMMTMKSHIQALEERANAATVQTTIFGQLVAEALPKSLHCLTIKLTSDWVTEPSRHELADENRNSPRLVDNNLYHFCIFSDNVIATSVVVNSTVSNADHPKQLVFHIVTNRVSYKAMQAWFLSNDFKGSAIEIRSVEEFSWLNASYSPVVKQLLDTDARAYYFGEQTSQDTISEPKVRNPKYLSLLNHLRFYIPEIYPQLEKIVFLDDDVVVQKDLTPLFSLDLHGNVNGAVETCLEAFHRYYKYLNFSNPLISSKFDPQACGWAFGMNVFDLIAWRNANVTARYHYWQDQNRERTLWKLGTLPPGLLSFYGLTEPLDRRWHVLGLGYDVNIDNRLIETAAVIHYNGNMKPWLKLAIGRYKPFWLKFLNSSHPYLQDCVTA

SEQ ID NO: 45223 - protein, 453 aa, Arabidopsis thaliana
  peptide (1)..(453): Ceres Seq. ID no. 13575966
MTLAKAYVFIAKEHNNLHLAWELSSKIRSCQLLLSKAAMRGQPISFDEAKPIITGLSALIYKAQDAHYDIATTMMTMKSHIQALEERANAATVQTTIFGQLVAEALPKSLHCLTIKLTSDWVTEPSRHELADENRNSPRLVDNNLYHFCIFSDNVIATSVVVNSTVSNADHPKQLVFHIVTNRVSYKAMQAWFLSNDFKGSAIEIRSVEEFSWLNASYSPVVKQLLDTDARAYYFGEQTSQDTISEPKVRNPKYLSLLNHLRFYIPEIYPQLEKIVFLDDDVVVQKDLTPLFSLDLHGNVNGAVETCLEAFHRYYKYLNFSNPLISSKFDPQACGWAFGMNVFDLIAWRNANVTARYHYWQDQNRERTLWKLGTLPPGLLSFYGLTEPLDRRWHVLGLGYDVNIDNRLIETAAVIHYNGNMKPWLKLAIGRYKPFWLKFLNSSHPYLQDCVTA

SEQ ID NO: 45224 - DNA, 2809 bp, Arabidopsis thaliana; identical to SEQ ID NO: 44960
  misc_feature (1)..(2809): Ceres Seq. ID no. 12559536
  misc_feature (1)..(2809): Ortholog of  Ceres SEQ ID NO 15176051 as cited in SEQ ID NO 53434
  misc_feature (1)..(2809): Ortholog of  Ceres SEQ ID NO 15170306 as cited in SEQ ID NO 58219
  misc_feature (1)..(2809): Ortholog of  Ceres SEQ ID NO 12465091 as cited in SEQ ID NO 65947

SEQ ID NO: 45225 - protein, 904 aa, Arabidopsis thaliana; identical to SEQ ID NO: 44961
  peptide (1)..(904): Ceres Seq. ID no. 12559537

SEQ ID NO: 45226 - protein, 896 aa, Arabidopsis thaliana; identical to SEQ ID NO: 44962
  peptide (1)..(896): Ceres Seq. ID no. 12559538

SEQ ID NO: 45227 - protein, 754 aa, Arabidopsis thaliana; identical to SEQ ID NO: 44963
  peptide (1)..(754): Ceres Seq. ID no. 12559539

SEQ ID NO: 45228 - DNA, 1857 bp, Arabidopsis thaliana
  misc_feature (1)..(1857): Ceres Seq. ID no. 13575971
  misc_feature (1)..(1857): Ortholog of  Ceres SEQ ID NO 12613725 as cited in SEQ ID NO 68196
gcctcataacacataaaacacagtggacgtaactcctctgtttcctctgttctctgtcatggctagtttagtctctggtgataaagaagctcaaatctctggcgatccaggcagcaagcgcggtggatggatcactttcccgttcatgctcgctactttgttaggcctttccgtgacttctttcggatgggtaatgaatttgatcgtcttcctaatcgaagagttcaacatcaagagcatcgctgctgctcagatttcaaatgttgccaatggatgtctcagcatgttgcctgttgttgcagccattctagctgattctttctttggaaacattccggtcatcgcggcctcttctttcatttctctgcttggaatcgttctcttgacgcttattgcatctttggactacttgagacctcggccgtgtgaagcagggtcagtcctatgcacaccgccgtcaaaactccacctcgggatcttgtacacagccttagctttagtgaccactggagcaggtgggacacggttcaccatggcatccgcgggtgcaaaccaatatgagaaacctaaagaacaaggaagcttcttcaactggtacttcctcacactatacgctggagctattactggtgcaacagcaattgtatatatacaagacaatgctagctggaaactagggtttggtctctgcgcggctgctaatttgatcagtttcatagtttttgtctctgggaagagatactacaagcatgacaaaccaatgggaagtcccttcacgagtctaatccgcgttgtagtctctgctacagtaaaaaggaaggctgtaatatcatgcaacgaagaagactatcatcactatggtctcgaaaaggaggtcaagacttctgctgcaatgccatccaagagcttcaggttcttgaaccgcgccgctttgatgaccaaagatgatttaaatcagaaagaaggatcagttaacaacatctggaggctatgctctgtacaagaagtagaagatttcaaagccattctccgagtttttcctctatggttatcaatcatcttcgtgagtactcctatggtgatgcaaacaagcttgattgtactccaagctctagtcacggaccgcggacttggtcctaatttcaaagtcccggccggttccctccaagtaataataatcatcactgcatgcattgttatcatcatgaacaactggcttgtctttccaatgtacaagaagctaactcataagttgctgacaccgcttcaaaaagtcggtataggccaggttctcaccattctaagcatggcactctccgcggtggtagaagcaaagaggctgaaaacagttgaaaatggtcatcccatgtcagtgttatggttgtttcctccccttgtgatagtaggtataggcgaagccttccagtttccggccaatattgaattattttatggcgaattccccgagtctctgaggaacaccgcgacttcattgacctcggtggtgattggaatctctttctatttgagcacagctctcattgatcttatccagaggaccacagcgtggttaccaaatgacattaaccacggaagagtggacaatgtttactggcttttagtcattggaggaatcttgaatttcggctacttccttgtgtgttcttgggtctacaaatatagaaacctcaaggataatgatcaagaacaagatccaaaagatggtacaatgtaaagacacaacatgtttctattctagttctctttacattaattctctcctgttagcttttgtgttttcgtatgttttaccacttcacatatggaactacatttagaaaataatactttcaaact

SEQ ID NO: 45229 - protein, 558 aa, Arabidopsis thaliana
  peptide (1)..(558): Ceres Seq. ID no. 13575972
MASLVSGDKEAQISGDPGSKRGGWITFPFMLATLLGLSVTSFGWVMNLIVFLIEEFNIKSIAAAQISNVANGCLSMLPVVAAILADSFFGNIPVIAASSFISLLGIVLLTLIASLDYLRPRPCEAGSVLCTPPSKLHLGILYTALALVTTGAGGTRFTMASAGANQYEKPKEQGSFFNWYFLTLYAGAITGATAIVYIQDNASWKLGFGLCAAANLISFIVFVSGKRYYKHDKPMGSPFTSLIRVVVSATVKRKAVISCNEEDYHHYGLEKEVKTSAAMPSKSFRFLNRAALMTKDDLNQKEGSVNNIWRLCSVQEVEDFKAILRVFPLWLSIIFVSTPMVMQTSLIVLQALVTDRGLGPNFKVPAGSLQVIIIITACIVIIMNNWLVFPMYKKLTHKLLTPLQKVGIGQVLTILSMALSAVVEAKRLKTVENGHPMSVLWLFPPLVIVGIGEAFQFPANIELFYGEFPESLRNTATSLTSVVIGISFYLSTALIDLIQRTTAWLPNDINHGRVDNVYWLLVIGGILNFGYFLVCSWVYKYRNLKDNDQEQDPKDGTM

SEQ ID NO: 45230 - protein, 529 aa, Arabidopsis thaliana
  peptide (1)..(529): Ceres Seq. ID no. 13575973
MLATLLGLSVTSFGWVMNLIVFLIEEFNIKSIAAAQISNVANGCLSMLPVVAAILADSFFGNIPVIAASSFISLLGIVLLTLIASLDYLRPRPCEAGSVLCTPPSKLHLGILYTALALVTTGAGGTRFTMASAGANQYEKPKEQGSFFNWYFLTLYAGAITGATAIVYIQDNASWKLGFGLCAAANLISFIVFVSGKRYYKHDKPMGSPFTSLIRVVVSATVKRKAVISCNEEDYHHYGLEKEVKTSAAMPSKSFRFLNRAALMTKDDLNQKEGSVNNIWRLCSVQEVEDFKAILRVFPLWLSIIFVSTPMVMQTSLIVLQALVTDRGLGPNFKVPAGSLQVIIIITACIVIIMNNWLVFPMYKKLTHKLLTPLQKVGIGQVLTILSMALSAVVEAKRLKTVENGHPMSVLWLFPPLVIVGIGEAFQFPANIELFYGEFPESLRNTATSLTSVVIGISFYLSTALIDLIQRTTAWLPNDINHGRVDNVYWLLVIGGILNFGYFLVCSWVYKYRNLKDNDQEQDPKDGTM

SEQ ID NO: 45231 - protein, 513 aa, Arabidopsis thaliana
  peptide (1)..(513): Ceres Seq. ID no. 13575974
MNLIVFLIEEFNIKSIAAAQISNVANGCLSMLPVVAAILADSFFGNIPVIAASSFISLLGIVLLTLIASLDYLRPRPCEAGSVLCTPPSKLHLGILYTALALVTTGAGGTRFTMASAGANQYEKPKEQGSFFNWYFLTLYAGAITGATAIVYIQDNASWKLGFGLCAAANLISFIVFVSGKRYYKHDKPMGSPFTSLIRVVVSATVKRKAVISCNEEDYHHYGLEKEVKTSAAMPSKSFRFLNRAALMTKDDLNQKEGSVNNIWRLCSVQEVEDFKAILRVFPLWLSIIFVSTPMVMQTSLIVLQALVTDRGLGPNFKVPAGSLQVIIIITACIVIIMNNWLVFPMYKKLTHKLLTPLQKVGIGQVLTILSMALSAVVEAKRLKTVENGHPMSVLWLFPPLVIVGIGEAFQFPANIELFYGEFPESLRNTATSLTSVVIGISFYLSTALIDLIQRTTAWLPNDINHGRVDNVYWLLVIGGILNFGYFLVCSWVYKYRNLKDNDQEQDPKDGTM

SEQ ID NO: 45232 - DNA, 2459 bp, Arabidopsis thaliana
  misc_feature (1)..(2459): Ceres Seq. ID no. 12561854
  misc_feature (1)..(2459): Ortholog of  Ceres SEQ ID NO 14312180 as cited in SEQ ID NO 59480
gaatttccaacatgttttgtttatagaaattgaataaaatcaaacgcgccttcatcttcaagttaaaaatcaaatcttaattagtgaagacaaagaagaagaagacattattttaagtgagttctctctctgtcacactcacaaagctttatactttctggctactgcaagctcatcactgaaaagagcttaaaccagagagatctgataagagaaattttagagtctctctgcttcaacaagatctacatcgaccaggagattagaaagaatcatgggttctaagcataacccaccagggaataacagatcgagaagtacactatctctactcgttgtggttggtttatgttgtttcttctatcttcttggagcatggcaaaagagtgggtttggtaaaggagatagcatagctatggagattacaaagcaagcgcagtgtactgacattgtcactgatcttgattttgaacctcatcacaacacagtgaagatcccacataaagctgatcccaaacctgtttctttcaaaccgtgtgatgtgaagctcaaggattacacgccttgtcaagagcaagaccgagctatgaagttcccgagagagaacatgatttacagagagagacattgtcctcctgataatgagaagctgcgttgtcttgttccagctcctaaagggtatatgactcctttcccttggcctaaaagcagagattatgttcactatgctaatgctcctttcaagagcttgactgtcgaaaaagctggacagaattgggttcagtttcaagggaatgtgtttaaattccctggtggaggaactatgtttcctcaaggtgctgatgcgtatattgaagagctagcttctgttatccctatcaaagatggctctgttagaaccgcattggacactggatgtggggttgctagttggggtgcttatatgcttaagaggaatgttttgactatgtcgtttgcgccaagggataaccacgaagcacaagtccagtttgcgcttgagagaggtgttccagcgattatcgctgttcttggatcaatccttcttccttaccctgcaagagcctttgacatggctcaatgctctcgatgcttgataccatggaccgcaaacgagggaacatacttaatggaagtagatagagtcttgagacctggaggttactgggtcttatcgggtcctccaatcaactggaagacatggcacaagacgtggaaccgaactaaagcagagctaaatgccgagcaaaagagaatagagggaatcgcagagtccttatgctgggagaagaagtatgagaagggagacattgcaattttcagaaagaaaataaacgatagatcatgcgatagatcaacaccggttgacacctgcaaaagaaaggacactgacgatgtctggtacaaggagatagaaacgtgtgtaacaccattccctaaagtatcaaacgaagaagaagttgctggaggaaagctaaagaagttccccgagaggctattcgcagtgcctccaagtatctctaaaggtttgattaatggcgtcgacgaggaatcataccaagaagacatcaatctatggaagaagcgagtgaccggatacaagagaattaacagactgataggttccaccagataccgtaatgtgatggatatgaacgccggtcttggtggattcgctgctgcgcttgaatcgcctaaatcgtgggttatgaatgtgattccaaccattaacaagaacacattgagtgttgtttatgagagaggtctcattggtatctatcatgactggtgtgaaggcttttcaacttatccaagaacatacgatttcattcacgctagtggtgtcttcagcttgtatcagcacagctgcaaacttgaggatattcttcttgaaactgatcggattttacgaccggaagggattgtgattttccgggatgaggttgatgttttgaatgatgtgaggaagatcgttgatggaatgagatgggatactaagttaatggatcatgaagacggtcctctcgtgccggagaagattcttgtcgccacgaagcagtattgggtagccggcgacgatggaaacaattctccgtcgtcttctaatagtgaagaagaataaaacaaaaacaaaaaactcctcaggttactaagcttgaagtgtagatctattttacaacatctggaaaattcttatcaaaaaaggaaggaatcagaatttccattaaagaaaggtgtcaaaaaaaagttgtaaaactatatagtagtgatcaagacgaatatgtgcatttatgttttatttttgttccctagtttttaattttatttttttgaaggaagaaaaaattagttccatgtgtttttgcaagatagttgaaaccttggacgcttgttatgtatgatgcgatcttgacattttttaataacagttattttaaata

SEQ ID NO: 45233 - protein, 621 aa, Arabidopsis thaliana
  peptide (1)..(621): Ceres Seq. ID no. 12561855
MGSKHNPPGNNRSRSTLSLLVVVGLCCFFYLLGAWQKSGFGKGDSIAMEITKQAQCTDIVTDLDFEPHHNTVKIPHKADPKPVSFKPCDVKLKDYTPCQEQDRAMKFPRENMIYRERHCPPDNEKLRCLVPAPKGYMTPFPWPKSRDYVHYANAPFKSLTVEKAGQNWVQFQGNVFKFPGGGTMFPQGADAYIEELASVIPIKDGSVRTALDTGCGVASWGAYMLKRNVLTMSFAPRDNHEAQVQFALERGVPAIIAVLGSILLPYPARAFDMAQCSRCLIPWTANEGTYLMEVDRVLRPGGYWVLSGPPINWKTWHKTWNRTKAELNAEQKRIEGIAESLCWEKKYEKGDIAIFRKKINDRSCDRSTPVDTCKRKDTDDVWYKEIETCVTPFPKVSNEEEVAGGKLKKFPERLFAVPPSISKGLINGVDEESYQEDINLWKKRVTGYKRINRLIGSTRYRNVMDMNAGLGGFAAALESPKSWVMNVIPTINKNTLSVVYERGLIGIYHDWCEGFSTYPRTYDFIHASGVFSLYQHSCKLEDILLETDRILRPEGIVIFRDEVDVLNDVRKIVDGMRWDTKLMDHEDGPLVPEKILVATKQYWVAGDDGNNSPSSSNSEEE

SEQ ID NO: 45234 - protein, 574 aa, Arabidopsis thaliana
  peptide (1)..(574): Ceres Seq. ID no. 12561856
MEITKQAQCTDIVTDLDFEPHHNTVKIPHKADPKPVSFKPCDVKLKDYTPCQEQDRAMKFPRENMIYRERHCPPDNEKLRCLVPAPKGYMTPFPWPKSRDYVHYANAPFKSLTVEKAGQNWVQFQGNVFKFPGGGTMFPQGADAYIEELASVIPIKDGSVRTALDTGCGVASWGAYMLKRNVLTMSFAPRDNHEAQVQFALERGVPAIIAVLGSILLPYPARAFDMAQCSRCLIPWTANEGTYLMEVDRVLRPGGYWVLSGPPINWKTWHKTWNRTKAELNAEQKRIEGIAESLCWEKKYEKGDIAIFRKKINDRSCDRSTPVDTCKRKDTDDVWYKEIETCVTPFPKVSNEEEVAGGKLKKFPERLFAVPPSISKGLINGVDEESYQEDINLWKKRVTGYKRINRLIGSTRYRNVMDMNAGLGGFAAALESPKSWVMNVIPTINKNTLSVVYERGLIGIYHDWCEGFSTYPRTYDFIHASGVFSLYQHSCKLEDILLETDRILRPEGIVIFRDEVDVLNDVRKIVDGMRWDTKLMDHEDGPLVPEKILVATKQYWVAGDDGNNSPSSSNSEEE

SEQ ID NO: 45235 - protein, 517 aa, Arabidopsis thaliana
  peptide (1)..(517): Ceres Seq. ID no. 12561857
MKFPRENMIYRERHCPPDNEKLRCLVPAPKGYMTPFPWPKSRDYVHYANAPFKSLTVEKAGQNWVQFQGNVFKFPGGGTMFPQGADAYIEELASVIPIKDGSVRTALDTGCGVASWGAYMLKRNVLTMSFAPRDNHEAQVQFALERGVPAIIAVLGSILLPYPARAFDMAQCSRCLIPWTANEGTYLMEVDRVLRPGGYWVLSGPPINWKTWHKTWNRTKAELNAEQKRIEGIAESLCWEKKYEKGDIAIFRKKINDRSCDRSTPVDTCKRKDTDDVWYKEIETCVTPFPKVSNEEEVAGGKLKKFPERLFAVPPSISKGLINGVDEESYQEDINLWKKRVTGYKRINRLIGSTRYRNVMDMNAGLGGFAAALESPKSWVMNVIPTINKNTLSVVYERGLIGIYHDWCEGFSTYPRTYDFIHASGVFSLYQHSCKLEDILLETDRILRPEGIVIFRDEVDVLNDVRKIVDGMRWDTKLMDHEDGPLVPEKILVATKQYWVAGDDGNNSPSSSNSEEE

SEQ ID NO: 45236 - DNA, 1986 bp, Arabidopsis thaliana
  misc_feature (1)..(1986): Ceres Seq. ID no. 12560555
  misc_feature (1)..(1986): Ortholog of  Ceres SEQ ID NO 14313943 as cited in SEQ ID NO 54725
  misc_feature (1)..(1986): Ortholog of  Ceres SEQ ID NO 12465428 as cited in SEQ ID NO 68898
ggtgtttgtagtctctctactctctagatcccatcccatttcttgatcagcctcgcgcattgtgtgcttacacgtaatcctctagcttctttcctcggtaatttccagagagattttcaacagaggaagcatgttcgctctttccaaggttttacgaagaacgcagagactccgactgggagcttgttctgctgtgttttcaaaagatatacaattaggaggagaaaggagctttgattccaattcgattgcttctactaaacgtgaagctgtgccaagattttacgagatctcctctttgagtaatcgtgctctttcctccagtgctggcactaaaagtgatcaagaggaagacgacctcgaagacggtttctcagaactggaaggttcaaagtctggccaaggttcaactagtagtgatgaagatgagggaaagctctccgctgatgaagaagaagaagaagaactagacctcattgaaaccgacgttagtagaaaaacagttgaaaagaaacaatctgagctatttaagaccattgtctccgcacccggtctgtctataggtagtgctcttgataaatgggtggaagaaggaaatgagatcactcgagttgagattgctaaggcaatgctccagctgcgcaggcgtcgcatgtatggaagagcgttacagatgtcagaatggttggaagcaaataagaaaattgaaatgactgagagagattatgcttctcggttagatctgacagttaagattcgtggtttagaaaagggagaagcttgtatgcagaagatcccaaaatcttttaaaggggaagtgctttaccgtaccctcttggcgaattgtgttgctgctggcaatgtgaagaaatccgaactggtgtttaacaaaatgaaggacttgggattccctctctctggatttacttgtgatcagatgcttctgctccacaagaggatcgacaggaagaaaattgctgatgtactattgctcatggagaaagaaaatatcaagccaagtcttctcacttacaaaatcctgattgatgtcaaaggtgcaacaaatgacataagtggtatggagcaaattctggagacaatgaaagatgaaggtgttgaactggacttccagacgcaagctctcactgctagacactattcgggagctggccttaaagataaagccgagaaagtcttgaaagagatggaaggtgaaagcttagaggcaaatcgccgggcattcaaagatttgctctccatctatgcctctcttgggagagaagatgaagtgaaaagaatatggaagatctgtgaatcaaagccctactttgaggaatcccttgctgcaatccaagcttttggaaagctcaataaagtgcaagaagcagaggcgatttttgagaagattgtgaagatggacagaagagcttcttctagtacttactccgttctcttgagggtttacgtagatcacaagatgctctcaaagggtaaggatctggttaaacgaatggctgagagcggttgcaggatcgaggcaacgacatgggatgcactcatcaagctctatgtggaagctggagaagttgaaaaggctgattctttgctggacaaggcatcaaaacagagccatacaaaactgatgatgaactccttcatgtatatcatggacgagtactcaaaacggggagatgttcataacacagagaagatattcctaaaaatgagggaagctgggtatacatctcggcttaggcagttccaagccctcatgcaggcttacataaacgccaaatctcctgcatatggaatgcgagatagattgaaggcggataatatctttccaaacaaatccatggctgcacagttggctcaaggtgatccatttaagaagacagctatctctgatattctggattgagtagtctctctccctacacttttcttctatctgcttgcaagaagtatctcatttgtcgtcctaac

SEQ ID NO: 45237 - protein, 596 aa, Arabidopsis thaliana
  peptide (1)..(596): Ceres Seq. ID no. 12560556
MFALSKVLRRTQRLRLGACSAVFSKDIQLGGERSFDSNSIASTKREAVPRFYEISSLSNRALSSSAGTKSDQEEDDLEDGFSELEGSKSGQGSTSSDEDEGKLSADEEEEEELDLIETDVSRKTVEKKQSELFKTIVSAPGLSIGSALDKWVEEGNEITRVEIAKAMLQLRRRRMYGRALQMSEWLEANKKIEMTERDYASRLDLTVKIRGLEKGEACMQKIPKSFKGEVLYRTLLANCVAAGNVKKSELVFNKMKDLGFPLSGFTCDQMLLLHKRIDRKKIADVLLLMEKENIKPSLLTYKILIDVKGATNDISGMEQILETMKDEGVELDFQTQALTARHYSGAGLKDKAEKVLKEMEGESLEANRRAFKDLLSIYASLGREDEVKRIWKICESKPYFEESLAAIQAFGKLNKVQEAEAIFEKIVKMDRRASSSTYSVLLRVYVDHKMLSKGKDLVKRMAESGCRIEATTWDALIKLYVEAGEVEKADSLLDKASKQSHTKLMMNSFMYIMDEYSKRGDVHNTEKIFLKMREAGYTSRLRQFQALMQAYINAKSPAYGMRDRLKADNIFPNKSMAAQLAQGDPFKKTAISDILD

SEQ ID NO: 45238 - protein, 430 aa, Arabidopsis thaliana
  peptide (1)..(430): Ceres Seq. ID no. 12560557
MLQLRRRRMYGRALQMSEWLEANKKIEMTERDYASRLDLTVKIRGLEKGEACMQKIPKSFKGEVLYRTLLANCVAAGNVKKSELVFNKMKDLGFPLSGFTCDQMLLLHKRIDRKKIADVLLLMEKENIKPSLLTYKILIDVKGATNDISGMEQILETMKDEGVELDFQTQALTARHYSGAGLKDKAEKVLKEMEGESLEANRRAFKDLLSIYASLGREDEVKRIWKICESKPYFEESLAAIQAFGKLNKVQEAEAIFEKIVKMDRRASSSTYSVLLRVYVDHKMLSKGKDLVKRMAESGCRIEATTWDALIKLYVEAGEVEKADSLLDKASKQSHTKLMMNSFMYIMDEYSKRGDVHNTEKIFLKMREAGYTSRLRQFQALMQAYINAKSPAYGMRDRLKADNIFPNKSMAAQLAQGDPFKKTAISDILD

SEQ ID NO: 45239 - protein, 422 aa, Arabidopsis thaliana
  peptide (1)..(422): Ceres Seq. ID no. 12560558
MYGRALQMSEWLEANKKIEMTERDYASRLDLTVKIRGLEKGEACMQKIPKSFKGEVLYRTLLANCVAAGNVKKSELVFNKMKDLGFPLSGFTCDQMLLLHKRIDRKKIADVLLLMEKENIKPSLLTYKILIDVKGATNDISGMEQILETMKDEGVELDFQTQALTARHYSGAGLKDKAEKVLKEMEGESLEANRRAFKDLLSIYASLGREDEVKRIWKICESKPYFEESLAAIQAFGKLNKVQEAEAIFEKIVKMDRRASSSTYSVLLRVYVDHKMLSKGKDLVKRMAESGCRIEATTWDALIKLYVEAGEVEKADSLLDKASKQSHTKLMMNSFMYIMDEYSKRGDVHNTEKIFLKMREAGYTSRLRQFQALMQAYINAKSPAYGMRDRLKADNIFPNKSMAAQLAQGDPFKKTAISDILD

SEQ ID NO: 45240 - DNA, 1000 bp, Arabidopsis thaliana
  misc_feature (1)..(1000): Ceres Seq. ID no. 12604056
  misc_feature (1)..(1000): Ortholog of  Ceres SEQ ID NO 14305963 as cited in SEQ ID NO 52290
  misc_feature (1)..(1000): Ortholog of  Ceres SEQ ID NO 14307492 as cited in SEQ ID NO 59504
  misc_feature (1)..(1000): Ortholog of  Ceres SEQ ID NO 13597255 as cited in SEQ ID NO 63874
tctctcctcctaccaagaaatcatcgtcttcttcttcatctattcaggatcgatccggcttgagatttattacaaattcgtccttctatttgctccaaaagttcgacaatttcgtaggggcaaagatggacgctgattccaagagatttctagctacgcttcgatcccgatctgaaatgttaatgggctttgaagaaatagatggagatgatgatttccaggaggagtttgcttgcccgttctgtgcagaatcgtatgatatcatcgggttgtgctgtcacatagatgatgaacatactttagagtcgaagaacgcggtatgccctgtttgttctcttaaagtgggagttgatatcgtagcacacaaacgcttcaccatgggattttacttgcagcgaaagagaaagtcacgaaaaagcggtaccaattcgacactttcacttcttcggaaagaactaagagaaggagatctacaaaggttgttaggatttacttctcgtaatggttctgttgcgtcaagtgtaactcctgatcctctcctgtcgtcatttatctcacctacacgatcacagagttctcctgcgccacgccaaaccaaaaacgtatccgaggataaacagatagagcgcaagagacaagtgttcatctcaccggtctcgttaaaagatcgggaagagaggaggcacaaatcagagtttgttcagaggctcttgtcatcagccattttcgatgaagtctaatgcacatacaaagattgagaacatggaggaactaattcgaatcagacttgagagaatctggtttcgagaaaaacaatggttgggatgagaagaagacggagaagagcgagatgcagctatgttatcaatatctatatctatctatgtattgtgtctgtttggtgctactaaatacattgcgtagaaatgtgttttcttaagtttattaagcaattgaaaagtaagatataggaagaagaataagtcctcttgtctgtagc

SEQ ID NO: 45241 - protein, 245 aa, Arabidopsis thaliana
  peptide (1)..(245): Ceres Seq. ID no. 12604057
SPPTKKSSSSSSSIQDRSGLRFITNSSFYLLQKFDNFVGAKMDADSKRFLATLRSRSEMLMGFEEIDGDDDFQEEFACPFCAESYDIIGLCCHIDDEHTLESKNAVCPVCSLKVGVDIVAHKRFTMGFYLQRKRKSRKSGTNSTLSLLRKELREGDLQRLLGFTSRNGSVASSVTPDPLLSSFISPTRSQSSPAPRQTKNVSEDKQIERKRQVFISPVSLKDREERRHKSEFVQRLLSSAIFDEV

SEQ ID NO: 45242 - protein, 204 aa, Arabidopsis thaliana
  peptide (1)..(204): Ceres Seq. ID no. 12604058
MDADSKRFLATLRSRSEMLMGFEEIDGDDDFQEEFACPFCAESYDIIGLCCHIDDEHTLESKNAVCPVCSLKVGVDIVAHKRFTMGFYLQRKRKSRKSGTNSTLSLLRKELREGDLQRLLGFTSRNGSVASSVTPDPLLSSFISPTRSQSSPAPRQTKNVSEDKQIERKRQVFISPVSLKDREERRHKSEFVQRLLSSAIFDEV

SEQ ID NO: 45243 - protein, 187 aa, Arabidopsis thaliana
  peptide (1)..(187): Ceres Seq. ID no. 12604059
MLMGFEEIDGDDDFQEEFACPFCAESYDIIGLCCHIDDEHTLESKNAVCPVCSLKVGVDIVAHKRFTMGFYLQRKRKSRKSGTNSTLSLLRKELREGDLQRLLGFTSRNGSVASSVTPDPLLSSFISPTRSQSSPAPRQTKNVSEDKQIERKRQVFISPVSLKDREERRHKSEFVQRLLSSAIFDEV

SEQ ID NO: 45244 - DNA, 2301 bp, Arabidopsis thaliana
  misc_feature (1)..(2301): Ceres Seq. ID no. 12560567
  misc_feature (1)..(2301): Ortholog of  Ceres SEQ ID NO 14315434 as cited in SEQ ID NO 58671
atcaaaaacttttacctctcattggtttcttctttatcacactgttacgcttggattctcatttcttcaagttcataacgctcggatcaatcaggaagacgaacttgaactttctttttttcatcattacccaaagctatgaggctcacaccaccaatagctccgccgtcatgaatccttctcttccaggtcaacacaagtcagagctccaaaaatggagtcatgcgattgttttgagacgcatgtgaatcaagatgatctgttagtgaagtaccaatacatctcagatgcgttgattgctcttgcatacttctcaatcccactcgagcttatctatttcgtgcaaaagtctgctttcttcccttacaaatgggtgcttatgcagtttggagcctttatcattctctgtggagctacgcatttcatcaacctatggatgttcttcatgcattccaaagccgttgccattgtcatgactattgctaaagtctcttgcgcggttgtgtcgtgtgctaccgcgttgatgttggttcatattattcctgatcttctcagtgttaagaacagggaattgtttctcaagaagaaagctgatgagttagatagagaaatgggtcttattttaacacaagaggagactggtaggcatgttaggatgcttactcatggaattagaagaactcttgataggcatactattttaagaaccactcttgttgagcttggtaaaactctttgtcttgaggaatgtgcgttgtggatgccttctcaaagtggtttatatttgcagctttctcatactttgagtcataaaatacaagttggaagcagtgtgccgataaatctcccgattattaatgaactcttcaatagcgctcaagctatgcacatacctcattcttgtcctttggctaagattgggcctccggttgggagatattcacctcctgaggttgtttctgtccgtgttcctcttttacatctctctaatttccaaggcagtgactggtcggatctctctggcaaaggttacgctatcatggtcctgattctcccaaccgatggtgcaagaaaatggagagaccatgagttagagcttgtagaaaacgtggcggatcaggtggctgtggctctctcacatgctgcaattttggaagaatccatgcacgctcgtgaccagcttatggagcagaattttgctttagacaaggctcgtcaagaggctgagatggcagtacatgctcgaaatgatttcctagctgttatgaaccacgagatgaggacaccgatgcatgccatcatctctctttcttctcttctccttgagactgagctgtctccagagcaaagagttatgatcgagacaatactgaaaagcagcaatcttgtggctacactaatcagcgacgttctggatctttcgagattggaagatgggagcttactcttggaaaatgaaccattcagtctacaagcgatctttgaagaggtcatctctttgataaagccaatcgcatcagtgaagaaactatcaacgaatctgattctgtctgcagacttaccaacttatgctattggtgatgagaaacgtctgatgcaaacaattcttaacatcatgggcaacgctgtgaaatttactaaggaaggctacatctccataatagcctctatcatgaaacccgagtccttacaagaattaccatctccagaattttttccagttctcagtgacagtcacttctacctatgtgtgcaggtgaaggacacagggtgtggaattcacacacaagacattcctttgctctttaccaaatttgtacagcctcggaccggaactcagaggaaccattccggtggaggactcgggctagctctctgtaaacggtttgtcgggctaatgggaggatacatgtggatagaaagtgaaggcctagagaaaggctgcacagcttcgttcatcatcaggcttggtatctgcaacggtccaagcagtagcagtggttcaatggcgctacatcttgcagctaaatcacaaaccagaccgtggaactggtgatacattacgttggaaagacttgtattgaggtgagactttttaactacacagcagcaagagaaagaagaaaatacatgaccggacggtgtgatctaacttattggattttgttggatgtaatatgtaaaataaaaatcctatatacggggagaggtaccttatctgttctcactatattttattgaacattactttagagaatatgttttggaattcactactaaataaacgatataaatcttcac

SEQ ID NO: 45245 - protein, 613 aa, Arabidopsis thaliana
  peptide (1)..(613): Ceres Seq. ID no. 12560568
MESCDCFETHVNQDDLLVKYQYISDALIALAYFSIPLELIYFVQKSAFFPYKWVLMQFGAFIILCGATHFINLWMFFMHSKAVAIVMTIAKVSCAVVSCATALMLVHIIPDLLSVKNRELFLKKKADELDREMGLILTQEETGRHVRMLTHGIRRTLDRHTILRTTLVELGKTLCLEECALWMPSQSGLYLQLSHTLSHKIQVGSSVPINLPIINELFNSAQAMHIPHSCPLAKIGPPVGRYSPPEVVSVRVPLLHLSNFQGSDWSDLSGKGYAIMVLILPTDGARKWRDHELELVENVADQVAVALSHAAILEESMHARDQLMEQNFALDKARQEAEMAVHARNDFLAVMNHEMRTPMHAIISLSSLLLETELSPEQRVMIETILKSSNLVATLISDVLDLSRLEDGSLLLENEPFSLQAIFEEVISLIKPIASVKKLSTNLILSADLPTYAIGDEKRLMQTILNIMGNAVKFTKEGYISIIASIMKPESLQELPSPEFFPVLSDSHFYLCVQVKDTGCGIHTQDIPLLFTKFVQPRTGTQRNHSGGGLGLALCKRFVGLMGGYMWIESEGLEKGCTASFIIRLGICNGPSSSSGSMALHLAAKSQTRPWNW

SEQ ID NO: 45246 - protein, 558 aa, Arabidopsis thaliana
  peptide (1)..(558): Ceres Seq. ID no. 12560569
MQFGAFIILCGATHFINLWMFFMHSKAVAIVMTIAKVSCAVVSCATALMLVHIIPDLLSVKNRELFLKKKADELDREMGLILTQEETGRHVRMLTHGIRRTLDRHTILRTTLVELGKTLCLEECALWMPSQSGLYLQLSHTLSHKIQVGSSVPINLPIINELFNSAQAMHIPHSCPLAKIGPPVGRYSPPEVVSVRVPLLHLSNFQGSDWSDLSGKGYAIMVLILPTDGARKWRDHELELVENVADQVAVALSHAAILEESMHARDQLMEQNFALDKARQEAEMAVHARNDFLAVMNHEMRTPMHAIISLSSLLLETELSPEQRVMIETILKSSNLVATLISDVLDLSRLEDGSLLLENEPFSLQAIFEEVISLIKPIASVKKLSTNLILSADLPTYAIGDEKRLMQTILNIMGNAVKFTKEGYISIIASIMKPESLQELPSPEFFPVLSDSHFYLCVQVKDTGCGIHTQDIPLLFTKFVQPRTGTQRNHSGGGLGLALCKRFVGLMGGYMWIESEGLEKGCTASFIIRLGICNGPSSSSGSMALHLAAKSQTRPWNW

SEQ ID NO: 45247 - protein, 539 aa, Arabidopsis thaliana
  peptide (1)..(539): Ceres Seq. ID no. 12560570
MFFMHSKAVAIVMTIAKVSCAVVSCATALMLVHIIPDLLSVKNRELFLKKKADELDREMGLILTQEETGRHVRMLTHGIRRTLDRHTILRTTLVELGKTLCLEECALWMPSQSGLYLQLSHTLSHKIQVGSSVPINLPIINELFNSAQAMHIPHSCPLAKIGPPVGRYSPPEVVSVRVPLLHLSNFQGSDWSDLSGKGYAIMVLILPTDGARKWRDHELELVENVADQVAVALSHAAILEESMHARDQLMEQNFALDKARQEAEMAVHARNDFLAVMNHEMRTPMHAIISLSSLLLETELSPEQRVMIETILKSSNLVATLISDVLDLSRLEDGSLLLENEPFSLQAIFEEVISLIKPIASVKKLSTNLILSADLPTYAIGDEKRLMQTILNIMGNAVKFTKEGYISIIASIMKPESLQELPSPEFFPVLSDSHFYLCVQVKDTGCGIHTQDIPLLFTKFVQPRTGTQRNHSGGGLGLALCKRFVGLMGGYMWIESEGLEKGCTASFIIRLGICNGPSSSSGSMALHLAAKSQTRPWNW

SEQ ID NO: 45248 - DNA, 1211 bp, Arabidopsis thaliana; identical to SEQ ID NO: 43816
  misc_feature (1)..(1211): Ceres Seq. ID no. 13576059
  misc_feature (1)..(1211): Ortholog of  Ceres SEQ ID NO 15168549 as cited in SEQ ID NO 56976
  misc_feature (1)..(1211): Ortholog of  Ceres SEQ ID NO 14314335 as cited in SEQ ID NO 57305

SEQ ID NO: 45249 - protein, 289 aa, Arabidopsis thaliana; identical to SEQ ID NO: 43817
  peptide (1)..(289): Ceres Seq. ID no. 13576060

SEQ ID NO: 45250 - protein, 201 aa, Arabidopsis thaliana; identical to SEQ ID NO: 43818
  peptide (1)..(201): Ceres Seq. ID no. 13576061

SEQ ID NO: 45251 - protein, 162 aa, Arabidopsis thaliana; identical to SEQ ID NO: 43819
  peptide (1)..(162): Ceres Seq. ID no. 13576062

SEQ ID NO: 45252 - DNA, 2145 bp, Arabidopsis thaliana
  misc_feature (1)..(2145): Ceres Seq. ID no. 13575983
  misc_feature (1)..(2145): Ortholog of  Ceres SEQ ID NO 13646680 as cited in SEQ ID NO 20737
gacaaagacaagtgttggggtcaccttttgtggtctctgttggatttggtttggactatcttcacgagattatcctcatcttcccgcttcttctctcctttgaatctttcttcgttgttctttcactttcttaaagaggatgtgagattgtttttggtagttagaaaatggatacaccggaaaagagtgaaacccagatcggtactccagtttctaaactcaaagtcgaggattcaccagtgtttagttacatatgcaatctctcaccaattaagactatcaaaccaattccaatcacttgtcctttaagctctctcaattacgcatctccaccttctgttttcacttctcctcacgcggtttctcataaagagtctcgtttcagaagtcaaaaagatgtgtctgcttctaaagaagttggagaagaagaagctttagtcggtagcgaaccggaacaaagctacaagaatgactgcaatactcctagagttaccaatgatgtgaaagacaatggttgtgggaaggatttgcaggtgatgatggacaatgtcaagaagaaaagtgatactccggattgggaaactttgattgctgctacaacagaactgatttatggctcaccgagagagtcagaggcttttagttgcttgttgaagaaaacttcaaactctgaagcacgtctacgtggtagtataactgcaacatcggtggctgttacgaataccgatgtagtcaacaatgaatctgaatctgttgatgctctttcgatattgcaccgtggtgtgagaagacggtgtttagactttgaggttaaggggaataatcagcaaacattaggagaatcttcatctagttgtgtagtacctagcattggtctgcatcttaacaccattgcaatgtcctctaaggacaagaatgttgctaatgagtattcattttccggtaacataaaagtcggtgtgcaaagttctctgactccggtgcttcattcgcagcacgacatcgtgagagaaaatgaaagcgggaaagattcaggacaaattatagaagtggttccaaagtctttagcttcagtagacttgactccaataagccccaagaagaaaaggcgtaagtccgaacaatcaggagaaggcgactcgtcatgtaaacggtgcaactgcaaaaaatccaagtgtttgaagctttactgtgaatgctttgctgctggattttattgcatagagccatgttcatgtataaattgcttcaacaaacctatccataaagatgttgtcctggctactcgcaaacagattgaatcccgcaatccacttgcatttgctcctaaagtcatcagaaactcagattccatcattgaagttggtgaggatgcaagtaaaactccagcttcagcgcgacacaaacgaggctgtaactgcaagaaatcaaactgtctgaagaaatactgtgaatgctatcagggcggagttggttgttctataaactgtagatgtgaaggatgtaaaaatgcatttggcagaaaagatgggtctttgttcgaacaagatgaggagaatgaaacatctggcacacccggaacaaagaaaacacaacagaatgtcgagttgttcaaacctgcagctccaccttcaacaccaattccatttagacaaccactggcgcaacttccaatctcatccaacaacagactgctacctccacagtctcattttcatcatggagctattggatcatcttcctcagggatatacaacatcagaaaaccagacatgagtttgttgtctcattcaagaatcgagacaatcacagaggatattgatgatatgtctgagaatctaatccattctccaataactactctatctcccaacagcaaaagggtttcgttgtctcatcttgattcaccagagtcgactccatggagaagaaatggtggggggaggaatctgatacgttcgttcccaacgtttccttctctcactccacaccattaaaattctttgaatgtcaacttctagttggtagttttaacttacacagacaacatacgcaaacatttacaagtttagtagcagtattgcgttagtttttacaatggttgtgtaataaaaatgttaagtcatttatcaatatcttgacaac

SEQ ID NO: 45253 - protein, 609 aa, Arabidopsis thaliana
  peptide (1)..(609): Ceres Seq. ID no. 13575984
MDTPEKSETQIGTPVSKLKVEDSPVFSYICNLSPIKTIKPIPITCPLSSLNYASPPSVFTSPHAVSHKESRFRSQKDVSASKEVGEEEALVGSEPEQSYKNDCNTPRVTNDVKDNGCGKDLQVMMDNVKKKSDTPDWETLIAATTELIYGSPRESEAFSCLLKKTSNSEARLRGSITATSVAVTNTDVVNNESESVDALSILHRGVRRRCLDFEVKGNNQQTLGESSSSCVVPSIGLHLNTIAMSSKDKNVANEYSFSGNIKVGVQSSLTPVLHSQHDIVRENESGKDSGQIIEVVPKSLASVDLTPISPKKKRRKSEQSGEGDSSCKRCNCKKSKCLKLYCECFAAGFYCIEPCSCINCFNKPIHKDVVLATRKQIESRNPLAFAPKVIRNSDSIIEVGEDASKTPASARHKRGCNCKKSNCLKKYCECYQGGVGCSINCRCEGCKNAFGRKDGSLFEQDEENETSGTPGTKKTQQNVELFKPAAPPSTPIPFRQPLAQLPISSNNRLLPPQSHFHHGAIGSSSSGIYNIRKPDMSLLSHSRIETITEDIDDMSENLIHSPITTLSPNSKRVSLSHLDSPESTPWRRNGGGRNLIRSFPTFPSLTPHH

SEQ ID NO: 45254 - protein, 486 aa, Arabidopsis thaliana
  peptide (1)..(486): Ceres Seq. ID no. 13575985
MMDNVKKKSDTPDWETLIAATTELIYGSPRESEAFSCLLKKTSNSEARLRGSITATSVAVTNTDVVNNESESVDALSILHRGVRRRCLDFEVKGNNQQTLGESSSSCVVPSIGLHLNTIAMSSKDKNVANEYSFSGNIKVGVQSSLTPVLHSQHDIVRENESGKDSGQIIEVVPKSLASVDLTPISPKKKRRKSEQSGEGDSSCKRCNCKKSKCLKLYCECFAAGFYCIEPCSCINCFNKPIHKDVVLATRKQIESRNPLAFAPKVIRNSDSIIEVGEDASKTPASARHKRGCNCKKSNCLKKYCECYQGGVGCSINCRCEGCKNAFGRKDGSLFEQDEENETSGTPGTKKTQQNVELFKPAAPPSTPIPFRQPLAQLPISSNNRLLPPQSHFHHGAIGSSSSGIYNIRKPDMSLLSHSRIETITEDIDDMSENLIHSPITTLSPNSKRVSLSHLDSPESTPWRRNGGGRNLIRSFPTFPSLTPHH

SEQ ID NO: 45255 - protein, 485 aa, Arabidopsis thaliana
  peptide (1)..(485): Ceres Seq. ID no. 13575986
MDNVKKKSDTPDWETLIAATTELIYGSPRESEAFSCLLKKTSNSEARLRGSITATSVAVTNTDVVNNESESVDALSILHRGVRRRCLDFEVKGNNQQTLGESSSSCVVPSIGLHLNTIAMSSKDKNVANEYSFSGNIKVGVQSSLTPVLHSQHDIVRENESGKDSGQIIEVVPKSLASVDLTPISPKKKRRKSEQSGEGDSSCKRCNCKKSKCLKLYCECFAAGFYCIEPCSCINCFNKPIHKDVVLATRKQIESRNPLAFAPKVIRNSDSIIEVGEDASKTPASARHKRGCNCKKSNCLKKYCECYQGGVGCSINCRCEGCKNAFGRKDGSLFEQDEENETSGTPGTKKTQQNVELFKPAAPPSTPIPFRQPLAQLPISSNNRLLPPQSHFHHGAIGSSSSGIYNIRKPDMSLLSHSRIETITEDIDDMSENLIHSPITTLSPNSKRVSLSHLDSPESTPWRRNGGGRNLIRSFPTFPSLTPHH

SEQ ID NO: 45256 - DNA, 2616 bp, Arabidopsis thaliana
  misc_feature (1)..(2616): Ceres Seq. ID no. 12560150
  misc_feature (1)..(2616): Ortholog of  Ceres SEQ ID NO 12383917 as cited in SEQ ID NO 59107
  misc_feature (1)..(2616): Ortholog of  Ceres SEQ ID NO 13623250 as cited in SEQ ID NO 0
gtggcttatggtcgtctccgatttccactctctgggagacagaaaaacctcataatctcaaaaattgttcactgtgtttatcttccttctaaagttctaagaagcttcgattcttaattctgtttatcgatttgaattccttgtttctatttcccaaccgttagctgattgtgctagatccatttttctggtgattgatgcaacttctggagctcgattcttcgttctagtatttgattattcgaagcagagttggtgtgatgaatgctaatgaggagggggagggttcacgttacccaatcactgatcgaaagaccggagagacgaaattcgatagggttgagagtcggacagagaagcatagtgaagaagagaaaactaatggaattactatggatgtgagaaatgggagttcaggtggactgcaaattccattgtcgcaacaaacagcggcaactgtctgttgggaaaggtttcttcatgtgagaaccattagagttctgcttgtcgaaaatgacgactgcactcgttatatcgttactgcacttcttcgcaattgtagctatgaagttgttgaggcgtcaaatgggatacaagcttggaaggtgttagaagatctaaacaatcatattgatattgtgctaacagaggtgatcatgccttacttatctggtatcggtctcttgtgcaagattttgaaccacaaatctcgtcggaacatccctgtcatcatgatgtcatctcatgactcaatggggctggtctttaagtgcttatcgaaaggagctgttgactttcttgttaagccaataagaaaaaatgagcttaagatcctttggcagcatgtttggagaagatgccaaagttctagtggtagtggaagtgagagcggaacgcatcaaactcaaaagtctgtgaaatcgaaaagtattaaaaaatctgatcaagattcaggaagcagtgatgagaatgaaaatgggagcattggcctgaatgctagtgatggaagtagtgatgggagtggcgctcagagctcttggacgaaaaaagctgtggatgttgatgacagtccacgagcggtatctctatgggaccgagttgatagcacttgcgcccaagtggtacattctaaccctgagtttccaagtaatcagttggttgcaccacctgctgagaaggagactcaagaacatgatgataaatttgaagatgtcacaatgggtagagacttggagattagcattcgtagaaactgtgatctggccctggagccaaaagatgaacccctatctaaaactactggcattatgagacaggataattcgtttgaaaagagctctagtaaatggaaaatgaaagttggaaaaggaccattggacctcagtagcgaaagtccttcaagtaaacaaatgcatgaagatggaggctcgagtttcaaagctatgtctagccaccttcaagataacagagaacctgaggcgcctaacactcacttgaaaactttagatacaaatgaagcttctgttaaaatttctgaagagctaatgcacgtggaacatagttcaaagaggcatagaggaactaaagatgatgggacactagttagggatgatcggaatgtgctgaggcgttcagagggctcagctttctcaaggtataatccagcctcaaatgccaataagatttctggtgggaacttaggaagcacttcgcttcaggataataatagtcaggatcttataaaaaagactgaagcagcatatgattgtcactcgaacatgaatgagagtctcccccataatcatcgctcacatgtcggtagcaataactttgatatgagttccacgactgagaacaacgctttcacaaaaccaggagctccaaaagtaagctcagcaggatcttcatcagtgaagcattcatcgtttcagcctttaccctgtgatcatcataataatcatgcctcctataaccttgtccatgtcgctgagaggaagaagctaccgccacaatgtggatcctcaaatgtgtacaacgaaacgattgaaggtaacaacaacacagtgaattacagtgtgaatggaagtgtatcaggtagtggtcatggaagtaatgggccatatggaagcagtaacggtatgaatgctggaggaatgaatatgggaagtgataatggtgctggcaaaaatggaaatggcgatggtagtggaagcggaagtggaagtggtagcggaaacttggcggatgaaaataagatctctcaaagggaagctgctttgacaaagttccgtcagaagagaaaagagaggtgcttccgaaagaaggtacgataccaaagccggaaaaaactagcagaacaacgccctcgagtgcgaggccaatttgtgcgtaaaacagccgctgcaactgatgataacgacataaaaaacattgaggatagctaacggaaaatcaacaaaacccactatttctcagcccaaaaacatgagtaatgtgctcatatctatcttatatatatatatctatcacatgttttaacattttcccttcaaagtctgattctttgataatactactactattcacgaaacaaagacactacgacatttgattgtt

SEQ ID NO: 45257 - protein, 727 aa, Arabidopsis thaliana
  peptide (1)..(727): Ceres Seq. ID no. 12560151
MNANEEGEGSRYPITDRKTGETKFDRVESRTEKHSEEEKTNGITMDVRNGSSGGLQIPLSQQTAATVCWERFLHVRTIRVLLVENDDCTRYIVTALLRNCSYEVVEASNGIQAWKVLEDLNNHIDIVLTEVIMPYLSGIGLLCKILNHKSRRNIPVIMMSSHDSMGLVFKCLSKGAVDFLVKPIRKNELKILWQHVWRRCQSSSGSGSESGTHQTQKSVKSKSIKKSDQDSGSSDENENGSIGLNASDGSSDGSGAQSSWTKKAVDVDDSPRAVSLWDRVDSTCAQVVHSNPEFPSNQLVAPPAEKETQEHDDKFEDVTMGRDLEISIRRNCDLALEPKDEPLSKTTGIMRQDNSFEKSSSKWKMKVGKGPLDLSSESPSSKQMHEDGGSSFKAMSSHLQDNREPEAPNTHLKTLDTNEASVKISEELMHVEHSSKRHRGTKDDGTLVRDDRNVLRRSEGSAFSRYNPASNANKISGGNLGSTSLQDNNSQDLIKKTEAAYDCHSNMNESLPHNHRSHVGSNNFDMSSTTENNAFTKPGAPKVSSAGSSSVKHSSFQPLPCDHHNNHASYNLVHVAERKKLPPQCGSSNVYNETIEGNNNTVNYSVNGSVSGSGHGSNGPYGSSNGMNAGGMNMGSDNGAGKNGNGDGSGSGSGSGSGNLADENKISQREAALTKFRQKRKERCFRKKVRYQSRKKLAEQRPRVRGQFVRKTAAATDDNDIKNIEDS

SEQ ID NO: 45258 - protein, 683 aa, Arabidopsis thaliana
  peptide (1)..(683): Ceres Seq. ID no. 12560152
MDVRNGSSGGLQIPLSQQTAATVCWERFLHVRTIRVLLVENDDCTRYIVTALLRNCSYEVVEASNGIQAWKVLEDLNNHIDIVLTEVIMPYLSGIGLLCKILNHKSRRNIPVIMMSSHDSMGLVFKCLSKGAVDFLVKPIRKNELKILWQHVWRRCQSSSGSGSESGTHQTQKSVKSKSIKKSDQDSGSSDENENGSIGLNASDGSSDGSGAQSSWTKKAVDVDDSPRAVSLWDRVDSTCAQVVHSNPEFPSNQLVAPPAEKETQEHDDKFEDVTMGRDLEISIRRNCDLALEPKDEPLSKTTGIMRQDNSFEKSSSKWKMKVGKGPLDLSSESPSSKQMHEDGGSSFKAMSSHLQDNREPEAPNTHLKTLDTNEASVKISEELMHVEHSSKRHRGTKDDGTLVRDDRNVLRRSEGSAFSRYNPASNANKISGGNLGSTSLQDNNSQDLIKKTEAAYDCHSNMNESLPHNHRSHVGSNNFDMSSTTENNAFTKPGAPKVSSAGSSSVKHSSFQPLPCDHHNNHASYNLVHVAERKKLPPQCGSSNVYNETIEGNNNTVNYSVNGSVSGSGHGSNGPYGSSNGMNAGGMNMGSDNGAGKNGNGDGSGSGSGSGSGNLADENKISQREAALTKFRQKRKERCFRKKVRYQSRKKLAEQRPRVRGQFVRKTAAATDDNDIKNIEDS

SEQ ID NO: 45259 - protein, 595 aa, Arabidopsis thaliana
  peptide (1)..(595): Ceres Seq. ID no. 12560153
MPYLSGIGLLCKILNHKSRRNIPVIMMSSHDSMGLVFKCLSKGAVDFLVKPIRKNELKILWQHVWRRCQSSSGSGSESGTHQTQKSVKSKSIKKSDQDSGSSDENENGSIGLNASDGSSDGSGAQSSWTKKAVDVDDSPRAVSLWDRVDSTCAQVVHSNPEFPSNQLVAPPAEKETQEHDDKFEDVTMGRDLEISIRRNCDLALEPKDEPLSKTTGIMRQDNSFEKSSSKWKMKVGKGPLDLSSESPSSKQMHEDGGSSFKAMSSHLQDNREPEAPNTHLKTLDTNEASVKISEELMHVEHSSKRHRGTKDDGTLVRDDRNVLRRSEGSAFSRYNPASNANKISGGNLGSTSLQDNNSQDLIKKTEAAYDCHSNMNESLPHNHRSHVGSNNFDMSSTTENNAFTKPGAPKVSSAGSSSVKHSSFQPLPCDHHNNHASYNLVHVAERKKLPPQCGSSNVYNETIEGNNNTVNYSVNGSVSGSGHGSNGPYGSSNGMNAGGMNMGSDNGAGKNGNGDGSGSGSGSGSGNLADENKISQREAALTKFRQKRKERCFRKKVRYQSRKKLAEQRPRVRGQFVRKTAAATDDNDIKNIEDS

SEQ ID NO: 45260 - DNA, 1878 bp, Arabidopsis thaliana; identical to SEQ ID NO: 30703
  misc_feature (1)..(1878): Ceres Seq. ID no. 12639121
  misc_feature (1)..(1878): Ortholog of  Ceres SEQ ID NO 13504578 as cited in SEQ ID NO 59850

SEQ ID NO: 45261 - protein, 505 aa, Arabidopsis thaliana; identical to SEQ ID NO: 30704
  peptide (1)..(505): Ceres Seq. ID no. 12639122

SEQ ID NO: 45262 - protein, 482 aa, Arabidopsis thaliana; identical to SEQ ID NO: 30705
  peptide (1)..(482): Ceres Seq. ID no. 12639123

SEQ ID NO: 45263 - protein, 318 aa, Arabidopsis thaliana; identical to SEQ ID NO: 30706
  peptide (1)..(318): Ceres Seq. ID no. 12639124

SEQ ID NO: 45264 - DNA, 2406 bp, Arabidopsis thaliana
  misc_feature (1)..(2406): Ceres Seq. ID no. 12560579
  misc_feature (1)..(2406): Ortholog of  Ceres SEQ ID NO 15169092 as cited in SEQ ID NO 60430
  misc_feature (1)..(2406): Ortholog of  Ceres SEQ ID NO 14303680 as cited in SEQ ID NO 66019
  misc_feature (1)..(2406): Ortholog of  Ceres SEQ ID NO 15224940 as cited in SEQ ID NO 0
aatcactcatcatcatctctctctctcaacccaaaacctttttacttcatcgtaacggctctatttctcttctctcttctctctacacacagaaatatctcgatctaggtttctaaaattggattctctatctcaaacgctaatcgaagatttttctctgaatcgtcttcttaaatctactctcgcgaagtttcagngacagattcaatcaaacttcaaaatcatcatcgggtctggaaaatctacgagaaatctcccgtttcaggcttaagcatttgcgaaatggcaagtgttcaaaaagatccgattcttcaagtagagacaacttgtggatctcttttattcgaactccagattatttgggatgaagttggagaaacagaaactgatagagatcaaatgttgcttgagcttgaacgtgaatgtttggaagtttatagaagaaaagttgatcaagctaatcgatgtagagctcagcttagacaagcaatagctgatgctgaagcacaattagctgcaatttgttctgctatgggagagcgtcctgtgcatattagacagtctgatcaaagcgttgggagcttgaagcaagagcttgggaggattcttcctgaactggaagagatgcaaaagaggaaagttgaaagaagaaaccagttcattgttgtcatggagcaaatagatagtattactaatgatattaaaggtcaaggagaacttgttcattccgaacctcttatcgatgagactaacttgtctatgagaaagcttgaagagttacactgccagctgcaagtacttcagaaggagaagattgatcgtgtggagacgattcggaagcacctgtgtactctgtattcccattgttcagtacttggaatggattttaatgaggttgttggccaagtgaatcccacattgagtgatccagaaggaccaagaagtttaagtgatcatacaattgagaaattgggggctgcagttcagaagctgatggaggtcaagatacagagaatgcagaggcttcaagatctagcaacaaccatgttggagctctggaatttgatggatacacccatagaagagcagcaagagtatcagcatattacctgcaatatagctgcatcagaacatgaaataactgaagccaatagtctctctgaagacttcattaaatacgttgaggcagaagttgtccgattggacgaggtaaaagcaagcaaaatgaaagaacttgtgttgaagaaaaggtcagaactagaggagatatgtaggaaaacccacttgttgccagtgtcagacagtgctatagatcagactatcgtggcgatagaatctggtattgtggatgctacaatggtcctggagcatcttgagcaacatatatctaagatcaaagaggaagcactaagccgaaaagagatacttgaaagggttgagaaatggttatctgcctgcgatgaagaaagttggcttgaagaatacaacagggatgataaccgatacaatgctgggcgtggagctcatcttactctcaagcgcgctgaaaaagctcgtaatcttgttaccaagctcccaggtatggttgaagcactggcctcgaagacaatagtttgggaacaagaaaacgggattgaatttctctatgatggtatccgtctcctttctatgcttgaggagtataacatactcaggcaggaaagagaagaagaacaccgtcggcaacgggatcagaaaaagcttcaaggacagctcatagcagaacaagaggcactttacgggtccaaacccagcccatctaaaccccttggtggtaaaaaggctccaagaatgtcgaccggtggtgcatctaacagaagactttccttaggagcagcaatgcatcagactcctaagcctaacaagaaagcagatcaccgacataatgatggagctttatcaaatggaagaagagggcttgacattgcaggactaccctcaaggaaacaatcaatgaatccttctgaaatgttgcaatccccattagttcgcaaaccgttttcccccatatcgaccacggtggttgcatcaaaggccaacatagcaacaacaacaacacaacaacttccgaaaaacaacgcagtgaatgagatctcatcatttgcaactcctatcaagaacaacaacattctcaggaacttggaagaagagaagatgatgactatgatgatgcaaacaccgaaaaatgttgctgcaatgattccaatcccgtcgacaccagcaacagtctctgtcccaatgcacaccgcaccaacaccattcaccaacaatgcaagattgatgtctgaaaagcctgaagttgttgagtactcgtttgaggaacgaagactcgccttcatgctacagtctgaatgtcgtttggtttga

SEQ ID NO: 45265 - protein, 707 aa, Arabidopsis thaliana
  peptide (1)..(707): Ceres Seq. ID no. 12560580
MASVQKDPILQVETTCGSLLFELQIIWDEVGETETDRDQMLLELERECLEVYRRKVDQANRCRAQLRQAIADAEAQLAAICSAMGERPVHIRQSDQSVGSLKQELGRILPELEEMQKRKVERRNQFIVVMEQIDSITNDIKGQGELVHSEPLIDETNLSMRKLEELHCQLQVLQKEKIDRVETIRKHLCTLYSHCSVLGMDFNEVVGQVNPTLSDPEGPRSLSDHTIEKLGAAVQKLMEVKIQRMQRLQDLATTMLELWNLMDTPIEEQQEYQHITCNIAASEHEITEANSLSEDFIKYVEAEVVRLDEVKASKMKELVLKKRSELEEICRKTHLLPVSDSAIDQTIVAIESGIVDATMVLEHLEQHISKIKEEALSRKEILERVEKWLSACDEESWLEEYNRDDNRYNAGRGAHLTLKRAEKARNLVTKLPGMVEALASKTIVWEQENGIEFLYDGIRLLSMLEEYNILRQEREEEHRRQRDQKKLQGQLIAEQEALYGSKPSPSKPLGGKKAPRMSTGGASNRRLSLGAAMHQTPKPNKKADHRHNDGALSNGRRGLDIAGLPSRKQSMNPSEMLQSPLVRKPFSPISTTVVASKANIATTTTQQLPKNNAVNEISSFATPIKNNNILRNLEEEKMMTMMMQTPKNVAAMIPIPSTPATVSVPMHTAPTPFTNNARLMSEKPEVVEYSFEERRLAFMLQSECRLV

SEQ ID NO: 45266 - protein, 668 aa, Arabidopsis thaliana
  peptide (1)..(668): Ceres Seq. ID no. 12560581
MLLELERECLEVYRRKVDQANRCRAQLRQAIADAEAQLAAICSAMGERPVHIRQSDQSVGSLKQELGRILPELEEMQKRKVERRNQFIVVMEQIDSITNDIKGQGELVHSEPLIDETNLSMRKLEELHCQLQVLQKEKIDRVETIRKHLCTLYSHCSVLGMDFNEVVGQVNPTLSDPEGPRSLSDHTIEKLGAAVQKLMEVKIQRMQRLQDLATTMLELWNLMDTPIEEQQEYQHITCNIAASEHEITEANSLSEDFIKYVEAEVVRLDEVKASKMKELVLKKRSELEEICRKTHLLPVSDSAIDQTIVAIESGIVDATMVLEHLEQHISKIKEEALSRKEILERVEKWLSACDEESWLEEYNRDDNRYNAGRGAHLTLKRAEKARNLVTKLPGMVEALASKTIVWEQENGIEFLYDGIRLLSMLEEYNILRQEREEEHRRQRDQKKLQGQLIAEQEALYGSKPSPSKPLGGKKAPRMSTGGASNRRLSLGAAMHQTPKPNKKADHRHNDGALSNGRRGLDIAGLPSRKQSMNPSEMLQSPLVRKPFSPISTTVVASKANIATTTTQQLPKNNAVNEISSFATPIKNNNILRNLEEEKMMTMMMQTPKNVAAMIPIPSTPATVSVPMHTAPTPFTNNARLMSEKPEVVEYSFEERRLAFMLQSECRLV

SEQ ID NO: 45267 - protein, 624 aa, Arabidopsis thaliana
  peptide (1)..(624): Ceres Seq. ID no. 12560582
MGERPVHIRQSDQSVGSLKQELGRILPELEEMQKRKVERRNQFIVVMEQIDSITNDIKGQGELVHSEPLIDETNLSMRKLEELHCQLQVLQKEKIDRVETIRKHLCTLYSHCSVLGMDFNEVVGQVNPTLSDPEGPRSLSDHTIEKLGAAVQKLMEVKIQRMQRLQDLATTMLELWNLMDTPIEEQQEYQHITCNIAASEHEITEANSLSEDFIKYVEAEVVRLDEVKASKMKELVLKKRSELEEICRKTHLLPVSDSAIDQTIVAIESGIVDATMVLEHLEQHISKIKEEALSRKEILERVEKWLSACDEESWLEEYNRDDNRYNAGRGAHLTLKRAEKARNLVTKLPGMVEALASKTIVWEQENGIEFLYDGIRLLSMLEEYNILRQEREEEHRRQRDQKKLQGQLIAEQEALYGSKPSPSKPLGGKKAPRMSTGGASNRRLSLGAAMHQTPKPNKKADHRHNDGALSNGRRGLDIAGLPSRKQSMNPSEMLQSPLVRKPFSPISTTVVASKANIATTTTQQLPKNNAVNEISSFATPIKNNNILRNLEEEKMMTMMMQTPKNVAAMIPIPSTPATVSVPMHTAPTPFTNNARLMSEKPEVVEYSFEERRLAFMLQSECRLV

SEQ ID NO: 45268 - DNA, 3164 bp, Arabidopsis thaliana
  misc_feature (1)..(3164): Ceres Seq. ID no. 13575987
  misc_feature (1)..(3164): Ortholog of  Ceres SEQ ID NO 15170741 as cited in SEQ ID NO 58530
tctctcgcttctctttctctatccaatcggaaagagatcaaccaacgatagaggagaagaagaacttgcatacgcaaaaaaactttcccgggaaaattccagaaactgctttggaaaaatgtgcgagcccgatgataattccgctagaaacggcgtcactactcaaccttcgaggtcaagggagcttctaatggatgttgacgacttagatcttgacggttcatggccactagatcaaatcccttacttatcctcatcgaatcgcatgatttctccgatttttgtctcctcttcctctgagcagccttgctcgcctctctgggctttctccgacggtggaggaaatggttttcaccacgcaacctccggtggcgatgatgagaagatcagctctgtctccggtgttccttctttccgtctcgccgagtatcctctcttcctcccttactcttctccatcagcagctgagaacacaacagagaagcataacagtttccagtttccgtctccattgatgagcctagtcccaccagagaacacagacaactactgtgtgatcaaagagaggatgactcaggcgcttcgatacttcaaagaatcaaccgaacaacacgttttggctcaggtctgggctcctgtgagaaagaatggtcgtgatttgctgacgactttgggtcaaccttttgttcttaatcctaatggtaatgggcttaatcaatacaggatgatctctctcacatatatgttttctgtggatagtgaaagtgacgtagagctcggactcccgggtcgagttttccgtcagaaattgcctgaatggactccaaatgttcagtactattccagcaaagaattctcgcggcttgatcacgccttgcactacaacgtgcgtggtacactggccttgcctgtctttaatccctctggtcagtcctgcataggtgttgtggaacttataatgacctcagagaagattcactatgcacccgaagtggacaaagtttgcaaagcccttgaggcggtaaatctgaaaagctcggaaatacttgatcaccaaacaacacagatatgcaatgagagtcgccaaaacgcgcttgctgagattctcgaagtgctgacagttgtatgtgagacccataacttgcctctcgctcagacttgggttccatgtcagcatgggagcgttcttgccaatggtggcggtctaaagaaaaactgcaccagctttgacggtagctgcatgggtcaaatctgcatgtctacaaccgacatggcctgctatgtcgtggatgctcatgtctggggctttagagatgcctgtcttgaacaccatctccagaaaggccagggagtcgctggacgagcttttctcaatggtggctcatgtttctgcagagacatcaccaagttctgcaaaacgcagtacccactagtccattatgcgctcatgttcaagttgaccacttgttttgcaatatctctccagagctcttacacgggcgacgacagttacattcttgaattttttcttccttcgagtataacagacgaccaagagcaagatttgctgttgggttctattttggtgacaatgaaagaacattttcagagtctgagggttgcatctggggttgactttggtgaagatgacgacaaattgtctttcgagatcatccaagcattaccggacaagaaggttcattcaaaaatagaatccattcgagttcccttttctggttttaagtcaaatgcaacagagacgatgttgattcctcagcctgtggttcagtcttctgatccagtaaatgagaaaatcaacgtggccactgttaacggtgtggttaaggagaagaagaaaacagagaaaaagcgtgggaagactgagaaaacaatcagtctagatgtacttcagcagtatttcactggaagtctcaaagacgctgcaaagagcctaggagtttgcccgacgacaatgaagcgaatttgcaggcaacacggaatctcgcggtggccatcgaggaagatcaagaaagtgaatcgttcaatcacaaagctgaaacgagtcatcgaatctgttcaaggtactgatggaggcctcgacctgacttccatggccgttagttccatcccttggacacacggtcaaacatcagcacagccactaaactcacccaatggttccaaaccacctgagctaccaaacaccaataattcacctaaccattggtcaagtgatcacagtccgaacgagccaaatggttcgcctgagttaccaccaagcaatggtcacaagcgatcacgaacggtggatgagagcgctgggactccaacctctcatggctcatgtgacggtaaccaattagatgaaccgaaagtcccaaatcaagatccgctcttcacggttggtggatcacccgggctcctttttccaccttattctagagatcatgatgtatctgcagcttccttcgcaatgccgaacaggcttcttggttctatagaccatttccgaggaatgctcattgaagacgctggaagttcaaaagatctgagaaatctctgccccactgcagcatttgacgataagtttcaagacacaaactggatgaacaatgataataatagcaacaacaacttatacgctcccccaaaggaagaggccattgcaaatgttgcatgcgaaccatcaggctcagaaatgagaacggtaacaatcaaagcaagttacaaagacgacataatacggttcagaatatcctcgggttcaggtataatggaattgaaggatgaagtggctaagaggctgaaagttgatgcaggaacgttcgatatcaagtatcttgacgatgataacgaatgggttttaatagcttgtgatgctgatcttcaagaatgtctcgagatccctagatcctcccgcacgaaaatcgtaaggctcttagttcatgatgtaacgacaaatctagggagctcctgcgagagcactggagaattgtgacctgataattcattcgaactcttttgtaaatatgttttttgaattttattattgtttagggtttctttggacaaattaaagttgtaaaagaaacatttgtttgtaacttttaactgtaaaagtgtaagagagagagaggttagaagtaaattttagttgtaacttc

SEQ ID NO: 45269 - protein, 998 aa, Arabidopsis thaliana
  peptide (1)..(998): Ceres Seq. ID no. 13575988
LSLLFLYPIGKRSTNDRGEEELAYAKKLSRENSRNCFGKMCEPDDNSARNGVTTQPSRSRELLMDVDDLDLDGSWPLDQIPYLSSSNRMISPIFVSSSSEQPCSPLWAFSDGGGNGFHHATSGGDDEKISSVSGVPSFRLAEYPLFLPYSSPSAAENTTEKHNSFQFPSPLMSLVPPENTDNYCVIKERMTQALRYFKESTEQHVLAQVWAPVRKNGRDLLTTLGQPFVLNPNGNGLNQYRMISLTYMFSVDSESDVELGLPGRVFRQKLPEWTPNVQYYSSKEFSRLDHALHYNVRGTLALPVFNPSGQSCIGVVELIMTSEKIHYAPEVDKVCKALEAVNLKSSEILDHQTTQICNESRQNALAEILEVLTVVCETHNLPLAQTWVPCQHGSVLANGGGLKKNCTSFDGSCMGQICMSTTDMACYVVDAHVWGFRDACLEHHLQKGQGVAGRAFLNGGSCFCRDITKFCKTQYPLVHYALMFKLTTCFAISLQSSYTGDDSYILEFFLPSSITDDQEQDLLLGSILVTMKEHFQSLRVASGVDFGEDDDKLSFEIIQALPDKKVHSKIESIRVPFSGFKSNATETMLIPQPVVQSSDPVNEKINVATVNGVVKEKKKTEKKRGKTEKTISLDVLQQYFTGSLKDAAKSLGVCPTTMKRICRQHGISRWPSRKIKKVNRSITKLKRVIESVQGTDGGLDLTSMAVSSIPWTHGQTSAQPLNSPNGSKPPELPNTNNSPNHWSSDHSPNEPNGSPELPPSNGHKRSRTVDESAGTPTSHGSCDGNQLDEPKVPNQDPLFTVGGSPGLLFPPYSRDHDVSAASFAMPNRLLGSIDHFRGMLIEDAGSSKDLRNLCPTAAFDDKFQDTNWMNNDNNSNNNLYAPPKEEAIANVACEPSGSEMRTVTIKASYKDDIIRFRISSGSGIMELKDEVAKRLKVDAGTFDIKYLDDDNEWVLIACDADLQECLEIPRSSRTKIVRLLVHDVTTNLGSSCESTGEL

SEQ ID NO: 45270 - protein, 959 aa, Arabidopsis thaliana
  peptide (1)..(959): Ceres Seq. ID no. 13575989
MCEPDDNSARNGVTTQPSRSRELLMDVDDLDLDGSWPLDQIPYLSSSNRMISPIFVSSSSEQPCSPLWAFSDGGGNGFHHATSGGDDEKISSVSGVPSFRLAEYPLFLPYSSPSAAENTTEKHNSFQFPSPLMSLVPPENTDNYCVIKERMTQALRYFKESTEQHVLAQVWAPVRKNGRDLLTTLGQPFVLNPNGNGLNQYRMISLTYMFSVDSESDVELGLPGRVFRQKLPEWTPNVQYYSSKEFSRLDHALHYNVRGTLALPVFNPSGQSCIGVVELIMTSEKIHYAPEVDKVCKALEAVNLKSSEILDHQTTQICNESRQNALAEILEVLTVVCETHNLPLAQTWVPCQHGSVLANGGGLKKNCTSFDGSCMGQICMSTTDMACYVVDAHVWGFRDACLEHHLQKGQGVAGRAFLNGGSCFCRDITKFCKTQYPLVHYALMFKLTTCFAISLQSSYTGDDSYILEFFLPSSITDDQEQDLLLGSILVTMKEHFQSLRVASGVDFGEDDDKLSFEIIQALPDKKVHSKIESIRVPFSGFKSNATETMLIPQPVVQSSDPVNEKINVATVNGVVKEKKKTEKKRGKTEKTISLDVLQQYFTGSLKDAAKSLGVCPTTMKRICRQHGISRWPSRKIKKVNRSITKLKRVIESVQGTDGGLDLTSMAVSSIPWTHGQTSAQPLNSPNGSKPPELPNTNNSPNHWSSDHSPNEPNGSPELPPSNGHKRSRTVDESAGTPTSHGSCDGNQLDEPKVPNQDPLFTVGGSPGLLFPPYSRDHDVSAASFAMPNRLLGSIDHFRGMLIEDAGSSKDLRNLCPTAAFDDKFQDTNWMNNDNNSNNNLYAPPKEEAIANVACEPSGSEMRTVTIKASYKDDIIRFRISSGSGIMELKDEVAKRLKVDAGTFDIKYLDDDNEWVLIACDADLQECLEIPRSSRTKIVRLLVHDVTTNLGSSCESTGEL

SEQ ID NO: 45271 - protein, 935 aa, Arabidopsis thaliana
  peptide (1)..(935): Ceres Seq. ID no. 13575990
MDVDDLDLDGSWPLDQIPYLSSSNRMISPIFVSSSSEQPCSPLWAFSDGGGNGFHHATSGGDDEKISSVSGVPSFRLAEYPLFLPYSSPSAAENTTEKHNSFQFPSPLMSLVPPENTDNYCVIKERMTQALRYFKESTEQHVLAQVWAPVRKNGRDLLTTLGQPFVLNPNGNGLNQYRMISLTYMFSVDSESDVELGLPGRVFRQKLPEWTPNVQYYSSKEFSRLDHALHYNVRGTLALPVFNPSGQSCIGVVELIMTSEKIHYAPEVDKVCKALEAVNLKSSEILDHQTTQICNESRQNALAEILEVLTVVCETHNLPLAQTWVPCQHGSVLANGGGLKKNCTSFDGSCMGQICMSTTDMACYVVDAHVWGFRDACLEHHLQKGQGVAGRAFLNGGSCFCRDITKFCKTQYPLVHYALMFKLTTCFAISLQSSYTGDDSYILEFFLPSSITDDQEQDLLLGSILVTMKEHFQSLRVASGVDFGEDDDKLSFEIIQALPDKKVHSKIESIRVPFSGFKSNATETMLIPQPVVQSSDPVNEKINVATVNGVVKEKKKTEKKRGKTEKTISLDVLQQYFTGSLKDAAKSLGVCPTTMKRICRQHGISRWPSRKIKKVNRSITKLKRVIESVQGTDGGLDLTSMAVSSIPWTHGQTSAQPLNSPNGSKPPELPNTNNSPNHWSSDHSPNEPNGSPELPPSNGHKRSRTVDESAGTPTSHGSCDGNQLDEPKVPNQDPLFTVGGSPGLLFPPYSRDHDVSAASFAMPNRLLGSIDHFRGMLIEDAGSSKDLRNLCPTAAFDDKFQDTNWMNNDNNSNNNLYAPPKEEAIANVACEPSGSEMRTVTIKASYKDDIIRFRISSGSGIMELKDEVAKRLKVDAGTFDIKYLDDDNEWVLIACDADLQECLEIPRSSRTKIVRLLVHDVTTNLGSSCESTGEL

SEQ ID NO: 45272 - DNA, 8061 bp, Arabidopsis thaliana
  misc_feature (1)..(8061): Ceres Seq. ID no. 13575991
  misc_feature (1)..(8061): Ortholog of  Ceres SEQ ID NO 15178464 as cited in SEQ ID NO 67743
atggttgtttctgtctttgcatttcagatgagcagcaggcgatcagtgaagagatcattggttcttgatgatgatgacgatgaggatatattctacaacttcaaggtccttctacctaatggcactagtgtgaaactcacactgaaaaacccagaaccggagatctcgatgcagtcttttgtcaacttggtgaagaaggagtatgataatgcacgaaaagattgtcttttgatgtctaagaggatgaaggttgattggaactcaggcggaaagtttcatctggagtcaaatggtgggaagatgaaaggcattgttcgctttgctgcgtttaagcctgacttgtgccacataatacgtcttgatgacggttctggtatagcttccaccatgtatgagaacttgtgggatttgacaccggatactgacctacttaaagagctaccagaaaattatagctttgagacagctctcgcggatctaatagacaattccttgcaagctgtgtggccttatcgtgaaggagctcgaaaactgattagtgtggatatatctggtgaccatattacagtctttgataccgggagaggaatggacagtagcgaaggaaactctattgataaatggtttgattttttggtgaacattcttcacatttggtttaaattatgcaggggtaaaataggggcctcactacatagatctcaaaaaaccggtgccattggaggcaatccaccataccttaagccatattttgggatgtttggatacggaggtccttatgcttctatgttcttgggaaggtgcgacttcagcttctgtttacccatacttatctgcattgtcttgttacgtctaactctcttctctgtcaggcgtactttggtgtcttctaagacaaaagagtccaagaaagtgttcactttgcaattcaagaaagaagcattgattgacaatcggtctatcgtgggaaaaaactggaagactgatggtggcatgagggacccgtcggaggaggaaatgaagttatcccctcatggaagctttacaaaggtcgagatatttgaatcagaatttgacatctcaaagatctatcaactccagtgcaggctcaaggatatttactttccttacatccagttttgccttgcgaccattttcttgtgtgatgaactctccaaaactgggaggactgaaaggcctgtggcgtttcagattcgattcactcttttcggtgggaaaagaaaagggacagctcaagaggcaaatgctcgcctcaagtttgtttattttccaatcgtccagggaaaagaaagcattgagaaaattttgcagagtttagaagaggaaggatgcaaagtttctgaaagcttccagacttttggccgtgtttcattaagaaggcttggtcgcttacttccagaagtccgttggaaaagctgccgaagagtaaaatgctttgttgatttggatgctggttttagcccaacgccctccaaaactgaccttgcaagccaaaatcctttctcagtggctttaagaaactttggtagtaagtcgacggagaaagagaaggatgatgatgtcaatattgtgattcatagagaaggaaaatctgtcagctatgcgcatctggaggaaaaatatcaagaatgggttttggagatgcataatacccatgatgaagaagctgcatcgggtctagatgaagctgtcctcattgttggatccttggataaaaaggcccttggcattttgcgtgatgctgtgagggtgcataaggaagttaggagaaaagaaaaaacatggaaacgtggtcagaatataaagattctgagaggagcttatgctgggattcacaataacaatgtgtatgccaccattgactatttcctaatagaagggtttgaggacgaagcaggcggggatactcggattttatgcaggcctatcgatcgccctgagaacgagggatgcaagctttcaatcatcgatggaatttcgaaactggaagttcagagttctttatctttaccgatcactataatcgactctggaaagtgccttcctgtagatgcgaacgaatggaatagaaaacttgataagcaacaggaaaaagcaccgtcaaaaattgatttgctggatgaaagagattgcagagaattgaagattgatggggaactacccattggcaattctgtgcgtgctgggaaagctcctccgaaacagattgttgcagttgtccgacctgcatgcttcacgtctttaactccgtcaaagaagttggaccagaaaaatatcgttaagatggatggggaagaaatggtcatggtagtaaaattgaaatcaagtgataagaatatatcttcgcagcgcttgtttcctacatcccgtaaagggattagtggtctttacatcttctcacttgggtccaagtttccaaaccttttcaagaaagctggcacctacaatttttctttctccattggcaattcgattaagtgcaacaaaacggtggttgttagaccttcttctaaggcagcaaggtgggaacttgacgataatctggagtcccttccgtgcaatgttcgggtgggttcttctcttccacctttccgtatcgcttgctttgataagtacaaaaacaagattccgttcacttctgttccaagtctggaagttgaattggaagctagccctggattcttaatcaaaattgacaaacttgagaccaacctgataaatgatggattaattcttaaaatcgagaatatgctcgttgagactgatgagttagaccagatccgacctaattatgaagcaacgttagagatacgtgcaatggacaatcctttttctgtctcggttccttgtaaagttaatcccgggcctctgaaacgagttgctgtgaataatcccaaggctctggaaaatttgcttccagattctactgtcgaagattttatcctggagttgttcgatggatataataaccatgttgccgaggggaccgatgttctgatacatattgatggttatcgtattgaagactggatgggcatcaaccgtaaggttgatagtcgtggctgcattaatctatctggcattcttaaggtcacagaaggctatgggaaatctgtatcactctctgtaatgtctggtaatgaagttatcttctgtaaagagtcacaaattgatgaacgacagctaagacttgtaaccgagctgcccgactgctgtactgctggtacaaatctcatgaacctcatcttccaagtgacggagttagatggttctttggatactagcatccatcatgacgaaaaatcaggttgtttccatacaatgagcattgaatctgattcaagcagcgttgaaagtgcaatcagatatgcctttgtccacgggtcctgcaaagtttcttctctctccctacctgagaacgagggtgtcttttcttgcagggtgttccattctcgatatcccgagctgcagatgagcataaagattcaggtaacatctgctcccacatctgaaagagaggagagtggatattctacaccccattcaaaaacgactccaccacctgaatcagggattccttcaatcacaaatccatggccgactccatgttcacagtttggagtattggccattaggtcatcatcattggctctcagtagcgaaactagcctgatggatatggcacagtacactgaggctcaacgtgaacatgctgagcaagagtgtagtagactgcaagcttctctggaacctcttggtgcaccgtttccagaatgcctatccaccaaagaatcaatgatgaagcaaatcgaagagaagcatcatgacactgcagcatcagtgttctgttgtctgtacagaaaggctccacctccacggtctctgtttctgtcacagaaaggaatgtttggcgttgtagcgcttctaggttcagttgcctccacgtcgctaagcagggttttgtctgaatatttggggaaagacacaatgctttctttggtgtgcaaatcatcacagtttggacccaaaagcgatgagtatcgcaagtttcaatctgaagcagctagcctcggacgatctatcaccaatcggtttcttgttatttgtcttgatgcaactagaccttggaggaacggacttgtgaggaatgatcctcagaagagattagccatggataacccttacctgccgaatggagatcctatacccggtttcaaaggctacgctgtgaacatgatagatttagcttcagaggagctggatatacaatcaagctcgggttacgggcttagagagacactattctatggagttttcagagagttgcaggtatatgagaccgcagagcatcttgaagcagctcttcctcacatcaatggtggagacgctgtgtctctagatggtgtgatcgccagagaaaacggtttcatatactctggttgctgtacaccggaagttcattttccaataaccgtaacggagaggcaagagaaggcattggtgcaactggaaataacaagagacaagaagagaaagactgaggagatgatgactgaggagaatcgttcgttgcgcagtcggggtttggtggattactcaaacagaaatcagtcttcaaattctaagatgagtaataagagatcggtcgggagagtattgagtctagatgatgatgaagcagaagataagttttacaggctcaaggttcttttaccaaacagcacaagtgtgacactcgcacttaccaaccctgaacctagaatgtcaatgaataattttgttaacttggtgaaagaggaatatgagaaaagcctgaacaaatgtgtattgtccggtaagaagaggaagcgggttgattggaatttggctgtcaaatattatctcgagtttaacggcgaaaagattaaagaaatcgttcgatttgacaagtttaagcctgatttgtgcaatgtactccgtcttgatatttgtaagacggcgcgtacagagaacccgagccagagtgaagagtacaatccttcggaagaacaagtgttgcttggagatgataatgaagaaactaagcaaatttcaatggattctgaagaggaaactgaaccattacgacccttgaaaatgtactttagcccctccgattatttgaagccattcaagataggaacaaagtgttatattcatcaagtggtgaatattttggagagtcatctttcaagtgaggagaagaaatggttttgggagcatccacagttcaaacatttcttccatatgcatacggattcaaatcacaaggtaatggccatgtggatgcttcttcttcgcaccgcttgtgttgataagaagaaggaatgttggtttgttgtcaacggtgttccaatccgctattctcttcaagaacttgcactcatctctggtttatactgccattcttatccaaaaaactataaagcatttggcagcttagggttctctggtaagcattttggtgttggtgcaacagtaacatatgcgaaagtgaagacaaaactactctcaatgaagaaatcttcgagagagcgtttgaaaatggcggtcctattcttcttatgcagcgtcatcattgggaagagaaaaacaggggaaaaagcagaggctgtggaagatttctttcttaaatccgtggaagatctagaatggtgtaaaacattcccatggggtcgattagcatttgataagaatatgaaagacatttttcatctcatggaccactttgatgaagaattgggcgcagcatgggtgtttcctagcttcgtgatgcagcttctagcgtttgagaccatcccaaatctaatgaacaactttagaaaacatgttagagaagcagatcctgagtgtcctaggatgtgcaagatgaagttcaaacctagtagtatgaaaggctttcctatttcggagttgtatgatactcttggtacaacaaaggaaattaagagtatcatgcttccatctcctagtgaaaaagaacttttgaagcaaatcatggatgatgaggttggacatgatgatgtggatgatatgattgttgatggttggacgaagcgtataattaaggaaaataagccaatatgttttgaagagcttcatatccaagatgttagtagccgtgagattgaggcaaatccaaagaatgcgaatgttgttggggtaagagttggtcggaaaaaggtggctctgaagaaggtgagtgaaaaaggaattgttgagcagctacagaagcagttggaagatggtttaaacagaatatatatgaagattgatgacatggatacaagacttacatatgtggaatcatgtgtgaagaatctaaaagaagctaaagatactaaaggtgagaaggaagatggagagaaagagaaagagttggaagagaatgacttggaagaagatgagactgaaacagataaagagaaagagaaagaagatgagtcaagtgagaagagaagcaaggtggagaggatgtacgggagaaagagaacacgcacaacaacggcaaaagaacaagaagaaaaaggagaagaaattcaagtcggttttcaagaaacaagtgaaagaggcagaaaaaaggcaaagttgacatggaagaaagtggatattaagggtgtaactgcggatcagggaaactcgattactactaacgaaagggtggttgttgaaccgtcttcgaaagtgggaagttggaaacttgcttctaatctcaagtccacgcggcagtataatgttcaggtgggttcttcacttcctccttgctctatctcttgcgttgatgaaccattttctgtctcagtttcttgtaaaggttctactgttcaaaattatatcttggaggtgttcgatggatataataaccatgttgcagaaggtaccaatgttctgatatgtattgagggctattgtatcaatgactcgatgggcttaaaccaaaaggttaatagttgtggctgcattgatctgtctggaatactccaagtcacggctggctatgggaaaactatatctctctcggttatgtctggtattgatgagatcttcaagaaagagtctcagactgagagacgagagctcatgctcttaacaaagctgcctgaatgctgtgttgctggttcaaatcttacaaacctcatttttaaagtgacggattcagatggtgttatggatactagtatccatcatgatgaaaaatctggatgtttccatacaatgagcattgaaactgattcaagcagcgatgagagtgaaatcagatatgcctttgtccatggttcctgcaaagttcctactctttctctacctgagagggagggtgtcttttctttcaaggttttccattctcgatttcccgagcttcatctgagcttaaagattcagcttacacctgctcaaatacttcaaagagatgagacatcttattcaaggatgggtttaacacctaaatcaaagatggcttcaaccacatattcaccggctctcagtagccaaactggcccgagcctgagggatgtggcacagttcactgagagctttaaagaaaatcttattggatacagtgaacacagagtggaaatagatgagcgcctacattgtttggaagctgaacaaaaccaggctaaggaagagttgcgtaccttgcaagttgcctccacctcccttagcagggtgttatctgaatatttgggagaagacatgttgctcgctttggtatgcaaatcggcacaaattggacctaataatgctgagtttctcaggcttcagtccaatcatcggtttcatgttctatgtcttgatgcaatcagaccttggaaggatggacttttggagaacgatcctcagaagaaattagccatggatgacccaaagctgcccgatggagatcccataccgggtttcaagggctatgccgtgaacatgattgatttggctccagaggagctcactgttcaaacttactcaggatacgggcttagagagactttgttctataatctctttgggaatttacaggtatag

SEQ ID NO: 45273 - protein, 2686 aa, Arabidopsis thaliana
  peptide (1)..(2686): Ceres Seq. ID no. 13575992
MVVSVFAFQMSSRRSVKRSLVLDDDDDEDIFYNFKVLLPNGTSVKLTLKNPEPEISMQSFVNLVKKEYDNARKDCLLMSKRMKVDWNSGGKFHLESNGGKMKGIVRFAAFKPDLCHIIRLDDGSGIASTMYENLWDLTPDTDLLKELPENYSFETALADLIDNSLQAVWPYREGARKLISVDISGDHITVFDTGRGMDSSEGNSIDKWFDFLVNILHIWFKLCRGKIGASLHRSQKTGAIGGNPPYLKPYFGMFGYGGPYASMFLGRCDFSFCLPILICIVLLRLTLFSVRRTLVSSKTKESKKVFTLQFKKEALIDNRSIVGKNWKTDGGMRDPSEEEMKLSPHGSFTKVEIFESEFDISKIYQLQCRLKDIYFPYIQFCLATIFLCDELSKTGRTERPVAFQIRFTLFGGKRKGTAQEANARLKFVYFPIVQGKESIEKILQSLEEEGCKVSESFQTFGRVSLRRLGRLLPEVRWKSCRRVKCFVDLDAGFSPTPSKTDLASQNPFSVALRNFGSKSTEKEKDDDVNIVIHREGKSVSYAHLEEKYQEWVLEMHNTHDEEAASGLDEAVLIVGSLDKKALGILRDAVRVHKEVRRKEKTWKRGQNIKILRGAYAGIHNNNVYATIDYFLIEGFEDEAGGDTRILCRPIDRPENEGCKLSIIDGISKLEVQSSLSLPITIIDSGKCLPVDANEWNRKLDKQQEKAPSKIDLLDERDCRELKIDGELPIGNSVRAGKAPPKQIVAVVRPACFTSLTPSKKLDQKNIVKMDGEEMVMVVKLKSSDKNISSQRLFPTSRKGISGLYIFSLGSKFPNLFKKAGTYNFSFSIGNSIKCNKTVVVRPSSKAARWELDDNLESLPCNVRVGSSLPPFRIACFDKYKNKIPFTSVPSLEVELEASPGFLIKIDKLETNLINDGLILKIENMLVETDELDQIRPNYEATLEIRAMDNPFSVSVPCKVNPGPLKRVAVNNPKALENLLPDSTVEDFILELFDGYNNHVAEGTDVLIHIDGYRIEDWMGINRKVDSRGCINLSGILKVTEGYGKSVSLSVMSGNEVIFCKESQIDERQLRLVTELPDCCTAGTNLMNLIFQVTELDGSLDTSIHHDEKSGCFHTMSIESDSSSVESAIRYAFVHGSCKVSSLSLPENEGVFSCRVFHSRYPELQMSIKIQVTSAPTSEREESGYSTPHSKTTPPPESGIPSITNPWPTPCSQFGVLAIRSSSLALSSETSLMDMAQYTEAQREHAEQECSRLQASLEPLGAPFPECLSTKESMMKQIEEKHHDTAASVFCCLYRKAPPPRSLFLSQKGMFGVVALLGSVASTSLSRVLSEYLGKDTMLSLVCKSSQFGPKSDEYRKFQSEAASLGRSITNRFLVICLDATRPWRNGLVRNDPQKRLAMDNPYLPNGDPIPGFKGYAVNMIDLASEELDIQSSSGYGLRETLFYGVFRELQVYETAEHLEAALPHINGGDAVSLDGVIARENGFIYSGCCTPEVHFPITVTERQEKALVQLEITRDKKRKTEEMMTEENRSLRSRGLVDYSNRNQSSNSKMSNKRSVGRVLSLDDDEAEDKFYRLKVLLPNSTSVTLALTNPEPRMSMNNFVNLVKEEYEKSLNKCVLSGKKRKRVDWNLAVKYYLEFNGEKIKEIVRFDKFKPDLCNVLRLDICKTARTENPSQSEEYNPSEEQVLLGDDNEETKQISMDSEEETEPLRPLKMYFSPSDYLKPFKIGTKCYIHQVVNILESHLSSEEKKWFWEHPQFKHFFHMHTDSNHKVMAMWMLLLRTACVDKKKECWFVVNGVPIRYSLQELALISGLYCHSYPKNYKAFGSLGFSGKHFGVGATVTYAKVKTKLLSMKKSSRERLKMAVLFFLCSVIIGKRKTGEKAEAVEDFFLKSVEDLEWCKTFPWGRLAFDKNMKDIFHLMDHFDEELGAAWVFPSFVMQLLAFETIPNLMNNFRKHVREADPECPRMCKMKFKPSSMKGFPISELYDTLGTTKEIKSIMLPSPSEKELLKQIMDDEVGHDDVDDMIVDGWTKRIIKENKPICFEELHIQDVSSREIEANPKNANVVGVRVGRKKVALKKVSEKGIVEQLQKQLEDGLNRIYMKIDDMDTRLTYVESCVKNLKEAKDTKGEKEDGEKEKELEENDLEEDETETDKEKEKEDESSEKRSKVERMYGRKRTRTTTAKEQEEKGEEIQVGFQETSERGRKKAKLTWKKVDIKGVTADQGNSITTNERVVVEPSSKVGSWKLASNLKSTRQYNVQVGSSLPPCSISCVDEPFSVSVSCKGSTVQNYILEVFDGYNNHVAEGTNVLICIEGYCINDSMGLNQKVNSCGCIDLSGILQVTAGYGKTISLSVMSGIDEIFKKESQTERRELMLLTKLPECCVAGSNLTNLIFKVTDSDGVMDTSIHHDEKSGCFHTMSIETDSSSDESEIRYAFVHGSCKVPTLSLPEREGVFSFKVFHSRFPELHLSLKIQLTPAQILQRDETSYSRMGLTPKSKMASTTYSPALSSQTGPSLRDVAQFTESFKENLIGYSEHRVEIDERLHCLEAEQNQAKEELRTLQVASTSLSRVLSEYLGEDMLLALVCKSAQIGPNNAEFLRLQSNHRFHVLCLDAIRPWKDGLLENDPQKKLAMDDPKLPDGDPIPGFKGYAVNMIDLAPEELTVQTYSGYGLRETLFYNLFGNLQV

SEQ ID NO: 45274 - protein, 2677 aa, Arabidopsis thaliana
  peptide (1)..(2677): Ceres Seq. ID no. 13575993
MSSRRSVKRSLVLDDDDDEDIFYNFKVLLPNGTSVKLTLKNPEPEISMQSFVNLVKKEYDNARKDCLLMSKRMKVDWNSGGKFHLESNGGKMKGIVRFAAFKPDLCHIIRLDDGSGIASTMYENLWDLTPDTDLLKELPENYSFETALADLIDNSLQAVWPYREGARKLISVDISGDHITVFDTGRGMDSSEGNSIDKWFDFLVNILHIWFKLCRGKIGASLHRSQKTGAIGGNPPYLKPYFGMFGYGGPYASMFLGRCDFSFCLPILICIVLLRLTLFSVRRTLVSSKTKESKKVFTLQFKKEALIDNRSIVGKNWKTDGGMRDPSEEEMKLSPHGSFTKVEIFESEFDISKIYQLQCRLKDIYFPYIQFCLATIFLCDELSKTGRTERPVAFQIRFTLFGGKRKGTAQEANARLKFVYFPIVQGKESIEKILQSLEEEGCKVSESFQTFGRVSLRRLGRLLPEVRWKSCRRVKCFVDLDAGFSPTPSKTDLASQNPFSVALRNFGSKSTEKEKDDDVNIVIHREGKSVSYAHLEEKYQEWVLEMHNTHDEEAASGLDEAVLIVGSLDKKALGILRDAVRVHKEVRRKEKTWKRGQNIKILRGAYAGIHNNNVYATIDYFLIEGFEDEAGGDTRILCRPIDRPENEGCKLSIIDGISKLEVQSSLSLPITIIDSGKCLPVDANEWNRKLDKQQEKAPSKIDLLDERDCRELKIDGELPIGNSVRAGKAPPKQIVAVVRPACFTSLTPSKKLDQKNIVKMDGEEMVMVVKLKSSDKNISSQRLFPTSRKGISGLYIFSLGSKFPNLFKKAGTYNFSFSIGNSIKCNKTVVVRPSSKAARWELDDNLESLPCNVRVGSSLPPFRIACFDKYKNKIPFTSVPSLEVELEASPGFLIKIDKLETNLINDGLILKIENMLVETDELDQIRPNYEATLEIRAMDNPFSVSVPCKVNPGPLKRVAVNNPKALENLLPDSTVEDFILELFDGYNNHVAEGTDVLIHIDGYRIEDWMGINRKVDSRGCINLSGILKVTEGYGKSVSLSVMSGNEVIFCKESQIDERQLRLVTELPDCCTAGTNLMNLIFQVTELDGSLDTSIHHDEKSGCFHTMSIESDSSSVESAIRYAFVHGSCKVSSLSLPENEGVFSCRVFHSRYPELQMSIKIQVTSAPTSEREESGYSTPHSKTTPPPESGIPSITNPWPTPCSQFGVLAIRSSSLALSSETSLMDMAQYTEAQREHAEQECSRLQASLEPLGAPFPECLSTKESMMKQIEEKHHDTAASVFCCLYRKAPPPRSLFLSQKGMFGVVALLGSVASTSLSRVLSEYLGKDTMLSLVCKSSQFGPKSDEYRKFQSEAASLGRSITNRFLVICLDATRPWRNGLVRNDPQKRLAMDNPYLPNGDPIPGFKGYAVNMIDLASEELDIQSSSGYGLRETLFYGVFRELQVYETAEHLEAALPHINGGDAVSLDGVIARENGFIYSGCCTPEVHFPITVTERQEKALVQLEITRDKKRKTEEMMTEENRSLRSRGLVDYSNRNQSSNSKMSNKRSVGRVLSLDDDEAEDKFYRLKVLLPNSTSVTLALTNPEPRMSMNNFVNLVKEEYEKSLNKCVLSGKKRKRVDWNLAVKYYLEFNGEKIKEIVRFDKFKPDLCNVLRLDICKTARTENPSQSEEYNPSEEQVLLGDDNEETKQISMDSEEETEPLRPLKMYFSPSDYLKPFKIGTKCYIHQVVNILESHLSSEEKKWFWEHPQFKHFFHMHTDSNHKVMAMWMLLLRTACVDKKKECWFVVNGVPIRYSLQELALISGLYCHSYPKNYKAFGSLGFSGKHFGVGATVTYAKVKTKLLSMKKSSRERLKMAVLFFLCSVIIGKRKTGEKAEAVEDFFLKSVEDLEWCKTFPWGRLAFDKNMKDIFHLMDHFDEELGAAWVFPSFVMQLLAFETIPNLMNNFRKHVREADPECPRMCKMKFKPSSMKGFPISELYDTLGTTKEIKSIMLPSPSEKELLKQIMDDEVGHDDVDDMIVDGWTKRIIKENKPICFEELHIQDVSSREIEANPKNANVVGVRVGRKKVALKKVSEKGIVEQLQKQLEDGLNRIYMKIDDMDTRLTYVESCVKNLKEAKDTKGEKEDGEKEKELEENDLEEDETETDKEKEKEDESSEKRSKVERMYGRKRTRTTTAKEQEEKGEEIQVGFQETSERGRKKAKLTWKKVDIKGVTADQGNSITTNERVVVEPSSKVGSWKLASNLKSTRQYNVQVGSSLPPCSISCVDEPFSVSVSCKGSTVQNYILEVFDGYNNHVAEGTNVLICIEGYCINDSMGLNQKVNSCGCIDLSGILQVTAGYGKTISLSVMSGIDEIFKKESQTERRELMLLTKLPECCVAGSNLTNLIFKVTDSDGVMDTSIHHDEKSGCFHTMSIETDSSSDESEIRYAFVHGSCKVPTLSLPEREGVFSFKVFHSRFPELHLSLKIQLTPAQILQRDETSYSRMGLTPKSKMASTTYSPALSSQTGPSLRDVAQFTESFKENLIGYSEHRVEIDERLHCLEAEQNQAKEELRTLQVASTSLSRVLSEYLGEDMLLALVCKSAQIGPNNAEFLRLQSNHRFHVLCLDAIRPWKDGLLENDPQKKLAMDDPKLPDGDPIPGFKGYAVNMIDLAPEELTVQTYSGYGLRETLFYNLFGNLQV

SEQ ID NO: 45275 - protein, 2630 aa, Arabidopsis thaliana
  peptide (1)..(2630): Ceres Seq. ID no. 13575994
MQSFVNLVKKEYDNARKDCLLMSKRMKVDWNSGGKFHLESNGGKMKGIVRFAAFKPDLCHIIRLDDGSGIASTMYENLWDLTPDTDLLKELPENYSFETALADLIDNSLQAVWPYREGARKLISVDISGDHITVFDTGRGMDSSEGNSIDKWFDFLVNILHIWFKLCRGKIGASLHRSQKTGAIGGNPPYLKPYFGMFGYGGPYASMFLGRCDFSFCLPILICIVLLRLTLFSVRRTLVSSKTKESKKVFTLQFKKEALIDNRSIVGKNWKTDGGMRDPSEEEMKLSPHGSFTKVEIFESEFDISKIYQLQCRLKDIYFPYIQFCLATIFLCDELSKTGRTERPVAFQIRFTLFGGKRKGTAQEANARLKFVYFPIVQGKESIEKILQSLEEEGCKVSESFQTFGRVSLRRLGRLLPEVRWKSCRRVKCFVDLDAGFSPTPSKTDLASQNPFSVALRNFGSKSTEKEKDDDVNIVIHREGKSVSYAHLEEKYQEWVLEMHNTHDEEAASGLDEAVLIVGSLDKKALGILRDAVRVHKEVRRKEKTWKRGQNIKILRGAYAGIHNNNVYATIDYFLIEGFEDEAGGDTRILCRPIDRPENEGCKLSIIDGISKLEVQSSLSLPITIIDSGKCLPVDANEWNRKLDKQQEKAPSKIDLLDERDCRELKIDGELPIGNSVRAGKAPPKQIVAVVRPACFTSLTPSKKLDQKNIVKMDGEEMVMVVKLKSSDKNISSQRLFPTSRKGISGLYIFSLGSKFPNLFKKAGTYNFSFSIGNSIKCNKTVVVRPSSKAARWELDDNLESLPCNVRVGSSLPPFRIACFDKYKNKIPFTSVPSLEVELEASPGFLIKIDKLETNLINDGLILKIENMLVETDELDQIRPNYEATLEIRAMDNPFSVSVPCKVNPGPLKRVAVNNPKALENLLPDSTVEDFILELFDGYNNHVAEGTDVLIHIDGYRIEDWMGINRKVDSRGCINLSGILKVTEGYGKSVSLSVMSGNEVIFCKESQIDERQLRLVTELPDCCTAGTNLMNLIFQVTELDGSLDTSIHHDEKSGCFHTMSIESDSSSVESAIRYAFVHGSCKVSSLSLPENEGVFSCRVFHSRYPELQMSIKIQVTSAPTSEREESGYSTPHSKTTPPPESGIPSITNPWPTPCSQFGVLAIRSSSLALSSETSLMDMAQYTEAQREHAEQECSRLQASLEPLGAPFPECLSTKESMMKQIEEKHHDTAASVFCCLYRKAPPPRSLFLSQKGMFGVVALLGSVASTSLSRVLSEYLGKDTMLSLVCKSSQFGPKSDEYRKFQSEAASLGRSITNRFLVICLDATRPWRNGLVRNDPQKRLAMDNPYLPNGDPIPGFKGYAVNMIDLASEELDIQSSSGYGLRETLFYGVFRELQVYETAEHLEAALPHINGGDAVSLDGVIARENGFIYSGCCTPEVHFPITVTERQEKALVQLEITRDKKRKTEEMMTEENRSLRSRGLVDYSNRNQSSNSKMSNKRSVGRVLSLDDDEAEDKFYRLKVLLPNSTSVTLALTNPEPRMSMNNFVNLVKEEYEKSLNKCVLSGKKRKRVDWNLAVKYYLEFNGEKIKEIVRFDKFKPDLCNVLRLDICKTARTENPSQSEEYNPSEEQVLLGDDNEETKQISMDSEEETEPLRPLKMYFSPSDYLKPFKIGTKCYIHQVVNILESHLSSEEKKWFWEHPQFKHFFHMHTDSNHKVMAMWMLLLRTACVDKKKECWFVVNGVPIRYSLQELALISGLYCHSYPKNYKAFGSLGFSGKHFGVGATVTYAKVKTKLLSMKKSSRERLKMAVLFFLCSVIIGKRKTGEKAEAVEDFFLKSVEDLEWCKTFPWGRLAFDKNMKDIFHLMDHFDEELGAAWVFPSFVMQLLAFETIPNLMNNFRKHVREADPECPRMCKMKFKPSSMKGFPISELYDTLGTTKEIKSIMLPSPSEKELLKQIMDDEVGHDDVDDMIVDGWTKRIIKENKPICFEELHIQDVSSREIEANPKNANVVGVRVGRKKVALKKVSEKGIVEQLQKQLEDGLNRIYMKIDDMDTRLTYVESCVKNLKEAKDTKGEKEDGEKEKELEENDLEEDETETDKEKEKEDESSEKRSKVERMYGRKRTRTTTAKEQEEKGEEIQVGFQETSERGRKKAKLTWKKVDIKGVTADQGNSITTNERVVVEPSSKVGSWKLASNLKSTRQYNVQVGSSLPPCSISCVDEPFSVSVSCKGSTVQNYILEVFDGYNNHVAEGTNVLICIEGYCINDSMGLNQKVNSCGCIDLSGILQVTAGYGKTISLSVMSGIDEIFKKESQTERRELMLLTKLPECCVAGSNLTNLIFKVTDSDGVMDTSIHHDEKSGCFHTMSIETDSSSDESEIRYAFVHGSCKVPTLSLPEREGVFSFKVFHSRFPELHLSLKIQLTPAQILQRDETSYSRMGLTPKSKMASTTYSPALSSQTGPSLRDVAQFTESFKENLIGYSEHRVEIDERLHCLEAEQNQAKEELRTLQVASTSLSRVLSEYLGEDMLLALVCKSAQIGPNNAEFLRLQSNHRFHVLCLDAIRPWKDGLLENDPQKKLAMDDPKLPDGDPIPGFKGYAVNMIDLAPEELTVQTYSGYGLRETLFYNLFGNLQV

SEQ ID NO: 45276 - DNA, 1203 bp, Arabidopsis thaliana
  misc_feature (1)..(1203): Ceres Seq. ID no. 12560595
  misc_feature (1)..(1203): Ortholog of  Ceres SEQ ID NO 12608143 as cited in SEQ ID NO 59963
aatttcccccaaatcaaagcttttgacctaaatccgtttcccgggaaaaataaatcaacaaaccatcaccggaatcttcaatatctctccggtgaagaaaaaatgtcgcacaacgatacgattccgctttatcaatcatctcaatcagacattgacgagattgagaatatgatgaacgacagttttcaatcaggtcccggaaccgtgcttcctgctcgaccaccgagtccgatccgtccgtcgattcccgtttcatcctcaccgttcgttcaatccaatctcccaccgcttccaccgtcgtcttcctcctccactcagaaggtgatgcctgttccagctcctccaccacttccgtcagcaggtaacgaaggtaacaagagtattggaggtagcggattcggatctccgccaaatacattgacggagcctgtttgggatactgtgaagcgtgatctgtcacggatcgtgagtaatttgaagcttgtggtgtttcctaatccgtatagggaagatcctgggaaagcacttagggattgggatctatggggaccttttttcttcattgtgttcttggggcttactctttcgtggtctgcttccgttaagaagtctgaagtatttgccgtggcatttgcactacttgcagctggggcagtgatcctcacactaaatgtgctgcttctgggaggacatataatctttttccaaagcctaagccttctaggctactgtctatttccgctagacgttggagcagtgatctgcatgttgaaagacaatgtgatactgaagatggtcgttgtgtctgtgactcttgcctggagctcttgggctgcttatcctttcatgagcgccgcagtgaacccgagaagaaaagctctcgcactctacccggtcttcctcatgtatgtctctgttggcttcttaatcattgccattaattgattctatccggaaaaatgggaaatcagagataggttctttgattcagtttgggaagtcatttggtacagagtagatagagaattctccagccgcgaactattctgagttctaatgagatcatatgtataatatgttctttgacgcttttttgttaaactcccctgtggattttactcttctatatggttttgctttgtgtatgaaacttacggttcttttttggaaacgtatatataatatcaagaccttgatgctcgt

SEQ ID NO: 45277 - protein, 314 aa, Arabidopsis thaliana
  peptide (1)..(314): Ceres Seq. ID no. 12560596
NFPQIKAFDLNPFPGKNKSTNHHRNLQYLSGEEKMSHNDTIPLYQSSQSDIDEIENMMNDSFQSGPGTVLPARPPSPIRPSIPVSSSPFVQSNLPPLPPSSSSSTQKVMPVPAPPPLPSAGNEGNKSIGGSGFGSPPNTLTEPVWDTVKRDLSRIVSNLKLVVFPNPYREDPGKALRDWDLWGPFFFIVFLGLTLSWSASVKKSEVFAVAFALLAAGAVILTLNVLLLGGHIIFFQSLSLLGYCLFPLDVGAVICMLKDNVILKMVVVSVTLAWSSWAAYPFMSAAVNPRRKALALYPVFLMYVSVGFLIIAIN

SEQ ID NO: 45278 - protein, 280 aa, Arabidopsis thaliana
  peptide (1)..(280): Ceres Seq. ID no. 12560597
MSHNDTIPLYQSSQSDIDEIENMMNDSFQSGPGTVLPARPPSPIRPSIPVSSSPFVQSNLPPLPPSSSSSTQKVMPVPAPPPLPSAGNEGNKSIGGSGFGSPPNTLTEPVWDTVKRDLSRIVSNLKLVVFPNPYREDPGKALRDWDLWGPFFFIVFLGLTLSWSASVKKSEVFAVAFALLAAGAVILTLNVLLLGGHIIFFQSLSLLGYCLFPLDVGAVICMLKDNVILKMVVVSVTLAWSSWAAYPFMSAAVNPRRKALALYPVFLMYVSVGFLIIAIN

SEQ ID NO: 45279 - protein, 258 aa, Arabidopsis thaliana
  peptide (1)..(258): Ceres Seq. ID no. 12560598
MMNDSFQSGPGTVLPARPPSPIRPSIPVSSSPFVQSNLPPLPPSSSSSTQKVMPVPAPPPLPSAGNEGNKSIGGSGFGSPPNTLTEPVWDTVKRDLSRIVSNLKLVVFPNPYREDPGKALRDWDLWGPFFFIVFLGLTLSWSASVKKSEVFAVAFALLAAGAVILTLNVLLLGGHIIFFQSLSLLGYCLFPLDVGAVICMLKDNVILKMVVVSVTLAWSSWAAYPFMSAAVNPRRKALALYPVFLMYVSVGFLIIAIN

SEQ ID NO: 45280 - DNA, 1855 bp, Arabidopsis thaliana; identical to SEQ ID NO: 36353
  misc_feature (1)..(1855): Ceres Seq. ID no. 13575995
  misc_feature (1)..(1855): Ortholog of  Ceres SEQ ID NO 14313463 as cited in SEQ ID NO 64209

SEQ ID NO: 45281 - protein, 463 aa, Arabidopsis thaliana; identical to SEQ ID NO: 36354
  peptide (1)..(463): Ceres Seq. ID no. 13575996

SEQ ID NO: 45282 - protein, 441 aa, Arabidopsis thaliana; identical to SEQ ID NO: 36355
  peptide (1)..(441): Ceres Seq. ID no. 13575997

SEQ ID NO: 45283 - protein, 431 aa, Arabidopsis thaliana; identical to SEQ ID NO: 36356
  peptide (1)..(431): Ceres Seq. ID no. 13575998

SEQ ID NO: 45284 - DNA, 2256 bp, Arabidopsis thaliana; identical to SEQ ID NO: 22038
  misc_feature (1)..(2256): Ceres Seq. ID no. 13646318
  misc_feature (1)..(2256): Ortholog of  Ceres SEQ ID NO 14303276 as cited in SEQ ID NO 1264
  misc_feature (1)..(2256): Ortholog of  Ceres SEQ ID NO 15170536 as cited in SEQ ID NO 52791
  misc_feature (1)..(2256): Ortholog of  Ceres SEQ ID NO 15171813 as cited in SEQ ID NO 57309
  misc_feature (1)..(2256): Ortholog of  Ceres SEQ ID NO 14314378 as cited in SEQ ID NO 57601
  misc_feature (1)..(2256): Ortholog of  Ceres SEQ ID NO 12465083 as cited in SEQ ID NO 68239

SEQ ID NO: 45285 - protein, 651 aa, Arabidopsis thaliana; identical to SEQ ID NO: 22039
  peptide (1)..(651): Ceres Seq. ID no. 13646319

SEQ ID NO: 45286 - protein, 588 aa, Arabidopsis thaliana; identical to SEQ ID NO: 22040
  peptide (1)..(588): Ceres Seq. ID no. 13646320

SEQ ID NO: 45287 - protein, 562 aa, Arabidopsis thaliana; identical to SEQ ID NO: 22041
  peptide (1)..(562): Ceres Seq. ID no. 13646321

SEQ ID NO: 45288 - DNA, 2528 bp, Arabidopsis thaliana
  misc_feature (1)..(2528): Ceres Seq. ID no. 13576003
  misc_feature (1)..(2528): Ortholog of  Ceres SEQ ID NO 13600310 as cited in SEQ ID NO 5086
  misc_feature (1)..(2528): Ortholog of  Ceres SEQ ID NO 15172491 as cited in SEQ ID NO 58719
gaacttgtggagagagaaaagggttagatacagagagatagcgaaagagaagaagaagaagaggtctatcgacagagcaaacttcgtcaagagatccgttaaaaggatccatttggagctccgattcgagctagagtcaataatgagcggaagacagagatctgttgcagcggcggtgcatcaccagaggcagctctccgataaccctctcgatatgtcttcatccaatggcagatggcttcaatccactggtcttcagcattttcagtcatccgccaatgattatggatactatgctggtgggcaaggaggtggtggtcaagcagcaagaggataccagaatgctcagagaggaaacgagttctttggggaaccaactactcctcaatacggtgctcgtcctaccaaccaaaggaagaacaatgatgaatctgagtttagtcctgggctcttagatctgcattcttttgatactgagcttcttcctgagattccagtctctaaccaattggatggtccctcacttttcaatcctagtcaaggtcaaagctttgatgactttgaagcttacaacaagcagcctaaccgtagtcgcgtgttggctgaaaacttggctgctgagaaggagaggatgaatgctgttgcaaagattaaagtcgttgtgcgtaagcgaccacttaacaaaaaggagtcgacaaaaaacgaggaagatattgttgacacccatgccaattgcttaacagttcatgaaactaaacttaaggtcgacttaacagcttatgttgaaaagcatgaatttgtgtttgatgccgtgctagatgaggaagtatcaaatgatgaggtatatcgtgagactgtggagcctgtagtccccctaatttttcagcgcatcaaagccacttgctttgcatatgggcaaacaggtagtggtaaaacctatactatgaagcctttgcctcttaaggcttcaagggacatcctgcggttgatgcaccacacatacagaaatcaagggtttcagttgtttgtcagcttctttgagatttatggaggaaagctatatgatctcctcagtgagaggaagaagctgtgcatgagagaggatggtaagcagcaagtgtgcatcgttggtttacaagagtacagagtatctgatacagatgctattatggagcttattgagagaggaagtgcaacaagaagtactggaaccactggtgcaaatgaagaatcctctcgttcacatgctatactacagctcgcgataaaaaaatcagtagagggaaatcagtcaaagccccctcgccttgttggcaagctttctttcattgatcttgctggaagtgaacgtggtgcagatacaacagacaatgacaagcagacaagattggaaggagcagagatcaataagagcttactcgccttaaaggaatgcattagagctctggataatgaccaaggtcatatcccttttagaggcagtaagttaactgaagttctcagggactccttcatgggaaattctcgtactgtaatgatatcgtgcatatctccaagctctggatcatgtgagcacaccctgaacaccctaagatatgcggacagggttaagagtctctcaaagggaaacgcctctaagaaagatgtatcttcttcgaccatgaacttaagggagtccacgaaaattcctttgtcttctgcacttccaactccatctaactttgatgatgacgtgaatgagatgtggactgaagagaacgatgaatttgatgcatcggattatgagcaagataaacaaatgtggaagaaaaacgggaagctagagccatcctataacggtatggcacaggagagaatcccgaaacctactattcagatgaagtcacgagacatgccaaggcccgatatgaagaagtcaaactctgatgacaatctaaatgcgcttctgcaggaagaagaagaccttgtgaatgcacaccgtaaacaagttgaggataccatgaacatagtgaaagaggagatgaacttgctggttgaggcagaccaacccggaaaccagctagatggttacatttcaagactgaacacaattctatctcagaaggctgcaggtatactccaactacagaaccgtcttgctcatttccagaaacgccttagagagcacaatgtattagtctctaccactgggtactgacctataaccactctctcgagtaaataccggtcctccttttatcgacctcgtttcgggttttgcacttgtgccccctactggcttggactggagatcagaagtgtatctgtttacagcctacagagaactttacagcaaagggttatggatgattacagagtttctcatacgtaaaaggatatgatatgcgttctgttcttgccgctgcacttgaattctatcagattcttgtaatggatttgttgcagaagatgaaatacctatgtaatattgcatttgtgctattaatgagcttgccttctattcaataccatactaagttttgcgtacc

SEQ ID NO: 45289 - protein, 731 aa, Arabidopsis thaliana
  peptide (1)..(731): Ceres Seq. ID no. 13576004
NLWREKRVRYREIAKEKKKKRSIDRANFVKRSVKRIHLELRFELESIMSGRQRSVAAAVHHQRQLSDNPLDMSSSNGRWLQSTGLQHFQSSANDYGYYAGGQGGGGQAARGYQNAQRGNEFFGEPTTPQYGARPTNQRKNNDESEFSPGLLDLHSFDTELLPEIPVSNQLDGPSLFNPSQGQSFDDFEAYNKQPNRSRVLAENLAAEKERMNAVAKIKVVVRKRPLNKKESTKNEEDIVDTHANCLTVHETKLKVDLTAYVEKHEFVFDAVLDEEVSNDEVYRETVEPVVPLIFQRIKATCFAYGQTGSGKTYTMKPLPLKASRDILRLMHHTYRNQGFQLFVSFFEIYGGKLYDLLSERKKLCMREDGKQQVCIVGLQEYRVSDTDAIMELIERGSATRSTGTTGANEESSRSHAILQLAIKKSVEGNQSKPPRLVGKLSFIDLAGSERGADTTDNDKQTRLEGAEINKSLLALKECIRALDNDQGHIPFRGSKLTEVLRDSFMGNSRTVMISCISPSSGSCEHTLNTLRYADRVKSLSKGNASKKDVSSSTMNLRESTKIPLSSALPTPSNFDDDVNEMWTEENDEFDASDYEQDKQMWKKNGKLEPSYNGMAQERIPKPTIQMKSRDMPRPDMKKSNSDDNLNALLQEEEDLVNAHRKQVEDTMNIVKEEMNLLVEADQPGNQLDGYISRLNTILSQKAAGILQLQNRLAHFQKRLREHNVLVSTTGY

SEQ ID NO: 45290 - protein, 684 aa, Arabidopsis thaliana
  peptide (1)..(684): Ceres Seq. ID no. 13576005
MSGRQRSVAAAVHHQRQLSDNPLDMSSSNGRWLQSTGLQHFQSSANDYGYYAGGQGGGGQAARGYQNAQRGNEFFGEPTTPQYGARPTNQRKNNDESEFSPGLLDLHSFDTELLPEIPVSNQLDGPSLFNPSQGQSFDDFEAYNKQPNRSRVLAENLAAEKERMNAVAKIKVVVRKRPLNKKESTKNEEDIVDTHANCLTVHETKLKVDLTAYVEKHEFVFDAVLDEEVSNDEVYRETVEPVVPLIFQRIKATCFAYGQTGSGKTYTMKPLPLKASRDILRLMHHTYRNQGFQLFVSFFEIYGGKLYDLLSERKKLCMREDGKQQVCIVGLQEYRVSDTDAIMELIERGSATRSTGTTGANEESSRSHAILQLAIKKSVEGNQSKPPRLVGKLSFIDLAGSERGADTTDNDKQTRLEGAEINKSLLALKECIRALDNDQGHIPFRGSKLTEVLRDSFMGNSRTVMISCISPSSGSCEHTLNTLRYADRVKSLSKGNASKKDVSSSTMNLRESTKIPLSSALPTPSNFDDDVNEMWTEENDEFDASDYEQDKQMWKKNGKLEPSYNGMAQERIPKPTIQMKSRDMPRPDMKKSNSDDNLNALLQEEEDLVNAHRKQVEDTMNIVKEEMNLLVEADQPGNQLDGYISRLNTILSQKAAGILQLQNRLAHFQKRLREHNVLVSTTGY

SEQ ID NO: 45291 - protein, 660 aa, Arabidopsis thaliana
  peptide (1)..(660): Ceres Seq. ID no. 13576006
MSSSNGRWLQSTGLQHFQSSANDYGYYAGGQGGGGQAARGYQNAQRGNEFFGEPTTPQYGARPTNQRKNNDESEFSPGLLDLHSFDTELLPEIPVSNQLDGPSLFNPSQGQSFDDFEAYNKQPNRSRVLAENLAAEKERMNAVAKIKVVVRKRPLNKKESTKNEEDIVDTHANCLTVHETKLKVDLTAYVEKHEFVFDAVLDEEVSNDEVYRETVEPVVPLIFQRIKATCFAYGQTGSGKTYTMKPLPLKASRDILRLMHHTYRNQGFQLFVSFFEIYGGKLYDLLSERKKLCMREDGKQQVCIVGLQEYRVSDTDAIMELIERGSATRSTGTTGANEESSRSHAILQLAIKKSVEGNQSKPPRLVGKLSFIDLAGSERGADTTDNDKQTRLEGAEINKSLLALKECIRALDNDQGHIPFRGSKLTEVLRDSFMGNSRTVMISCISPSSGSCEHTLNTLRYADRVKSLSKGNASKKDVSSSTMNLRESTKIPLSSALPTPSNFDDDVNEMWTEENDEFDASDYEQDKQMWKKNGKLEPSYNGMAQERIPKPTIQMKSRDMPRPDMKKSNSDDNLNALLQEEEDLVNAHRKQVEDTMNIVKEEMNLLVEADQPGNQLDGYISRLNTILSQKAAGILQLQNRLAHFQKRLREHNVLVSTTGY

SEQ ID NO: 45292 - DNA, 2061 bp, Arabidopsis thaliana
  misc_feature (1)..(2061): Ceres Seq. ID no. 12560615
  misc_feature (1)..(2061): Ortholog of  Ceres SEQ ID NO 15178310 as cited in SEQ ID NO 1089
  misc_feature (1)..(2061): Ortholog of  Ceres SEQ ID NO 14303173 as cited in SEQ ID NO 66550
caacaacaaaaaaaaaaaagttgttagttaagacattgctttacagctcaattgcgtcttcttcctctgtcttattcttcatcttcatcttcctcctcgcggatccattttgaggagtccctttttgtttcttgaagatagactgggcgtcacggagcagctgagtatatgctacgagtgttgcattccggaggctgttctttcagatgataggcagtagctatattatgcttgaacggtgccataatgggcatctgtctaatgaagcgctgctgctcatggtttcttttgatctcgtttctctctgcactaacgaatgaaaatgaagcaattagtcctgatggtgaggcgcttttgagttttagaaatggagttttggcttctgatggtgttattggtctgtggagaccagaggatcctgatccatgtaactggaaaggagtgacctgtgatgcaaaaacaaaaagagttatagcctttatgtggtgcatcttttgtcggttcctgaagtttcttgtgtgcaggagtcttacttatcacaaattaaggggacctttaccccctgagcttggaaagctggatcagttaaggcttttaatgcttcacaacaatgcgttatatcaatcaatacctgcctcattgggaaattgcacggcattagagggaatatacttgcagaataattacatcactgggacaatcccaagtgaaataggaaacctgtccgggctgaaaaacctggacctctcaaacaacaatctcaatggagctatccctgcttcacttgggcagttgaaaaggcttactaaattcaatgtctcaaacaatttcctggtgggaaaaataccttctgacggcctactcgctagactctcgagggactccttcaacggaaatcgtaacttgtgtggaaaacaaatcgatattgtgtgcaatgacagtggaaattctacagcttctgggtctccaacaggccaaggaggtaataaccctaaaaggctgcttataagtgcttcagctactgtgggtgggctgctcctagtggcgctcatgtgtttctggggatgctttctctataaaaagcttggtagagttgagagtaaaagccttgtgatagatgtcggtggaggtgcgtctatagtgatgttccatggagatttgccctacgcttccaaagacattatcaagaaactggaatctcttaatgaagagcacataataggctgtggaggctttggcacagtgtacaagctgtctatggacgatggcaatgtttttgcgctgaaaagaattgttaagttaaatgaaggttttgatcggttttttgaaagggagcttgagattcttgggagcatcaaacatcgttaccttgtgaatctacgtggatactgcaattcacccacatcaaagcttctgctatatgattaccttcctggtggtagccttgatgaagctctacataagagaggcgagcagctggattgggattcgcgagttaatatcataataggagcggcaaaagggttggcatacttgcatcatgattgttctcctaggattatacaccgtgatataaaatcaagcaacatcttactggatggaaatctggaggctcgggtatcagactttgggcttgccaagttgttagaggacgaagaatctcatattacaaccattgttgcaggcacattcggttacttggctccagagtatatgcaaagcggtagagcgactgagaaaaccgatgtttacagcttcggggttttggttcttgaagtcttgagtggtaaacttcccacggatgcctcattcatcgagaaaggctttaacattgttggttggctaaacttcttaatcagcgaaaaccgggcaaaggagattgttgatctaagctgtgaaggagtggagagagagagtctcgacgcacttctatcaatagcaacaaagtgtgtgtcgtcaagtccagatgagcggccaacaatgcacagagtcgtccagttacttgaatccgaagttatgactccttgccccagcgacttctacgactccagctccgattga

SEQ ID NO: 45293 - protein, 604 aa, Arabidopsis thaliana
  peptide (1)..(604): Ceres Seq. ID no. 12560616
MGICLMKRCCSWFLLISFLSALTNENEAISPDGEALLSFRNGVLASDGVIGLWRPEDPDPCNWKGVTCDAKTKRVIAFMWCIFCRFLKFLVCRSLTYHKLRGPLPPELGKLDQLRLLMLHNNALYQSIPASLGNCTALEGIYLQNNYITGTIPSEIGNLSGLKNLDLSNNNLNGAIPASLGQLKRLTKFNVSNNFLVGKIPSDGLLARLSRDSFNGNRNLCGKQIDIVCNDSGNSTASGSPTGQGGNNPKRLLISASATVGGLLLVALMCFWGCFLYKKLGRVESKSLVIDVGGGASIVMFHGDLPYASKDIIKKLESLNEEHIIGCGGFGTVYKLSMDDGNVFALKRIVKLNEGFDRFFERELEILGSIKHRYLVNLRGYCNSPTSKLLLYDYLPGGSLDEALHKRGEQLDWDSRVNIIIGAAKGLAYLHHDCSPRIIHRDIKSSNILLDGNLEARVSDFGLAKLLEDEESHITTIVAGTFGYLAPEYMQSGRATEKTDVYSFGVLVLEVLSGKLPTDASFIEKGFNIVGWLNFLISENRAKEIVDLSCEGVERESLDALLSIATKCVSSSPDERPTMHRVVQLLESEVMTPCPSDFYDSSSD

SEQ ID NO: 45294 - protein, 599 aa, Arabidopsis thaliana
  peptide (1)..(599): Ceres Seq. ID no. 12560617
MKRCCSWFLLISFLSALTNENEAISPDGEALLSFRNGVLASDGVIGLWRPEDPDPCNWKGVTCDAKTKRVIAFMWCIFCRFLKFLVCRSLTYHKLRGPLPPELGKLDQLRLLMLHNNALYQSIPASLGNCTALEGIYLQNNYITGTIPSEIGNLSGLKNLDLSNNNLNGAIPASLGQLKRLTKFNVSNNFLVGKIPSDGLLARLSRDSFNGNRNLCGKQIDIVCNDSGNSTASGSPTGQGGNNPKRLLISASATVGGLLLVALMCFWGCFLYKKLGRVESKSLVIDVGGGASIVMFHGDLPYASKDIIKKLESLNEEHIIGCGGFGTVYKLSMDDGNVFALKRIVKLNEGFDRFFERELEILGSIKHRYLVNLRGYCNSPTSKLLLYDYLPGGSLDEALHKRGEQLDWDSRVNIIIGAAKGLAYLHHDCSPRIIHRDIKSSNILLDGNLEARVSDFGLAKLLEDEESHITTIVAGTFGYLAPEYMQSGRATEKTDVYSFGVLVLEVLSGKLPTDASFIEKGFNIVGWLNFLISENRAKEIVDLSCEGVERESLDALLSIATKCVSSSPDERPTMHRVVQLLESEVMTPCPSDFYDSSSD

SEQ ID NO: 45295 - protein, 526 aa, Arabidopsis thaliana
  peptide (1)..(526): Ceres Seq. ID no. 12560618
MWCIFCRFLKFLVCRSLTYHKLRGPLPPELGKLDQLRLLMLHNNALYQSIPASLGNCTALEGIYLQNNYITGTIPSEIGNLSGLKNLDLSNNNLNGAIPASLGQLKRLTKFNVSNNFLVGKIPSDGLLARLSRDSFNGNRNLCGKQIDIVCNDSGNSTASGSPTGQGGNNPKRLLISASATVGGLLLVALMCFWGCFLYKKLGRVESKSLVIDVGGGASIVMFHGDLPYASKDIIKKLESLNEEHIIGCGGFGTVYKLSMDDGNVFALKRIVKLNEGFDRFFERELEILGSIKHRYLVNLRGYCNSPTSKLLLYDYLPGGSLDEALHKRGEQLDWDSRVNIIIGAAKGLAYLHHDCSPRIIHRDIKSSNILLDGNLEARVSDFGLAKLLEDEESHITTIVAGTFGYLAPEYMQSGRATEKTDVYSFGVLVLEVLSGKLPTDASFIEKGFNIVGWLNFLISENRAKEIVDLSCEGVERESLDALLSIATKCVSSSPDERPTMHRVVQLLESEVMTPCPSDFYDSSSD

SEQ ID NO: 45296 - DNA, 3114 bp, Arabidopsis thaliana
  misc_feature (1)..(3114): Ceres Seq. ID no. 12560623
  misc_feature (1)..(3114): Ortholog of  Ceres SEQ ID NO 12582387 as cited in SEQ ID NO 51077
aaagagggtcatcatcatttcatggttacctcctcttcctctcttcttactctcaccatatctgctctctctctctctctgtttcaagcttttgctcccatttttcatttccttcgtattctcgctcgagcttagcggttgatgtaccaatgaccaaatcgatatttgaatcgccgtggctacctttctttttcttctgatttctctatctctcgcttgattctaccacttttagggtttctattattcccagggactttgggtttctttaagaagttcgattcgtctccgttttctttttagggttaacgaagtctgtggtgttggatttcgatctttttttttttggtatcttccccattgactgttgcggtgataagagagtgacgcaatggtgtctaagaatgatcatatcgagactttattcaattcaatccaactagttaaagatgttgttcttcttccgattgagcttggtgtgaaaaaggcggcaagagatattgaaaattgttggataagcaaagaaagggatctaggtcttgttttcagatcatctggaagaaacaggaagaagcggattgttgctactcctgaatttgacgacaatgctactaataatgttcagtgtgtggtggttactgatgagagaaagaaaggtttgtctatcaagaagatccctgtgaagtcactctttggtatgttttctcccaatttagtcagtgagaagttgagtcgtggaaatgatgtggtggtggcgaagaaagataagtctttggagaagaaagatgatgattcttgtactgattgcttcaagtttgcgatgacttggtctttgttggttagtggctttgttcatgcttttcctattccttttaaaattggtaagaagaggattcataagatgggggatgatgagaacagtctacgtaaacacggccttaaatcaaaggcggcatttgtgagtcggaaagaagtgaggtgtcagtcagttgaatctgtagaaaaggaagggaaccctttttcgattgaatgcgctgttggttttgttgttgaaatgttggctcagaatctccagaagctggaccagtttatacaggatagttcagagaatgaatcttgttgttccaaggaagctagttctaatgatagtccacttatctttaacatctgggaggctagaaaactcgacgtaaatggattcctcgggaacctgatgtttgccagagttggagatgtggcgtcaggtataggtggcctgacatctcacataagtgaagatggtgatgaaagtaatgtcagtactgctggtaaggaggaaagtgcagttgattctccgcagaacttggcaactggactattgagtatacctttatcaaatgtagagcgcttaaaatccacactgtccacaatttcactgacggaacttattgaacttttaccacaattaggacgaccttcaagagaccatccagacaagaaaaaactaatttctgttcaggattttttcagatacaccgagtctgaaggcaggaggttctttgaagaattagatagagatggtgatggcaaagtaactttggaggatctggaaattgcaatgaggagaagaaaattgcccagaagatacgccaaggaatttatgcgacgagctaggagtcatcttttctcgaaatcgtttggttggaagcaatttttgtccttgatggaacagaaggagccaaccatcctccgtgcctatacttctctctgcttgaccaagtctggtactcttaagaaaagtgagatattggcatcactaaataacgcaggacttcctgctaatgaagaaaatgctatagccatgatgagatttttgaaggctgataccgaggagtctatctcatacggacatttccgtaatttcatggttttgctgccatatgagcgcttacaagatgatcctcgtaacatctggtttgaagctgcgactgttgttgctgttgcaccccctgtggccttacctgctggagatgttctaaaatctgcattagcgggagggcttgcctctgctctctccacttccttaatgcatccgattgacacaatcaagacacgtgtgcaagcatcaaccttgtcatttcctgaagtaatagccaagcttccagagattggtgtccggggagtgtataggggttctattccagcaattcttggacaattttcaagccatggcctgcggacaggaatattcgaagcaagcaaacttgtgttgatcaattttgctcccaatctcccagaaattcaggttcaatcgattgcatcattctgcagcacactattaggcacagctgtgcggattccatgtgaggtgctgaagcaacggttgcaggctggcatgtttaacaatgtaggggaagccattgtcgggacgtggaagcaagatggtccaagtggctttttccgtgggacaggcgcaactctttgccgcgaagttccactatacgttgttggcatgggactgtatgcagagtccaaaaagatggtggcgcaagctctgggaagagaactggaggcatgggagacaatagcggttggggcggtgtcaggaggtattgcagcagttgtaacaaccccatttgatgtgatgaagacgagaatgatgactgcaacgccagggagaccgatctcaatgtctatggttgttgtatcgattctgcgtaatgagggaccgctaggtttgttcaaaggagcagtcccgaggttcttctgggtggctcctctaggtgctatgaactttgctgggtacgaactagccaagaaagctatgcagaagaacgaagatgcagtgctagcggatcagcttggtcagaagaagctttgctaatgggattttactttgctttgctgctacgaagttttttgggggcagcttaagccggagactcacctcttttgttaaaagctactttgcaaaattttgacaaaaaaaaaagggttcattgttttgttgtgcattgaggacagtttcatttactctttataaaaactctgcttcaaaaatgtgattttttgccctctctacaattggttgttgctttgacagttgcaattacttcaatggtatacagtagcctt

SEQ ID NO: 45297 - protein, 823 aa, Arabidopsis thaliana
  peptide (1)..(823): Ceres Seq. ID no. 12560624
MVSKNDHIETLFNSIQLVKDVVLLPIELGVKKAARDIENCWISKERDLGLVFRSSGRNRKKRIVATPEFDDNATNNVQCVVVTDERKKGLSIKKIPVKSLFGMFSPNLVSEKLSRGNDVVVAKKDKSLEKKDDDSCTDCFKFAMTWSLLVSGFVHAFPIPFKIGKKRIHKMGDDENSLRKHGLKSKAAFVSRKEVRCQSVESVEKEGNPFSIECAVGFVVEMLAQNLQKLDQFIQDSSENESCCSKEASSNDSPLIFNIWEARKLDVNGFLGNLMFARVGDVASGIGGLTSHISEDGDESNVSTAGKEESAVDSPQNLATGLLSIPLSNVERLKSTLSTISLTELIELLPQLGRPSRDHPDKKKLISVQDFFRYTESEGRRFFEELDRDGDGKVTLEDLEIAMRRRKLPRRYAKEFMRRARSHLFSKSFGWKQFLSLMEQKEPTILRAYTSLCLTKSGTLKKSEILASLNNAGLPANEENAIAMMRFLKADTEESISYGHFRNFMVLLPYERLQDDPRNIWFEAATVVAVAPPVALPAGDVLKSALAGGLASALSTSLMHPIDTIKTRVQASTLSFPEVIAKLPEIGVRGVYRGSIPAILGQFSSHGLRTGIFEASKLVLINFAPNLPEIQVQSIASFCSTLLGTAVRIPCEVLKQRLQAGMFNNVGEAIVGTWKQDGPSGFFRGTGATLCREVPLYVVGMGLYAESKKMVAQALGRELEAWETIAVGAVSGGIAAVVTTPFDVMKTRMMTATPGRPISMSMVVVSILRNEGPLGLFKGAVPRFFWVAPLGAMNFAGYELAKKAMQKNEDAVLADQLGQKKLC

SEQ ID NO: 45298 - protein, 721 aa, Arabidopsis thaliana
  peptide (1)..(721): Ceres Seq. ID no. 12560625
MFSPNLVSEKLSRGNDVVVAKKDKSLEKKDDDSCTDCFKFAMTWSLLVSGFVHAFPIPFKIGKKRIHKMGDDENSLRKHGLKSKAAFVSRKEVRCQSVESVEKEGNPFSIECAVGFVVEMLAQNLQKLDQFIQDSSENESCCSKEASSNDSPLIFNIWEARKLDVNGFLGNLMFARVGDVASGIGGLTSHISEDGDESNVSTAGKEESAVDSPQNLATGLLSIPLSNVERLKSTLSTISLTELIELLPQLGRPSRDHPDKKKLISVQDFFRYTESEGRRFFEELDRDGDGKVTLEDLEIAMRRRKLPRRYAKEFMRRARSHLFSKSFGWKQFLSLMEQKEPTILRAYTSLCLTKSGTLKKSEILASLNNAGLPANEENAIAMMRFLKADTEESISYGHFRNFMVLLPYERLQDDPRNIWFEAATVVAVAPPVALPAGDVLKSALAGGLASALSTSLMHPIDTIKTRVQASTLSFPEVIAKLPEIGVRGVYRGSIPAILGQFSSHGLRTGIFEASKLVLINFAPNLPEIQVQSIASFCSTLLGTAVRIPCEVLKQRLQAGMFNNVGEAIVGTWKQDGPSGFFRGTGATLCREVPLYVVGMGLYAESKKMVAQALGRELEAWETIAVGAVSGGIAAVVTTPFDVMKTRMMTATPGRPISMSMVVVSILRNEGPLGLFKGAVPRFFWVAPLGAMNFAGYELAKKAMQKNEDAVLADQLGQKKLC

SEQ ID NO: 45299 - protein, 680 aa, Arabidopsis thaliana
  peptide (1)..(680): Ceres Seq. ID no. 12560626
MTWSLLVSGFVHAFPIPFKIGKKRIHKMGDDENSLRKHGLKSKAAFVSRKEVRCQSVESVEKEGNPFSIECAVGFVVEMLAQNLQKLDQFIQDSSENESCCSKEASSNDSPLIFNIWEARKLDVNGFLGNLMFARVGDVASGIGGLTSHISEDGDESNVSTAGKEESAVDSPQNLATGLLSIPLSNVERLKSTLSTISLTELIELLPQLGRPSRDHPDKKKLISVQDFFRYTESEGRRFFEELDRDGDGKVTLEDLEIAMRRRKLPRRYAKEFMRRARSHLFSKSFGWKQFLSLMEQKEPTILRAYTSLCLTKSGTLKKSEILASLNNAGLPANEENAIAMMRFLKADTEESISYGHFRNFMVLLPYERLQDDPRNIWFEAATVVAVAPPVALPAGDVLKSALAGGLASALSTSLMHPIDTIKTRVQASTLSFPEVIAKLPEIGVRGVYRGSIPAILGQFSSHGLRTGIFEASKLVLINFAPNLPEIQVQSIASFCSTLLGTAVRIPCEVLKQRLQAGMFNNVGEAIVGTWKQDGPSGFFRGTGATLCREVPLYVVGMGLYAESKKMVAQALGRELEAWETIAVGAVSGGIAAVVTTPFDVMKTRMMTATPGRPISMSMVVVSILRNEGPLGLFKGAVPRFFWVAPLGAMNFAGYELAKKAMQKNEDAVLADQLGQKKLC

SEQ ID NO: 45300 - DNA, 2033 bp, Arabidopsis thaliana
  misc_feature (1)..(2033): Ceres Seq. ID no. 12601578
  misc_feature (1)..(2033): Ortholog of  Ceres SEQ ID NO 13663060 as cited in SEQ ID NO 60964
  misc_feature (1)..(2033): Ortholog of  Ceres SEQ ID NO 13598532 as cited in SEQ ID NO 65204
  misc_feature (1)..(2033): Ortholog of  Ceres SEQ ID NO 13656849 as cited in SEQ ID NO 65764
  misc_feature (1)..(2033): Ortholog of  Ceres SEQ ID NO 13656501 as cited in SEQ ID NO 69206
aaaaaaaaaaaaaaaacgctcgcctacttctcttctctctcaccatagagatagtttcaagctccaaaagttcttcaatcagattctggaaactaggttgttggtagaagttatggtgagaaatgaagcttagattgagatttaagttatgggttgtgtatttggccgagaggcggcgacaacaacaacagctgaagctaaacaagctaagagctctaaagctagtagtggagtagtagtagtaggagagagtagtgtgactaagagtaatggagttattgctgatgatgtagagaagaagaagaatgaggaggcaaatggtgataaagaaaggaaatcatccaaaggagatcgaagaaggtcgacaaagccgaatccgcggttgagtaatccttccaagcattggcgtggtgaacaggttgctgctggttggccttcttggctttctgatgcttgtggtgaagctttaaatggttgggttcctagaaaggctgatacttttgagaaaattgataagattggacaaggaacatatagtaatgtgtacaaagctaaggatatgttgaccggtaaaatcgttgcgttgaagaaggttcggtttgataacttggagccggaaagtgtgaagtttatggcgagagagattcttgtgttgcggagacttgatcatcctaatgttgtgaagttggaaggtttggttacgtcaagaatgtcttgtagcttataccttgtatttcaatacatggatcatgatttggctggtcttgcttcaagtcctgttgttaagttctcagaatcagaggttaaatgtttgatgcgtcagttgatatctggtttggagcattgtcatagtcgtggtgtacttcatcgtgacatcaaaggatcaaatcttcttattgatgatggtggggtcctaaagattgctgattttggactcgcaacgatttttgatcctaatcacaagcggccaatgactagtcgagtggttacactatggtatcgagctccagagcttctgcttggggctactgattatggtgtaggtattgatctttggagtgccggctgtattttagctgagctattggcgggaagacctattatgcccggtcggacagaggtagagcagctacataagatttacaagctgtgtggttcaccatcagaggattattggaaaaaagggaaattcacacatggagccatatacaaaccccgtgaaccatacaaaagaagcataagagagacatttaaagattttccaccatcatctcttccgctcattgacgctcttctttcaatcgagccagaagaccgccaaactgcatctgctgctttaaaaagtgaattctttacaagtgaaccatatgcctgtgaacctgctgatctgccaaagtatcccccgagcaaagaaattgatgcaaagcgacgagatgaagaaactcggagacaaagagctgctagtaaagcccaaggggatggtgcaaggaagaatcggcacagagatcgttcaaatcgagctcttccagctcctgaagctaatgcagaacttcagtcaaatgtcgatagaaggagattaatcacacacgcaaatgcaaagagcaagagcgagaagtttccgccaccacaccaagatggtggagcaatgggtgtaccattgggtgcctcacagcatatagacccgacatttatcccacgagatatggtcccatccttcacatcctcttctttcaatttttccaaagacgaaccaccaacacaagtccagacgtggtcaggtcctctgggtcatccaatcacaggcgtttcaagaaagaagaaagataacaccaaaagcagtaaaggaaagagagcagtagtggcctgagaagagaaagtgtttactacttcatgtataacaatgtaagtgtttaccctctattctttgtggcttcctctaagagaaaatgttttaattcttttcaaatttgcgtagactttcatgtatttgtaactatatatttattatatatatacactacttcttttgttgc

SEQ ID NO: 45301 - protein, 572 aa, Arabidopsis thaliana
  peptide (1)..(572): Ceres Seq. ID no. 12601579
MGCVFGREAATTTTAEAKQAKSSKASSGVVVVGESSVTKSNGVIADDVEKKKNEEANGDKERKSSKGDRRRSTKPNPRLSNPSKHWRGEQVAAGWPSWLSDACGEALNGWVPRKADTFEKIDKIGQGTYSNVYKAKDMLTGKIVALKKVRFDNLEPESVKFMAREILVLRRLDHPNVVKLEGLVTSRMSCSLYLVFQYMDHDLAGLASSPVVKFSESEVKCLMRQLISGLEHCHSRGVLHRDIKGSNLLIDDGGVLKIADFGLATIFDPNHKRPMTSRVVTLWYRAPELLLGATDYGVGIDLWSAGCILAELLAGRPIMPGRTEVEQLHKIYKLCGSPSEDYWKKGKFTHGAIYKPREPYKRSIRETFKDFPPSSLPLIDALLSIEPEDRQTASAALKSEFFTSEPYACEPADLPKYPPSKEIDAKRRDEETRRQRAASKAQGDGARKNRHRDRSNRALPAPEANAELQSNVDRRRLITHANAKSKSEKFPPPHQDGGAMGVPLGASQHIDPTFIPRDMVPSFTSSSFNFSKDEPPTQVQTWSGPLGHPITGVSRKKKDNTKSSKGKRAVVA

SEQ ID NO: 45302 - protein, 435 aa, Arabidopsis thaliana
  peptide (1)..(435): Ceres Seq. ID no. 12601580
MLTGKIVALKKVRFDNLEPESVKFMAREILVLRRLDHPNVVKLEGLVTSRMSCSLYLVFQYMDHDLAGLASSPVVKFSESEVKCLMRQLISGLEHCHSRGVLHRDIKGSNLLIDDGGVLKIADFGLATIFDPNHKRPMTSRVVTLWYRAPELLLGATDYGVGIDLWSAGCILAELLAGRPIMPGRTEVEQLHKIYKLCGSPSEDYWKKGKFTHGAIYKPREPYKRSIRETFKDFPPSSLPLIDALLSIEPEDRQTASAALKSEFFTSEPYACEPADLPKYPPSKEIDAKRRDEETRRQRAASKAQGDGARKNRHRDRSNRALPAPEANAELQSNVDRRRLITHANAKSKSEKFPPPHQDGGAMGVPLGASQHIDPTFIPRDMVPSFTSSSFNFSKDEPPTQVQTWSGPLGHPITGVSRKKKDNTKSSKGKRAVVA

SEQ ID NO: 45303 - protein, 411 aa, Arabidopsis thaliana
  peptide (1)..(411): Ceres Seq. ID no. 12601581
MAREILVLRRLDHPNVVKLEGLVTSRMSCSLYLVFQYMDHDLAGLASSPVVKFSESEVKCLMRQLISGLEHCHSRGVLHRDIKGSNLLIDDGGVLKIADFGLATIFDPNHKRPMTSRVVTLWYRAPELLLGATDYGVGIDLWSAGCILAELLAGRPIMPGRTEVEQLHKIYKLCGSPSEDYWKKGKFTHGAIYKPREPYKRSIRETFKDFPPSSLPLIDALLSIEPEDRQTASAALKSEFFTSEPYACEPADLPKYPPSKEIDAKRRDEETRRQRAASKAQGDGARKNRHRDRSNRALPAPEANAELQSNVDRRRLITHANAKSKSEKFPPPHQDGGAMGVPLGASQHIDPTFIPRDMVPSFTSSSFNFSKDEPPTQVQTWSGPLGHPITGVSRKKKDNTKSSKGKRAVVA

SEQ ID NO: 45304 - DNA, 2389 bp, Arabidopsis thaliana; identical to SEQ ID NO: 43744
  misc_feature (1)..(2389): Ceres Seq. ID no. 13591580
  misc_feature (1)..(2389): Ortholog of  Ceres SEQ ID NO 12465083 as cited in SEQ ID NO 68239

SEQ ID NO: 45305 - protein, 669 aa, Arabidopsis thaliana; identical to SEQ ID NO: 25857
  peptide (1)..(669): Ceres Seq. ID no. 15221053

SEQ ID NO: 45306 - protein, 516 aa, Arabidopsis thaliana; identical to SEQ ID NO: 25858
  peptide (1)..(516): Ceres Seq. ID no. 15221054

SEQ ID NO: 45307 - protein, 511 aa, Arabidopsis thaliana; identical to SEQ ID NO: 43747
  peptide (1)..(511): Ceres Seq. ID no. 15221055

SEQ ID NO: 45308 - DNA, 2322 bp, Arabidopsis thaliana; identical to SEQ ID NO: 44793
  misc_feature (1)..(2322): Ceres Seq. ID no. 12489113
  misc_feature (1)..(2322): Ortholog of  Ceres SEQ ID NO 14312594 as cited in SEQ ID NO 58686
  misc_feature (1)..(2322): Ortholog of  Ceres SEQ ID NO 13597706 as cited in SEQ ID NO 65326

SEQ ID NO: 45309 - protein, 713 aa, Arabidopsis thaliana; identical to SEQ ID NO: 44794
  peptide (1)..(713): Ceres Seq. ID no. 12489114

SEQ ID NO: 45310 - protein, 665 aa, Arabidopsis thaliana; identical to SEQ ID NO: 44795
  peptide (1)..(665): Ceres Seq. ID no. 12489115

SEQ ID NO: 45311 - protein, 603 aa, Arabidopsis thaliana; identical to SEQ ID NO: 44796
  peptide (1)..(603): Ceres Seq. ID no. 12489116

SEQ ID NO: 45312 - DNA, 1270 bp, Arabidopsis thaliana
  misc_feature (1)..(1270): Ceres Seq. ID no. 13591546
  misc_feature (1)..(1270): Ortholog of  Ceres SEQ ID NO 12443653 as cited in SEQ ID NO 65912
agagcaacaatggattttttcgacgaagacaggcctagattcgttttccaatctcgtccttcttcttctcacacggcggaggaagaagaagaagctagaatccctaacaagcttttcatttcaatctccgtctcaatctccctcatcatattatctctctccttcttctacttcgaatctgaacctgccaaatcgctactattatggctttccctctctttcctcgtcggtcctttcgctcctagctcgctcaccggaggtaagattcgcgtcggttatggtcagatcttggagccagaacagattcacgatgagtcatccacggataacgaacgtgaatccaggaggaaatcggtgaataagcgatctaaaggttcgacgaagagcgataatccgccggaaaatgcttctgcggtgactgaagtttcgaggaaagtggtgattccgcagtctaaggagagtggatctgtgaatgaaactaaagattggactgctgaagagatcgagattttgaagaagcagttgattaagcatccagctggtaaacctgggagatgggagacggtggcttcagcgttcggaggaagatacaagacagagaatgtgattaagaaggcgaaagagataggtgagaagaaaatctatgagagtgatgattacgctcagtttttaaagaataggaaagcttcagatcctagattggttgatgaaaacgaagagaattctggagctggtggagatgcggaaggtactaaggagatttggagtaatggagaagacattgcattgctcaatgctttaaaagcttttcctaaggaggcagctatgagatgggagaagattgcagctgcagtacctgggaagtcgaaagcagcttgtatgaagagagttactgagcttaaaaaagggtttcggagctcgaaaactccagctaattaactagaggacatctgtacgggattaaggcaaataccaggagaggaaaaacaattttgtgtttgctgcttgagattattgctacaacgcccaaagtagtgaatagagttctgcaggaagtttcttttagagagaagaaaagaaagcatctcaatatgccaaagaatttaacataaagttatgagttcttctttacttcaagctttgattcgaattacaagacttgagcatctgtgtatcccctccccaaagagcacctattttattactagggaaatatataaaaagactatatatattcttaatccaaaattccaaactagaattttcatat

SEQ ID NO: 45313 - protein, 312 aa, Arabidopsis thaliana
  peptide (1)..(312): Ceres Seq. ID no. 13591547
RATMDFFDEDRPRFVFQSRPSSSHTAEEEEEARIPNKLFISISVSISLIILSLSFFYFESEPAKSLLLWLSLSFLVGPFAPSSLTGGKIRVGYGQILEPEQIHDESSTDNERESRRKSVNKRSKGSTKSDNPPENASAVTEVSRKVVIPQSKESGSVNETKDWTAEEIEILKKQLIKHPAGKPGRWETVASAFGGRYKTENVIKKAKEIGEKKIYESDDYAQFLKNRKASDPRLVDENEENSGAGGDAEGTKEIWSNGEDIALLNALKAFPKEAAMRWEKIAAAVPGKSKAACMKRVTELKKGFRSSKTPAN

SEQ ID NO: 45314 - protein, 309 aa, Arabidopsis thaliana
  peptide (1)..(309): Ceres Seq. ID no. 13591548
MDFFDEDRPRFVFQSRPSSSHTAEEEEEARIPNKLFISISVSISLIILSLSFFYFESEPAKSLLLWLSLSFLVGPFAPSSLTGGKIRVGYGQILEPEQIHDESSTDNERESRRKSVNKRSKGSTKSDNPPENASAVTEVSRKVVIPQSKESGSVNETKDWTAEEIEILKKQLIKHPAGKPGRWETVASAFGGRYKTENVIKKAKEIGEKKIYESDDYAQFLKNRKASDPRLVDENEENSGAGGDAEGTKEIWSNGEDIALLNALKAFPKEAAMRWEKIAAAVPGKSKAACMKRVTELKKGFRSSKTPAN

SEQ ID NO: 45315 - DNA, 1445 bp, Arabidopsis thaliana
  misc_feature (1)..(1445): Ceres Seq. ID no. 13593120
  misc_feature (1)..(1445): Ortholog of  Ceres SEQ ID NO 14314896 as cited in SEQ ID NO 54010
  misc_feature (1)..(1445): Ortholog of  Ceres SEQ ID NO 14308813 as cited in SEQ ID NO 55485
  misc_feature (1)..(1445): Ortholog of  Ceres SEQ ID NO 13655744 as cited in SEQ ID NO 64032
  misc_feature (1)..(1445): Ortholog of  Ceres SEQ ID NO 13590394 as cited in SEQ ID NO 66581
ggcgctctcatatttctcacattttcgtagccgcaagactcctttcagattcttacttgcagctatgggtaaagagaagtttcacattaacattgtggtcattggtcatgttgattctggaaaatcgaccacaactggtcacttgatctataagcttggtggtattgacaagcgtgtcatcgagaggttcgagaaggaggctgctgagatgaacaagaggtccttcaagtacgcatgggtgttggacaaacttaaggccgagcgtgagcgtggtattaccatcgatattgctctatggaagttcgagaccaccaagtactactgcacagtcattgatgccccaggacatcgtgatttcatcaagaacatgattactggtacctcccaggctgattgtgctgttcttatcattgactccaccactggaggttttgaggctggtatctctaaggatggtcagacccgtgagcacgctcttcttgctttcacccttggtgtcaagcagatgatttgctgttgtaacaagatggatgccaccacccccaaatactccaaggctaggtacgatgaaatcatcaaggaggtgtcttcatacctgaagaaggtcggatacaaccctgacaaaatcccatttgtgccaatctctggattcgagggagacaacatgattgagaggtcaaccaaccttgactggtacaagggaccaactcttcttgaggctcttgaccagatcaacgagcccaagaggccatcagacaagccccttcgtcttccacttcaggatgtctacaagattggtggtattggaacggtgccagtgggacgtgttgagactggtatgatcaagcctggtatggttgttacctttgctcccacagggttgaccactgaggttaagtctgttgagatgcaccacgagtctcttcttgaggcacttcccggtgacaatgttggattcaatgtcaagaatgttgctgtcaaggatcttaagagaggatacgttgcctctaactccaaggatgatccagctaagggtgccgccaacttcacctcccaggtcatcatcatgaaccaccctggtcagattggtaacggttacgccccagttctcgattgccacacctctcacattgcagtcaagttctctgagatcttgaccaagattgacaggcgttctggtaaggagattgagaaggagcccaagtttttgaagaatggtgacgctggtatggttaagatgaccccaaccaagcccatggttgttgagactttctccgagtacccacctttgggacgtttcgctgttagggacatgaggcagaccgttgctgttggtgttattaagagcgtggacaagaaggacccaactggagccaaggtcaccaaggctgcagtgaagaagggtgccaaatgaactcgaatcctcaaaactctatccgcagatg

SEQ ID NO: 45316 - protein, 470 aa, Arabidopsis thaliana; identical to SEQ ID NO: 40875
  peptide (1)..(470): Ceres Seq. ID no. 15221202

SEQ ID NO: 45317 - protein, 449 aa, Arabidopsis thaliana; identical to SEQ ID NO: 27284
  peptide (1)..(449): Ceres Seq. ID no. 15221203

SEQ ID NO: 45318 - protein, 401 aa, Arabidopsis thaliana; identical to SEQ ID NO: 21437
  peptide (1)..(401): Ceres Seq. ID no. 15221204

SEQ ID NO: 45319 - DNA, 1942 bp, Arabidopsis thaliana
  misc_feature (1)..(1942): Ceres Seq. ID no. 12560641
  misc_feature (1)..(1942): Ortholog of  Ceres SEQ ID NO 13657460 as cited in SEQ ID NO 66115
  misc_feature (1)..(1942): Ortholog of  Ceres SEQ ID NO 13659394 as cited in SEQ ID NO 67049
acttttttcttcctactaaaatctctccggtttcattcatatctctctctctctctgggccttactcaatcaccaccaaataacagacaaaaaaacgccttcatcgccggcgaaagtgagtcggagaatggcgtatatgtgcaccgacagcggaaacttaatggctatagcacaacaactcatcaaacagaagcagcaacaacaatcacaacatcaacaacaagaagaacaagaacaagaacccaacccctggcccaatccatccttcgggtttactcttcccggttcgggtttctccgacccgtttcaagtaaccaacgacccaggttttcactttccacacctggagcatcatcaaaacgcagccgtcgcttccgaggagtttgactccgacgagtggatggagagtttgatcaacggtggagatgcgtcacaaaccaatccagacttcccaatctacggccatgatccattcgtctcattcccgagtcgactcagtgctccttcatatctcaaccgagtcaacaaagatgactcagcgagtcaacaactccctccgccaccagcttccaccgctatatggtctccatctccgccatcaccacaacatcctcctcctcccccgccgcagccggattttgatctaaaccagccgatttttaaagctatccacgattatgcacgtaaaccggaaactaaaccggacacactaattcggatcaaagaatccgtgtccgaatcaggcgacccgatacaacgagtcgggtattacttcgcagaagctctgtctcataaagaaacagagtctccgtcgtcatcgtcgtcgtcatccctagaagatttcattctctcatacaaaaccttaaacgacgcatgtccatattcaaagttcgctcatttaacagcgaatcaagcaattctcgaagctacgaatcaatcaaacaacattcacatagtcgatttcgggatttttcaaggtattcaatggtctgctctgttacaagctttagcgacccgttcttctggtaaacccacccggatccggatttcgggtatacccgctccgtctctaggagactcaccgggaccgtctctgatcgctacgggaaaccgtctccgtgatttcgcggcgattttggatctcaatttcgagttttatccggttctgactccgattcaattactaaacgggtcaagttttcgggttgacccggatgaggttttggttgtgaattttatgcttgagctttataagcttctagatgaaacagcgacgactgttggtacggcgctccggttagctagatcgttaaacccgaggattgtgacgcttggagaatacgaagtcagtttaaaccgggttgaatttgctaaccgggttaagaactctctccggttttattccgcggtttttgaatcgcttgaaccgaatttggatcgagattcgaaagaaaggctgagagtggagagagtgttgttcggtaggaggattatggatttggtccgatcagatgatgataataataaaccgggaacccggtttgggttaatggaggagaaagaacaatggagagtgttgatggagaaagctggatttgagccggttaaaccgagtaattacgcggttagccaagcgaagctgctactatggaactacaattatagtacattgtattcacttgttgaatcggagccaggtttcatctccttggcttggaacaatgtgcctctcctcaccgtttcctcttggcgttgactacttggtccgataagttaatctagtattttgagttagcttttagaattgaattgtttggggttagatttggatgtttaattagtctctagcctattctcttactcttttttatctagtgcttggagtgatgatggtttgtcgtttatgttcatttgtaatatatattgtatgtaacatttgact

SEQ ID NO: 45320 - protein, 542 aa, Arabidopsis thaliana
  peptide (1)..(542): Ceres Seq. ID no. 12560642
MAYMCTDSGNLMAIAQQLIKQKQQQQSQHQQQEEQEQEPNPWPNPSFGFTLPGSGFSDPFQVTNDPGFHFPHLEHHQNAAVASEEFDSDEWMESLINGGDASQTNPDFPIYGHDPFVSFPSRLSAPSYLNRVNKDDSASQQLPPPPASTAIWSPSPPSPQHPPPPPPQPDFDLNQPIFKAIHDYARKPETKPDTLIRIKESVSESGDPIQRVGYYFAEALSHKETESPSSSSSSSLEDFILSYKTLNDACPYSKFAHLTANQAILEATNQSNNIHIVDFGIFQGIQWSALLQALATRSSGKPTRIRISGIPAPSLGDSPGPSLIATGNRLRDFAAILDLNFEFYPVLTPIQLLNGSSFRVDPDEVLVVNFMLELYKLLDETATTVGTALRLARSLNPRIVTLGEYEVSLNRVEFANRVKNSLRFYSAVFESLEPNLDRDSKERLRVERVLFGRRIMDLVRSDDDNNKPGTRFGLMEEKEQWRVLMEKAGFEPVKPSNYAVSQAKLLLWNYNYSTLYSLVESEPGFISLAWNNVPLLTVSSWR

SEQ ID NO: 45321 - protein, 539 aa, Arabidopsis thaliana
  peptide (1)..(539): Ceres Seq. ID no. 12560643
MCTDSGNLMAIAQQLIKQKQQQQSQHQQQEEQEQEPNPWPNPSFGFTLPGSGFSDPFQVTNDPGFHFPHLEHHQNAAVASEEFDSDEWMESLINGGDASQTNPDFPIYGHDPFVSFPSRLSAPSYLNRVNKDDSASQQLPPPPASTAIWSPSPPSPQHPPPPPPQPDFDLNQPIFKAIHDYARKPETKPDTLIRIKESVSESGDPIQRVGYYFAEALSHKETESPSSSSSSSLEDFILSYKTLNDACPYSKFAHLTANQAILEATNQSNNIHIVDFGIFQGIQWSALLQALATRSSGKPTRIRISGIPAPSLGDSPGPSLIATGNRLRDFAAILDLNFEFYPVLTPIQLLNGSSFRVDPDEVLVVNFMLELYKLLDETATTVGTALRLARSLNPRIVTLGEYEVSLNRVEFANRVKNSLRFYSAVFESLEPNLDRDSKERLRVERVLFGRRIMDLVRSDDDNNKPGTRFGLMEEKEQWRVLMEKAGFEPVKPSNYAVSQAKLLLWNYNYSTLYSLVESEPGFISLAWNNVPLLTVSSWR

SEQ ID NO: 45322 - protein, 531 aa, Arabidopsis thaliana
  peptide (1)..(531): Ceres Seq. ID no. 12560644
MAIAQQLIKQKQQQQSQHQQQEEQEQEPNPWPNPSFGFTLPGSGFSDPFQVTNDPGFHFPHLEHHQNAAVASEEFDSDEWMESLINGGDASQTNPDFPIYGHDPFVSFPSRLSAPSYLNRVNKDDSASQQLPPPPASTAIWSPSPPSPQHPPPPPPQPDFDLNQPIFKAIHDYARKPETKPDTLIRIKESVSESGDPIQRVGYYFAEALSHKETESPSSSSSSSLEDFILSYKTLNDACPYSKFAHLTANQAILEATNQSNNIHIVDFGIFQGIQWSALLQALATRSSGKPTRIRISGIPAPSLGDSPGPSLIATGNRLRDFAAILDLNFEFYPVLTPIQLLNGSSFRVDPDEVLVVNFMLELYKLLDETATTVGTALRLARSLNPRIVTLGEYEVSLNRVEFANRVKNSLRFYSAVFESLEPNLDRDSKERLRVERVLFGRRIMDLVRSDDDNNKPGTRFGLMEEKEQWRVLMEKAGFEPVKPSNYAVSQAKLLLWNYNYSTLYSLVESEPGFISLAWNNVPLLTVSSWR

SEQ ID NO: 45323 - DNA, 1873 bp, Arabidopsis thaliana
  misc_feature (1)..(1873): Ceres Seq. ID no. 13576017
  misc_feature (1)..(1873): Ortholog of  Ceres SEQ ID NO 15177414 as cited in SEQ ID NO 57242
  misc_feature (1)..(1873): Ortholog of  Ceres SEQ ID NO 13594151 as cited in SEQ ID NO 58886
ggtgtctccttcactttcaaagacagtctctttccccaaagagcggattcaggattcaccatctcgatctgtgtccaaagctcctatctttcttctttcttccctgaagaattttctggagcttctcagatcagaggaagatgatgcaatcctaagactctaagacttcttcaaggctgtgttttatcgtgggatttttaaacatggggaaggaaaatgctgtgtctcggccattcactcgttcccttgcctctgctttgcgcgcttcagaagtgacttctactacacagaatcaacagagagtaaacacaaaaagaccagccttggaggatacaagagccactggacccaacaagaggaagaagcgagcggttctaggggagatcacaaatgttaactccaatacagctatacttgaggccaaaaacagcaagcagataaagaaaggacgcggtcatggattggcgagtacatcccagttggcaacttctgttacttcagaagtcacagatcttcagtccaggaccgatgcaaaagttgaagttgcatcaaatacagcaggaaacctttctgtttctaaaggcacagataacacagctgataactgtattgagatatggaattctagattgcctccaagacctcttgggagatcagcttctacagctgagaaaagtgctgttattggtagttcaactgtaccggatatcccaaaatttgtagacatcgattcagatgacaaggatcctttactgtgctgcctctatgcccctgaaatccactacaatttgcgtgtttcagagcttaaacgcagaccacttccggactttatggagagaatacagaaggatgtcacccagtccatgcggggaattctggttgattggcttgtggaggtctctgaagaatacacacttgcatctgacactctctacctcacagtgtatctcatagactggttcctccatggaaactacgtgcaaagacagcaacttcaactgctcggcatcacttgcatgctaattgcctcgaagtatgaggaaatctctgctccacgcattgaggagttttgcttcattacggataacacctacacaagagatcaggtcctggaaatggagaaccaagtacttaagcattttagctttcaaatatacactcccactccaaaaacgttccttaggagatttctcagagcagctcaagcctctcgcctgagcccaagccttgaagtcgagtttctagccagctatctaacagagttgacattaatagactaccatttcttaaagtttcttccttccgttgttgctgcttcagcggtttttctcgccaagtggacaatggaccaatcaaaccacccatggaatccaacacttgagcattacacaacgtacaaagcatcggatctgaaagcatctgttcatgccttacaagatctgcagcttaacaccaaaggttgccccttgagcgctatacgcatgaagtataggcaagagaaatacaaatctgtggcggttctcacgtctccaaagctacttgacacgctattctgaaggtttcaactcctaaccgataatagttttgtcacattgatggtccaatttcgttttcattcatctgttactctttgttcataaaacagaatttccacagtcccactcatctaatacctgattagaattcggtttagcctagtttgatccgtggtttggttcttccaaacccgggaacatctaatcggtacctagagttttttttattgtaacgagaatgtacatttttctcccatcttgaggcaatgtaaacagattcggaattttcatatcagttttctgatatgaagtaggtttaagtatttatatttcaaatt

SEQ ID NO: 45324 - protein, 450 aa, Arabidopsis thaliana
  peptide (1)..(450): Ceres Seq. ID no. 13576018
MGKENAVSRPFTRSLASALRASEVTSTTQNQQRVNTKRPALEDTRATGPNKRKKRAVLGEITNVNSNTAILEAKNSKQIKKGRGHGLASTSQLATSVTSEVTDLQSRTDAKVEVASNTAGNLSVSKGTDNTADNCIEIWNSRLPPRPLGRSASTAEKSAVIGSSTVPDIPKFVDIDSDDKDPLLCCLYAPEIHYNLRVSELKRRPLPDFMERIQKDVTQSMRGILVDWLVEVSEEYTLASDTLYLTVYLIDWFLHGNYVQRQQLQLLGITCMLIASKYEEISAPRIEEFCFITDNTYTRDQVLEMENQVLKHFSFQIYTPTPKTFLRRFLRAAQASRLSPSLEVEFLASYLTELTLIDYHFLKFLPSVVAASAVFLAKWTMDQSNHPWNPTLEHYTTYKASDLKASVHALQDLQLNTKGCPLSAIRMKYRQEKYKSVAVLTSPKLLDTLF

SEQ ID NO: 45325 - protein, 241 aa, Arabidopsis thaliana
  peptide (1)..(241): Ceres Seq. ID no. 13576019
MERIQKDVTQSMRGILVDWLVEVSEEYTLASDTLYLTVYLIDWFLHGNYVQRQQLQLLGITCMLIASKYEEISAPRIEEFCFITDNTYTRDQVLEMENQVLKHFSFQIYTPTPKTFLRRFLRAAQASRLSPSLEVEFLASYLTELTLIDYHFLKFLPSVVAASAVFLAKWTMDQSNHPWNPTLEHYTTYKASDLKASVHALQDLQLNTKGCPLSAIRMKYRQEKYKSVAVLTSPKLLDTLF

SEQ ID NO: 45326 - protein, 230 aa, Arabidopsis thaliana
  peptide (1)..(230): Ceres Seq. ID no. 13576020
MRGILVDWLVEVSEEYTLASDTLYLTVYLIDWFLHGNYVQRQQLQLLGITCMLIASKYEEISAPRIEEFCFITDNTYTRDQVLEMENQVLKHFSFQIYTPTPKTFLRRFLRAAQASRLSPSLEVEFLASYLTELTLIDYHFLKFLPSVVAASAVFLAKWTMDQSNHPWNPTLEHYTTYKASDLKASVHALQDLQLNTKGCPLSAIRMKYRQEKYKSVAVLTSPKLLDTLF

SEQ ID NO: 45327 - DNA, 2478 bp, Arabidopsis thaliana; identical to SEQ ID NO: 44906
  misc_feature (1)..(2478): Ceres Seq. ID no. 12600031
  misc_feature (1)..(2478): Ortholog of  Ceres SEQ ID NO 15173102 as cited in SEQ ID NO 61106

SEQ ID NO: 45328 - protein, 797 aa, Arabidopsis thaliana; identical to SEQ ID NO: 44907
  peptide (1)..(797): Ceres Seq. ID no. 12600032

SEQ ID NO: 45329 - protein, 768 aa, Arabidopsis thaliana; identical to SEQ ID NO: 44908
  peptide (1)..(768): Ceres Seq. ID no. 12600033

SEQ ID NO: 45330 - protein, 763 aa, Arabidopsis thaliana; identical to SEQ ID NO: 44909
  peptide (1)..(763): Ceres Seq. ID no. 12600034

SEQ ID NO: 45331 - DNA, 2256 bp, Arabidopsis thaliana; identical to SEQ ID NO: 22038
  misc_feature (1)..(2256): Ceres Seq. ID no. 13646318
  misc_feature (1)..(2256): Ortholog of  Ceres SEQ ID NO 14303276 as cited in SEQ ID NO 1264
  misc_feature (1)..(2256): Ortholog of  Ceres SEQ ID NO 15170536 as cited in SEQ ID NO 52791
  misc_feature (1)..(2256): Ortholog of  Ceres SEQ ID NO 15171813 as cited in SEQ ID NO 57309
  misc_feature (1)..(2256): Ortholog of  Ceres SEQ ID NO 14314378 as cited in SEQ ID NO 57601
  misc_feature (1)..(2256): Ortholog of  Ceres SEQ ID NO 12465083 as cited in SEQ ID NO 68239

SEQ ID NO: 45332 - protein, 651 aa, Arabidopsis thaliana; identical to SEQ ID NO: 22039
  peptide (1)..(651): Ceres Seq. ID no. 13646319

SEQ ID NO: 45333 - protein, 588 aa, Arabidopsis thaliana; identical to SEQ ID NO: 22040
  peptide (1)..(588): Ceres Seq. ID no. 13646320

SEQ ID NO: 45334 - protein, 562 aa, Arabidopsis thaliana; identical to SEQ ID NO: 22041
  peptide (1)..(562): Ceres Seq. ID no. 13646321

SEQ ID NO: 45335 - DNA, 946 bp, Arabidopsis thaliana; identical to SEQ ID NO: 43845
  misc_feature (1)..(946): Ceres Seq. ID no. 12562112
  misc_feature (1)..(946): Ortholog of  Ceres SEQ ID NO 15175441 as cited in SEQ ID NO 62550

SEQ ID NO: 45336 - protein, 257 aa, Arabidopsis thaliana; identical to SEQ ID NO: 43846
  peptide (1)..(257): Ceres Seq. ID no. 12562113

SEQ ID NO: 45337 - protein, 225 aa, Arabidopsis thaliana; identical to SEQ ID NO: 43847
  peptide (1)..(225): Ceres Seq. ID no. 12562114

SEQ ID NO: 45338 - protein, 169 aa, Arabidopsis thaliana; identical to SEQ ID NO: 43848
  peptide (1)..(169): Ceres Seq. ID no. 12562115

SEQ ID NO: 45339 - DNA, 1499 bp, Arabidopsis thaliana; identical to SEQ ID NO: 36597
  misc_feature (1)..(1499): Ceres Seq. ID no. 12560653
  misc_feature (1)..(1499): Ortholog of  Ceres SEQ ID NO 15169350 as cited in SEQ ID NO 53271

SEQ ID NO: 45340 - protein, 428 aa, Arabidopsis thaliana; identical to SEQ ID NO: 36598
  peptide (1)..(428): Ceres Seq. ID no. 12560654

SEQ ID NO: 45341 - protein, 390 aa, Arabidopsis thaliana; identical to SEQ ID NO: 36599
  peptide (1)..(390): Ceres Seq. ID no. 12560655

SEQ ID NO: 45342 - protein, 311 aa, Arabidopsis thaliana; identical to SEQ ID NO: 36600
  peptide (1)..(311): Ceres Seq. ID no. 12560656

SEQ ID NO: 45343 - DNA, 1422 bp, Arabidopsis thaliana
  misc_feature (1)..(1422): Ceres Seq. ID no. 13576507
  misc_feature (1)..(1422): Ortholog of  Ceres SEQ ID NO 14313739 as cited in SEQ ID NO 54143
  misc_feature (1)..(1422): Ortholog of  Ceres SEQ ID NO 14308217 as cited in SEQ ID NO 58569
tgtcggaaggagccgaatgattctgctatggctgctggtccggtggttatcaagcgcgaaactgaagatactcctggagaagaagaagaaggtaacacctctagagacaacgccttggttgaagtcaagttagagaagcaagaagaacttggtcttctcgttacttgtggaatccagaaacgaaaacgactcgctcgtggagcaagatctcgaagatattcagacaccagcttcgaggaaaagccgattattatccctccgaagcacaagcagcagagagtattaaccactcgatggaacaatgaaaggattaagttcgcagagcaaaccttagcggatattatgaaggagaaaggtgctacttttgaaaaacctgttacgcgacaactgttaagagttattgctcgaagcaagataggtgatactgggctcttggatcattccttgaagcacatggatggcaaagtaacaccaggtggttctgatcggtttaggaggtgttacaatactgatggatgcatgcagtattggctcgaaagtgctgaccttgtcaagattaaacttgaatctggaattcctgatcctacttgggttcccccagcttggtggatggttcagactgcatcatcacatgatcaatctgcggttacgtcaaagcttcttatgggggagattgagcaaatgaagagtgaaatcaaagaacttgtatcaaagcaaaatttaccagatcatgctgatgcaaatgagaaactattcaaggaacttaagagttggagggaaaacactgataagcaaattgtggagatctcagaatcgttgacttcaactcagggcatgttcaaggaattgaattcgtggaaagataaagtagatcagcagttactgggaatttcaaacacgctgagcaatctgcagccgaatgggagcacgtcattcagtccagctcaggaaaattgggaacatatattgaagacttccaatttggaagattttacaacgaatggttttgaccaatgggatgaccttattgatggtctaccagaggctgtcaggccggagacctacgcgcttccaacaaatccttgcaaaagctctctccaagatcagtcattgatctctctccaagaccagtcattggtctctctccaagaccagtcattggtcaacgtagatatgcaaatgacagaaagcatgactagaggtgaatccagaagctccagtcaggaaaaagctgaaatgactccgggttcttcgattactgcaggtccaaaatcagatattgacgacccaacaatccagactcaggaaaccttgaaggagttggtgacatggaaagccaaagcggagcagcagctgatggaattatcaaacgctgtccttgctcttaagggacagaatcaacccaactggcgttacccgtga

SEQ ID NO: 45344 - protein, 473 aa, Arabidopsis thaliana
  peptide (1)..(473): Ceres Seq. ID no. 13576508
CRKEPNDSAMAAGPVVIKRETEDTPGEEEEGNTSRDNALVEVKLEKQEELGLLVTCGIQKRKRLARGARSRRYSDTSFEEKPIIIPPKHKQQRVLTTRWNNERIKFAEQTLADIMKEKGATFEKPVTRQLLRVIARSKIGDTGLLDHSLKHMDGKVTPGGSDRFRRCYNTDGCMQYWLESADLVKIKLESGIPDPTWVPPAWWMVQTASSHDQSAVTSKLLMGEIEQMKSEIKELVSKQNLPDHADANEKLFKELKSWRENTDKQIVEISESLTSTQGMFKELNSWKDKVDQQLLGISNTLSNLQPNGSTSFSPAQENWEHILKTSNLEDFTTNGFDQWDDLIDGLPEAVRPETYALPTNPCKSSLQDQSLISLQDQSLVSLQDQSLVNVDMQMTESMTRGESRSSSQEKAEMTPGSSITAGPKSDIDDPTIQTQETLKELVTWKAKAEQQLMELSNAVLALKGQNQPNWRYP

SEQ ID NO: 45345 - protein, 464 aa, Arabidopsis thaliana
  peptide (1)..(464): Ceres Seq. ID no. 13576509
MAAGPVVIKRETEDTPGEEEEGNTSRDNALVEVKLEKQEELGLLVTCGIQKRKRLARGARSRRYSDTSFEEKPIIIPPKHKQQRVLTTRWNNERIKFAEQTLADIMKEKGATFEKPVTRQLLRVIARSKIGDTGLLDHSLKHMDGKVTPGGSDRFRRCYNTDGCMQYWLESADLVKIKLESGIPDPTWVPPAWWMVQTASSHDQSAVTSKLLMGEIEQMKSEIKELVSKQNLPDHADANEKLFKELKSWRENTDKQIVEISESLTSTQGMFKELNSWKDKVDQQLLGISNTLSNLQPNGSTSFSPAQENWEHILKTSNLEDFTTNGFDQWDDLIDGLPEAVRPETYALPTNPCKSSLQDQSLISLQDQSLVSLQDQSLVNVDMQMTESMTRGESRSSSQEKAEMTPGSSITAGPKSDIDDPTIQTQETLKELVTWKAKAEQQLMELSNAVLALKGQNQPNWRYP

SEQ ID NO: 45346 - protein, 359 aa, Arabidopsis thaliana
  peptide (1)..(359): Ceres Seq. ID no. 13576510
MKEKGATFEKPVTRQLLRVIARSKIGDTGLLDHSLKHMDGKVTPGGSDRFRRCYNTDGCMQYWLESADLVKIKLESGIPDPTWVPPAWWMVQTASSHDQSAVTSKLLMGEIEQMKSEIKELVSKQNLPDHADANEKLFKELKSWRENTDKQIVEISESLTSTQGMFKELNSWKDKVDQQLLGISNTLSNLQPNGSTSFSPAQENWEHILKTSNLEDFTTNGFDQWDDLIDGLPEAVRPETYALPTNPCKSSLQDQSLISLQDQSLVSLQDQSLVNVDMQMTESMTRGESRSSSQEKAEMTPGSSITAGPKSDIDDPTIQTQETLKELVTWKAKAEQQLMELSNAVLALKGQNQPNWRYP

SEQ ID NO: 45347 - DNA, 1623 bp, Arabidopsis thaliana
  misc_feature (1)..(1623): Ceres Seq. ID no. 12560657
  misc_feature (1)..(1623): Ortholog of  Ceres SEQ ID NO 13660287 as cited in SEQ ID NO 67316
aaccagaaagaaaaaaaaaatgaagaagagtatcgaaactccgttattgttgaacaccaaacaatcacaagacgaagataaagaaaaaataagatgggagaagatgaagaaagttgcttcaatggctgctccaatggtcgccgtgaacatgtctcaataccttcttcaagcaacttctacaatgatcgtcggtcaccggagcgaactcgctctcgccggaatcgctctaggaagctcctttgctaatgttaccggctttggtgttctttttggactttcaggttcattggaaacactatgtggtcaagcatatggagcaaaacaatatcacaagcttggatcttacactttcacttcaatagttttccttttgattatctctgttccgatttcgattctttggatgttcatgaaccagatcttgctgttgcttcatcaagatcctcaaatagcagagttagctggtgtgtactgtctctggctggtaccagctttattcggttactctgttctcgagtcgttggttcgatattttcagtcacaaagcttgatttatccaatggtcttgagctctctagctgctctgtctttccatgttcctctctgttggctaatggttcataaatttgattttggagccaaaggagcggctgcgtctatcggtatctcttactggctcaacgcggtttttctttgggtttatatgaaacgctctagtcgttgtgtcgaaacgcggatttatatgtccaaggatgtttttgttcatacaaatatcttctttcaatttgccattccttctgcaatgatgtgttgccttgagtggttagctttcgaggtcattactttgctgtctggtcttctacccaactcaaagctcgaaacatcggttatttcgatttgcctcacgacctcttcattgcattacaatctagtaaatggaattggtgatgcagcaagcaccaatgtggctaatgagctaggagctgggaatccgcgaggggctcgtgattctgctgcggctgcaatcataattgcagctgttgagtcagttattgtgagctctagtctgttcttgtctcgcagtgtgtggccttatgcatatagcaatgtggaggaagtaattagttatgtgactgatatcactcctattctttgtatctcaatcctcatggacagcttcttgaccgtcctctccgggattgtgagaggaacagggtggcaaaaaattggagcttatgtgaacataacctcttattatgtcattggtattcctgttggacttctattgtgttttcatcttcacttcaatgggaaaggactttgggctggtttagtcacaggatcaacattacaaactctaatcctatttcttgttattggatttaccaattggagcaaagaggcaattaaggctagggagagaattggtgatgagaaagtttggagacatgactcattgcttaattgaagaaaaaaagaaatacaaacttttgggggattttgattgcttctttttttgtgtgtgtttgtgcaataaccttcagttgattgtaatttatattgaaagtacattatagtctttcatatgatattagagtgtaagaaagtttgaaaatatatctc

SEQ ID NO: 45348 - protein, 488 aa, Arabidopsis thaliana
  peptide (1)..(488): Ceres Seq. ID no. 12560658
TRKKKKMKKSIETPLLLNTKQSQDEDKEKIRWEKMKKVASMAAPMVAVNMSQYLLQATSTMIVGHRSELALAGIALGSSFANVTGFGVLFGLSGSLETLCGQAYGAKQYHKLGSYTFTSIVFLLIISVPISILWMFMNQILLLLHQDPQIAELAGVYCLWLVPALFGYSVLESLVRYFQSQSLIYPMVLSSLAALSFHVPLCWLMVHKFDFGAKGAAASIGISYWLNAVFLWVYMKRSSRCVETRIYMSKDVFVHTNIFFQFAIPSAMMCCLEWLAFEVITLLSGLLPNSKLETSVISICLTTSSLHYNLVNGIGDAASTNVANELGAGNPRGARDSAAAAIIIAAVESVIVSSSLFLSRSVWPYAYSNVEEVISYVTDITPILCISILMDSFLTVLSGIVRGTGWQKIGAYVNITSYYVIGIPVGLLLCFHLHFNGKGLWAGLVTGSTLQTLILFLVIGFTNWSKEAIKARERIGDEKVWRHDSLLN

SEQ ID NO: 45349 - protein, 482 aa, Arabidopsis thaliana
  peptide (1)..(482): Ceres Seq. ID no. 12560659
MKKSIETPLLLNTKQSQDEDKEKIRWEKMKKVASMAAPMVAVNMSQYLLQATSTMIVGHRSELALAGIALGSSFANVTGFGVLFGLSGSLETLCGQAYGAKQYHKLGSYTFTSIVFLLIISVPISILWMFMNQILLLLHQDPQIAELAGVYCLWLVPALFGYSVLESLVRYFQSQSLIYPMVLSSLAALSFHVPLCWLMVHKFDFGAKGAAASIGISYWLNAVFLWVYMKRSSRCVETRIYMSKDVFVHTNIFFQFAIPSAMMCCLEWLAFEVITLLSGLLPNSKLETSVISICLTTSSLHYNLVNGIGDAASTNVANELGAGNPRGARDSAAAAIIIAAVESVIVSSSLFLSRSVWPYAYSNVEEVISYVTDITPILCISILMDSFLTVLSGIVRGTGWQKIGAYVNITSYYVIGIPVGLLLCFHLHFNGKGLWAGLVTGSTLQTLILFLVIGFTNWSKEAIKARERIGDEKVWRHDSLLN

SEQ ID NO: 45350 - protein, 454 aa, Arabidopsis thaliana
  peptide (1)..(454): Ceres Seq. ID no. 12560660
MKKVASMAAPMVAVNMSQYLLQATSTMIVGHRSELALAGIALGSSFANVTGFGVLFGLSGSLETLCGQAYGAKQYHKLGSYTFTSIVFLLIISVPISILWMFMNQILLLLHQDPQIAELAGVYCLWLVPALFGYSVLESLVRYFQSQSLIYPMVLSSLAALSFHVPLCWLMVHKFDFGAKGAAASIGISYWLNAVFLWVYMKRSSRCVETRIYMSKDVFVHTNIFFQFAIPSAMMCCLEWLAFEVITLLSGLLPNSKLETSVISICLTTSSLHYNLVNGIGDAASTNVANELGAGNPRGARDSAAAAIIIAAVESVIVSSSLFLSRSVWPYAYSNVEEVISYVTDITPILCISILMDSFLTVLSGIVRGTGWQKIGAYVNITSYYVIGIPVGLLLCFHLHFNGKGLWAGLVTGSTLQTLILFLVIGFTNWSKEAIKARERIGDEKVWRHDSLLN

SEQ ID NO: 45351 - DNA, 1459 bp, Arabidopsis thaliana
  misc_feature (1)..(1459): Ceres Seq. ID no. 12560499
  misc_feature (1)..(1459): Ortholog of  Ceres SEQ ID NO 14302828 as cited in SEQ ID NO 65549
tttttcttttaatctttttttttatggctgccttcagtagtaacctctgagcttgagggaaactcatgtccatggcgctaattgtccggccattctttgttcctggaagtgctggaatttctgggagtagaaacatatgcaagaaaaatcaatggaggaagtatcttctgaaacccagtggatcatccattaattgctcatttagtacagagaagaatcctctattaccatctatccagcagttagccgatgctcgtctcatatacagtgtatctgcagcattgggtcataacaaggaatcacatccagaatgcagcgctagagttcctgccattgttaatgctctcgagatgaatgagctcactcctaagttccgtggctcacagattcttgaactcgcaaatttcaagactgcaactgtagaagacattgcaaatgttcacgacaaggcttatgtctttggcctagaaaaggcaatggatgaggcttcagattcgggactaattttcattgaaggctctggaccaacatatgccacttcaacgacattccaagattcacttatcgcagcaggagccggaatggctttagttgattcagtgatcgcagcatccagaaacagcgtagatccacccattggttttgcattgataagacctcctgggcaccacgccgtgccaaaaggtccgatggggttctgtgtttttggtaatgtggcaatcgcagctcgtcatgcccaacgcacacatggtctgaagcgcatcttcataattgacttcgatgttcaccacgggaatggcacaaatgatgcatttactgaggaccctgatatattctttttgtcaactcatcaggacggaagctaccctggaacagggaaaatcagtgacataggtaaaggaaaaggtgaaggtaccactctaaatttacctttgcctggaggttcaggtgatattgcaatgagaaccgtttttgaagaaatcattgttccatgtgctcaacggttcaagccagatattattcttgtttctgctgggtatgatgctcatgtcctggatccactagcaaatttacagttcacgaccgcaacatactactcattggcaaaagatataaagcggttagcaaaagaagtatgcggagggcggtgtgtgtttttcttggaaggaggatacaatcttgaatcactttcatcatctgtggcagactcgtttcgagcattgcttggagaagatagcttggcatcagagtttgataacccagcttacttgtacgatgaaccaatgagaaaggtgcgagatgcaattcagagagccaaaagcattcattgcttataaggtgaatttgtttgagaagttctgcatcttagtcgtcttaaactgcctgcctacttatgttttcttttgtaaaaatatcattgtaaacattgttgattagaaaattaaagttatgtaaacag

SEQ ID NO: 45352 - protein, 423 aa, Arabidopsis thaliana
  peptide (1)..(423): Ceres Seq. ID no. 12560500
MSMALIVRPFFVPGSAGISGSRNICKKNQWRKYLLKPSGSSINCSFSTEKNPLLPSIQQLADARLIYSVSAALGHNKESHPECSARVPAIVNALEMNELTPKFRGSQILELANFKTATVEDIANVHDKAYVFGLEKAMDEASDSGLIFIEGSGPTYATSTTFQDSLIAAGAGMALVDSVIAASRNSVDPPIGFALIRPPGHHAVPKGPMGFCVFGNVAIAARHAQRTHGLKRIFIIDFDVHHGNGTNDAFTEDPDIFFLSTHQDGSYPGTGKISDIGKGKGEGTTLNLPLPGGSGDIAMRTVFEEIIVPCAQRFKPDIILVSAGYDAHVLDPLANLQFTTATYYSLAKDIKRLAKEVCGGRCVFFLEGGYNLESLSSSVADSFRALLGEDSLASEFDNPAYLYDEPMRKVRDAIQRAKSIHCL

SEQ ID NO: 45353 - protein, 421 aa, Arabidopsis thaliana
  peptide (1)..(421): Ceres Seq. ID no. 12560501
MALIVRPFFVPGSAGISGSRNICKKNQWRKYLLKPSGSSINCSFSTEKNPLLPSIQQLADARLIYSVSAALGHNKESHPECSARVPAIVNALEMNELTPKFRGSQILELANFKTATVEDIANVHDKAYVFGLEKAMDEASDSGLIFIEGSGPTYATSTTFQDSLIAAGAGMALVDSVIAASRNSVDPPIGFALIRPPGHHAVPKGPMGFCVFGNVAIAARHAQRTHGLKRIFIIDFDVHHGNGTNDAFTEDPDIFFLSTHQDGSYPGTGKISDIGKGKGEGTTLNLPLPGGSGDIAMRTVFEEIIVPCAQRFKPDIILVSAGYDAHVLDPLANLQFTTATYYSLAKDIKRLAKEVCGGRCVFFLEGGYNLESLSSSVADSFRALLGEDSLASEFDNPAYLYDEPMRKVRDAIQRAKSIHCL

SEQ ID NO: 45354 - protein, 328 aa, Arabidopsis thaliana
  peptide (1)..(328): Ceres Seq. ID no. 12560502
MNELTPKFRGSQILELANFKTATVEDIANVHDKAYVFGLEKAMDEASDSGLIFIEGSGPTYATSTTFQDSLIAAGAGMALVDSVIAASRNSVDPPIGFALIRPPGHHAVPKGPMGFCVFGNVAIAARHAQRTHGLKRIFIIDFDVHHGNGTNDAFTEDPDIFFLSTHQDGSYPGTGKISDIGKGKGEGTTLNLPLPGGSGDIAMRTVFEEIIVPCAQRFKPDIILVSAGYDAHVLDPLANLQFTTATYYSLAKDIKRLAKEVCGGRCVFFLEGGYNLESLSSSVADSFRALLGEDSLASEFDNPAYLYDEPMRKVRDAIQRAKSIHCL

SEQ ID NO: 45355 - DNA, 1156 bp, Arabidopsis thaliana
  misc_feature (1)..(1156): Ceres Seq. ID no. 13576021
  misc_feature (1)..(1156): Ortholog of  Ceres SEQ ID NO 13581579 as cited in SEQ ID NO 58361
  misc_feature (1)..(1156): Ortholog of  Ceres SEQ ID NO 13598714 as cited in SEQ ID NO 62656
  misc_feature (1)..(1156): Ortholog of  Ceres SEQ ID NO 13596969 as cited in SEQ ID NO 63375
  misc_feature (1)..(1156): Ortholog of  Ceres SEQ ID NO 13597870 as cited in SEQ ID NO 64982
  misc_feature (1)..(1156): Ortholog of  Ceres SEQ ID NO 13656123 as cited in SEQ ID NO 65212
  misc_feature (1)..(1156): Ortholog of  Ceres SEQ ID NO 13595926 as cited in SEQ ID NO 67778
  misc_feature (1)..(1156): Ortholog of  Ceres SEQ ID NO 12567001 as cited in SEQ ID NO 0
tatacacatatagagagattgagtgaaaatatttttttttaaatggttgtggtgaacaaaacgaatctcttattgcttcttctctctctatgtctcaccctcgacctctcctccgcacaactccgccgtaacttctacgccggaagttgtcctaacgtcgaacaaatcgttagaaacgccgtacagaaaaaagtccaacaaactttcaccaccattcccgccactctacgcctctatttccatgattgtttcgtcaatgggtgtgatgcatcagtgatgatagcgtcaacaaataataataaggcggagaaggatcatgaggaaaatttatcgttggccggagatggattcgacaccgtcattaaagctaaagaagctctcgatgccgtcccaaattgtcgtaacaaagtttcatgcgctgatattctcacgatggccactcgtgacgtcgttaatcttgcgggtggaccacaatacgacgtggaattgggaaggctagatggactatcatcaacagcggctagcgtcggagggaagttgccgcatccgaccgacgatgtcaataaactcacttcactcttcgccaaaaacggccttagccttaacgacatgatcgctctctccggggcacacacattaggattcgcgcattgcacaaaagtgttcaatcggatatacactttcaacaagacaactaaagtggatcccacggttaacaaagattacgtgacagagctaaaagcgtcgtgtcctcgaaacatagatccaagagtggctattaacatggacccaacaacaccaagacaattcgacaacgtttactacaaaaacttgcaacaagggaaaggattgttcacgtcggatcaagtcttattcacggatcgtcggtcaaagccaaccgttgacttatgggctaataatggacagttgtttaatcaagcttttattaactcgatgatcaagcttggtcgtgttggtgttaaaactggtagtaatggtaatatccgtcgtgattgtggagcttttaattgatttaaatatatctgtattagattttgtttattgtatttgggtataggatgggtcatgggtctcataaagctggttcagctaaattgaaaattgtaataaatctctgtcttgggtttcagtttgc

SEQ ID NO: 45356 - protein, 329 aa, Arabidopsis thaliana
  peptide (1)..(329): Ceres Seq. ID no. 13576022
MVVVNKTNLLLLLLSLCLTLDLSSAQLRRNFYAGSCPNVEQIVRNAVQKKVQQTFTTIPATLRLYFHDCFVNGCDASVMIASTNNNKAEKDHEENLSLAGDGFDTVIKAKEALDAVPNCRNKVSCADILTMATRDVVNLAGGPQYDVELGRLDGLSSTAASVGGKLPHPTDDVNKLTSLFAKNGLSLNDMIALSGAHTLGFAHCTKVFNRIYTFNKTTKVDPTVNKDYVTELKASCPRNIDPRVAINMDPTTPRQFDNVYYKNLQQGKGLFTSDQVLFTDRRSKPTVDLWANNGQLFNQAFINSMIKLGRVGVKTGSNGNIRRDCGAFN

SEQ ID NO: 45357 - protein, 251 aa, Arabidopsis thaliana
  peptide (1)..(251): Ceres Seq. ID no. 13576023
MIASTNNNKAEKDHEENLSLAGDGFDTVIKAKEALDAVPNCRNKVSCADILTMATRDVVNLAGGPQYDVELGRLDGLSSTAASVGGKLPHPTDDVNKLTSLFAKNGLSLNDMIALSGAHTLGFAHCTKVFNRIYTFNKTTKVDPTVNKDYVTELKASCPRNIDPRVAINMDPTTPRQFDNVYYKNLQQGKGLFTSDQVLFTDRRSKPTVDLWANNGQLFNQAFINSMIKLGRVGVKTGSNGNIRRDCGAFN

SEQ ID NO: 45358 - protein, 199 aa, Arabidopsis thaliana
  peptide (1)..(199): Ceres Seq. ID no. 13576024
MATRDVVNLAGGPQYDVELGRLDGLSSTAASVGGKLPHPTDDVNKLTSLFAKNGLSLNDMIALSGAHTLGFAHCTKVFNRIYTFNKTTKVDPTVNKDYVTELKASCPRNIDPRVAINMDPTTPRQFDNVYYKNLQQGKGLFTSDQVLFTDRRSKPTVDLWANNGQLFNQAFINSMIKLGRVGVKTGSNGNIRRDCGAFN

SEQ ID NO: 45359 - DNA, 1426 bp, Arabidopsis thaliana
  misc_feature (1)..(1426): Ceres Seq. ID no. 12560665
  misc_feature (1)..(1426): Ortholog of  Ceres SEQ ID NO 13594345 as cited in SEQ ID NO 58043
  misc_feature (1)..(1426): Ortholog of  Ceres SEQ ID NO 13597574 as cited in SEQ ID NO 64677
  misc_feature (1)..(1426): Ortholog of  Ceres SEQ ID NO 13662880 as cited in SEQ ID NO 65422
  misc_feature (1)..(1426): Ortholog of  Ceres SEQ ID NO 12779098 as cited in SEQ ID NO 67698
  misc_feature (1)..(1426): Ortholog of  Ceres SEQ ID NO 13591190 as cited in SEQ ID NO 68044
  misc_feature (1)..(1426): Ortholog of  Ceres SEQ ID NO 13596089 as cited in SEQ ID NO 68373
aagtcttcttcttcattactcgcaccatgaccaaaccctccgacccaaccagagactcccacgtggcagttctcgcttttcctttcggcactcatgcagctcctctcctcaccgtcacgcgccgcctcgcctccgcctctccttccaccgtcttctctttcttcaacaccgcacaatccaactcttcgttattttcctccggtgacgaagcagatcgtccggcgaacatcagagtatacgatattgccgacggtgttccggagggatacgtgtttagcgggagaccacaggaggcgatcgagctgtttcttcaagctgcgccggagaatttccggagagaaatcgcgaaggcggagacggaggttggtacggaagtgaaatgtttgatgactgatgcgttcttctggttcgcggctgatatggcgacggagataaatgcgtcgtggattgcgttttggaccgccggagcaaactcactctctgctcatctctacacagatctcatcagagaaaccatcggtgtcaaagaagtaggtgagcgtatggaggagacaataggggttatctcaggaatggagaagatcagagtcaaagatacaccagaaggagttgtgtttgggaatttagactctgttttctcaaagatgcttcatcaaatgggtcttgctttgcctcgtgccactgctgttttcatcaattcttttgaagatttggatcctacattgacgaataacctcagatcgagatttaaacgatatctgaacatcggtcctctcgggttattatcttctacattgcaacaactagtgcaagatcctcacggttgtttggcttggatggagaagagatcttctggttctgtggcgtacattagctttggtacggtcatgacaccgcctcctggagagcttgcggcgatagcagaagggttggaatcgagtaaagtgccgtttgtttggtcgcttaaggagaagagcttggttcagttaccaaaagggtttttggataggacaagagagcaagggatagtggttccatgggcaccgcaagtggaactgctgaaacacgaagcaacgggtgtgtttgtgacgcattgtggatggaactcggtgttggagagtgtatcgggtggtgtaccgatgatttgcaggccattttttggggatcagagattgaacggaagagcggtggaggttgtgtgggagattggaatgacgattatcaatggagtcttcacgaaagatgggtttgagaagtgtttggataaagttttagttcaagatgatggtaagaagatgaaatgtaatgctaagaaacttaaagaactagcttacgaagctgtctcttctaaaggaaggtcctctgagaatttcagaggattgttggatgcagttgtaaacattatttgaatgtgaaatgattttgg

SEQ ID NO: 45360 - protein, 468 aa, Arabidopsis thaliana
  peptide (1)..(468): Ceres Seq. ID no. 12560666
VFFFITRTMTKPSDPTRDSHVAVLAFPFGTHAAPLLTVTRRLASASPSTVFSFFNTAQSNSSLFSSGDEADRPANIRVYDIADGVPEGYVFSGRPQEAIELFLQAAPENFRREIAKAETEVGTEVKCLMTDAFFWFAADMATEINASWIAFWTAGANSLSAHLYTDLIRETIGVKEVGERMEETIGVISGMEKIRVKDTPEGVVFGNLDSVFSKMLHQMGLALPRATAVFINSFEDLDPTLTNNLRSRFKRYLNIGPLGLLSSTLQQLVQDPHGCLAWMEKRSSGSVAYISFGTVMTPPPGELAAIAEGLESSKVPFVWSLKEKSLVQLPKGFLDRTREQGIVVPWAPQVELLKHEATGVFVTHCGWNSVLESVSGGVPMICRPFFGDQRLNGRAVEVVWEIGMTIINGVFTKDGFEKCLDKVLVQDDGKKMKCNAKKLKELAYEAVSSKGRSSENFRGLLDAVVNII

SEQ ID NO: 45361 - protein, 460 aa, Arabidopsis thaliana
  peptide (1)..(460): Ceres Seq. ID no. 12560667
MTKPSDPTRDSHVAVLAFPFGTHAAPLLTVTRRLASASPSTVFSFFNTAQSNSSLFSSGDEADRPANIRVYDIADGVPEGYVFSGRPQEAIELFLQAAPENFRREIAKAETEVGTEVKCLMTDAFFWFAADMATEINASWIAFWTAGANSLSAHLYTDLIRETIGVKEVGERMEETIGVISGMEKIRVKDTPEGVVFGNLDSVFSKMLHQMGLALPRATAVFINSFEDLDPTLTNNLRSRFKRYLNIGPLGLLSSTLQQLVQDPHGCLAWMEKRSSGSVAYISFGTVMTPPPGELAAIAEGLESSKVPFVWSLKEKSLVQLPKGFLDRTREQGIVVPWAPQVELLKHEATGVFVTHCGWNSVLESVSGGVPMICRPFFGDQRLNGRAVEVVWEIGMTIINGVFTKDGFEKCLDKVLVQDDGKKMKCNAKKLKELAYEAVSSKGRSSENFRGLLDAVVNII

SEQ ID NO: 45362 - protein, 340 aa, Arabidopsis thaliana
  peptide (1)..(340): Ceres Seq. ID no. 12560668
MTDAFFWFAADMATEINASWIAFWTAGANSLSAHLYTDLIRETIGVKEVGERMEETIGVISGMEKIRVKDTPEGVVFGNLDSVFSKMLHQMGLALPRATAVFINSFEDLDPTLTNNLRSRFKRYLNIGPLGLLSSTLQQLVQDPHGCLAWMEKRSSGSVAYISFGTVMTPPPGELAAIAEGLESSKVPFVWSLKEKSLVQLPKGFLDRTREQGIVVPWAPQVELLKHEATGVFVTHCGWNSVLESVSGGVPMICRPFFGDQRLNGRAVEVVWEIGMTIINGVFTKDGFEKCLDKVLVQDDGKKMKCNAKKLKELAYEAVSSKGRSSENFRGLLDAVVNII

SEQ ID NO: 45363 - DNA, 2893 bp, Arabidopsis thaliana
  misc_feature (1)..(2893): Ceres Seq. ID no. 13576025
  misc_feature (1)..(2893): Ortholog of  Ceres SEQ ID NO 14313575 as cited in SEQ ID NO 58703
aaaaaaaaaaaaaaaaaaacttttcaaattcatctttggtttctgcagcagcaacaacaaccgagccctgttcgttagggttttcggtttttgttagcttttcttcttcttcttcttcgtttccttccacctgaattgttgtaaccatggcggagaaagtatcggaggacgttatgcttctacacggtgacctcgatttgaaaattgttaaggctaggaggttacctaacatggatatgttctcagaacatttgcgccgtctcttcaccgcctgtaacgcctgtgctagacccaccgataccgatgatgtcgatcccagagataaaggcgaattcggtgataaaaacatccgtagccaccgtaaggttatcaccagcgatccttacgtcaccgtcgtcgttcctcaagcgactctagctcgaacacgtgttttgaaaaactcacaagagcctctttgggacgagaaattcaacatttctatagcgcatccgtttgcttatctcgagttccaggtcaaagacgacgatgttttcggtgctcaaatcattggcacggctaagatcccggttcgagacatcgcatcgggagaacgcatttctggttggtttcctgtactcggtgcttcgggaaaaccgcctaaggcagaaactgctattttcatcgatatgaaatttactccgtttgaccagatccatagctaccgatgtggaatcgccggagatccggagcgtaggggtgttagacggacttatttccctgtgaggaaaggaagtcaggtgaggctttaccaggacgctcatgttatggacggaacgttgccggcgattgggttagataacgggaaagtttatgagcatgggaagtgttgggaagatatatgttatgctatatctgaggctcaccatatgatttacattgttggttggtctatcttccataagattaagcttgttagggaaacaaaagttccaagagataaggatatgacgcttggggaattgctcaaatacaaatcccaggaaggtgttcgagttttgctacttgtatgggatgataagacttctcatgataagtttgggataaaaacgcctggagttatggggacacatgatgaggagactaggaagttcttcaagcattcttctgtgatatgcgttttgtcaccccggtatgccagcagtaagcttgggttgttcaaacaacaggcaagtcctagctcttctatatatatcatgacagttgttggaactctcttcacgcaccatcaaaagtgtgttcttgtagacactcaggctgttggtaataatcgcaaggtcaccgcttttattggaggtctagatctttgtgatggccgttatgacacacctgagcataggatactccacgatcttgacactgtatttaaggatgatttccacaatcctacatttccagctggtaccaaggccccaagacaaccttggcacgatttgcactgtaggatagatgggcctgcggcatatgatgttctcataaactttgagcagcgatggagaaaggcaacacgatggaaggagtttagcttacgtttaaaggggaaaactcactggcaagatgatgctttgatccggatagggcgtatatcatggattctgagtccagtgtttaaatttctgaaggatggtacttcgataattccagaggacgatccatgtgtttgggtttctaaagaagatgatccagagaactggcatgttcagatattccgttctatcgactcaggatccgtgaaaggatttccaaaatatgaagatgaggctgaggcccagcatctggaatgtgccaagcgtcttgttgtagataaaagcatccagactgcatacatccagacaatcagatctgctcagcatttcatatatatcgagaatcagtatttcctgggttcttcttatgcttggccttcttatagagacgcaggagctgacaatcttattcctatggagttggcactaaagattgttagcaaaatcagagctaaggaaagatttgccgtatatgttgtcataccattgtggcctgaaggcgacccaaagtctggccctgtgcaagaaattctatattggcagagccaaactatgcagatgatgtatgatgttatagcaaaagaactgaaagcggtgcaatcagatgctcatcctctcgattaccttaacttttactgccttggtaaacgagagcagcttccagatgatatgccagccaccaatggcagtgtggtatcagattcttataatttccagcgtttcatgatttacgtgcacgcaaaagggatgatagtagatgatgagtatgtactcatgggatctgctaatatcaaccaaagatctatggcaggcaccaaagatactgaaatcgccatgggcgcataccaacctaatcatacatgggctcacaagggaagacacccacgtggccaggtgtatggatacagaatgtcactatgggcagagcatttaggcaaaactggagatgagtttgtggagccatcagatctggaatgtctgaagaaggtgaacacaatctctgaagaaaactggaaaagattcatagacccgaaattctcagagctacaaggtcacttaataaagtatcctctacaagtagacgttgatggtaaagtaagccctcttcctgattacgagaccttcccagatgttggtggtaagatcattggagctcattccatggctcttcctgacactttaaccacgtaatgtgaatgttcaatgtaaatttcagcatttgttttggggtttcttttgatcctgaataatattagctgaaagtgttgtttgagttgttgtacatttaactgtgttgtttcttttttatacattcttttgtgattgtcgtc

SEQ ID NO: 45364 - protein, 868 aa, Arabidopsis thaliana
  peptide (1)..(868): Ceres Seq. ID no. 13576026
MAEKVSEDVMLLHGDLDLKIVKARRLPNMDMFSEHLRRLFTACNACARPTDTDDVDPRDKGEFGDKNIRSHRKVITSDPYVTVVVPQATLARTRVLKNSQEPLWDEKFNISIAHPFAYLEFQVKDDDVFGAQIIGTAKIPVRDIASGERISGWFPVLGASGKPPKAETAIFIDMKFTPFDQIHSYRCGIAGDPERRGVRRTYFPVRKGSQVRLYQDAHVMDGTLPAIGLDNGKVYEHGKCWEDICYAISEAHHMIYIVGWSIFHKIKLVRETKVPRDKDMTLGELLKYKSQEGVRVLLLVWDDKTSHDKFGIKTPGVMGTHDEETRKFFKHSSVICVLSPRYASSKLGLFKQQASPSSSIYIMTVVGTLFTHHQKCVLVDTQAVGNNRKVTAFIGGLDLCDGRYDTPEHRILHDLDTVFKDDFHNPTFPAGTKAPRQPWHDLHCRIDGPAAYDVLINFEQRWRKATRWKEFSLRLKGKTHWQDDALIRIGRISWILSPVFKFLKDGTSIIPEDDPCVWVSKEDDPENWHVQIFRSIDSGSVKGFPKYEDEAEAQHLECAKRLVVDKSIQTAYIQTIRSAQHFIYIENQYFLGSSYAWPSYRDAGADNLIPMELALKIVSKIRAKERFAVYVVIPLWPEGDPKSGPVQEILYWQSQTMQMMYDVIAKELKAVQSDAHPLDYLNFYCLGKREQLPDDMPATNGSVVSDSYNFQRFMIYVHAKGMIVDDEYVLMGSANINQRSMAGTKDTEIAMGAYQPNHTWAHKGRHPRGQVYGYRMSLWAEHLGKTGDEFVEPSDLECLKKVNTISEENWKRFIDPKFSELQGHLIKYPLQVDVDGKVSPLPDYETFPDVGGKIIGAHSMALPDTLTT

SEQ ID NO: 45365 - protein, 859 aa, Arabidopsis thaliana
  peptide (1)..(859): Ceres Seq. ID no. 13576027
MLLHGDLDLKIVKARRLPNMDMFSEHLRRLFTACNACARPTDTDDVDPRDKGEFGDKNIRSHRKVITSDPYVTVVVPQATLARTRVLKNSQEPLWDEKFNISIAHPFAYLEFQVKDDDVFGAQIIGTAKIPVRDIASGERISGWFPVLGASGKPPKAETAIFIDMKFTPFDQIHSYRCGIAGDPERRGVRRTYFPVRKGSQVRLYQDAHVMDGTLPAIGLDNGKVYEHGKCWEDICYAISEAHHMIYIVGWSIFHKIKLVRETKVPRDKDMTLGELLKYKSQEGVRVLLLVWDDKTSHDKFGIKTPGVMGTHDEETRKFFKHSSVICVLSPRYASSKLGLFKQQASPSSSIYIMTVVGTLFTHHQKCVLVDTQAVGNNRKVTAFIGGLDLCDGRYDTPEHRILHDLDTVFKDDFHNPTFPAGTKAPRQPWHDLHCRIDGPAAYDVLINFEQRWRKATRWKEFSLRLKGKTHWQDDALIRIGRISWILSPVFKFLKDGTSIIPEDDPCVWVSKEDDPENWHVQIFRSIDSGSVKGFPKYEDEAEAQHLECAKRLVVDKSIQTAYIQTIRSAQHFIYIENQYFLGSSYAWPSYRDAGADNLIPMELALKIVSKIRAKERFAVYVVIPLWPEGDPKSGPVQEILYWQSQTMQMMYDVIAKELKAVQSDAHPLDYLNFYCLGKREQLPDDMPATNGSVVSDSYNFQRFMIYVHAKGMIVDDEYVLMGSANINQRSMAGTKDTEIAMGAYQPNHTWAHKGRHPRGQVYGYRMSLWAEHLGKTGDEFVEPSDLECLKKVNTISEENWKRFIDPKFSELQGHLIKYPLQVDVDGKVSPLPDYETFPDVGGKIIGAHSMALPDTLTT

SEQ ID NO: 45366 - protein, 840 aa, Arabidopsis thaliana
  peptide (1)..(840): Ceres Seq. ID no. 13576028
MDMFSEHLRRLFTACNACARPTDTDDVDPRDKGEFGDKNIRSHRKVITSDPYVTVVVPQATLARTRVLKNSQEPLWDEKFNISIAHPFAYLEFQVKDDDVFGAQIIGTAKIPVRDIASGERISGWFPVLGASGKPPKAETAIFIDMKFTPFDQIHSYRCGIAGDPERRGVRRTYFPVRKGSQVRLYQDAHVMDGTLPAIGLDNGKVYEHGKCWEDICYAISEAHHMIYIVGWSIFHKIKLVRETKVPRDKDMTLGELLKYKSQEGVRVLLLVWDDKTSHDKFGIKTPGVMGTHDEETRKFFKHSSVICVLSPRYASSKLGLFKQQASPSSSIYIMTVVGTLFTHHQKCVLVDTQAVGNNRKVTAFIGGLDLCDGRYDTPEHRILHDLDTVFKDDFHNPTFPAGTKAPRQPWHDLHCRIDGPAAYDVLINFEQRWRKATRWKEFSLRLKGKTHWQDDALIRIGRISWILSPVFKFLKDGTSIIPEDDPCVWVSKEDDPENWHVQIFRSIDSGSVKGFPKYEDEAEAQHLECAKRLVVDKSIQTAYIQTIRSAQHFIYIENQYFLGSSYAWPSYRDAGADNLIPMELALKIVSKIRAKERFAVYVVIPLWPEGDPKSGPVQEILYWQSQTMQMMYDVIAKELKAVQSDAHPLDYLNFYCLGKREQLPDDMPATNGSVVSDSYNFQRFMIYVHAKGMIVDDEYVLMGSANINQRSMAGTKDTEIAMGAYQPNHTWAHKGRHPRGQVYGYRMSLWAEHLGKTGDEFVEPSDLECLKKVNTISEENWKRFIDPKFSELQGHLIKYPLQVDVDGKVSPLPDYETFPDVGGKIIGAHSMALPDTLTT

SEQ ID NO: 45367 - DNA, 1404 bp, Arabidopsis thaliana
  misc_feature (1)..(1404): Ceres Seq. ID no. 12560681
  misc_feature (1)..(1404): Ortholog of  Ceres SEQ ID NO 12613390 as cited in SEQ ID NO 67690
attaccgtcaccggtgagattcctccaaaatcgggactttttctcaggacgtttgagatgcattcgcgctccgccttgctctatagattcctccgtccggcgtcgagatgcttctcctcttcctcggctgtaactccggtcaccgtaacgcaatctcccaagagtctcgaggctcttcgagctcggctggcgaatgagtcgccttccctaaccgatttcatccacggcgatacctattcggtggaagttggaaccaaaaagaaacctctcccgaaacctaaatggatgaaggaatcaattcccggcggcgagagatatgtccagatcaagaagaaattgagagaccttaagcttcacaccgtctgcgaggaagcgaaatgtcccaatctcggtgagtgctggtctggtggtgaaactggaaccgccaccgctacgattatgatccttggggatacatgtacacgcggctgcaggttttgtaatgtgaagacatcgcgtacacctccaccgcctgatccaaatgaacctaacaatgtggctgaagcaattgcttcctggggggttgattatgttgtgatcaccagtgtagatcgagatgatttacctgatcaagggagtggtcattttgctgaaactgttcagagattgaaattcttgaagccggagatgttgattgaagcactagttcctgatttccgcggagatggtggatgtgttgagaaggtttccaagtcagggcttgatgtcttagctcacaacattgagacagttgaagagcttcagagttttgtgcgggaccatcgtgctaactttaagcagtcattggatgtgcttaggatggctaaggagtatgcacctgcaggcaccttaacaaagacttctgtaatgctgggatgtggagagacccctgatcaagtggttaagacaatggagaaggtgagagcagcaggggttgacgttatgacatttggccaatatatgcgaccatctaaacgccacatgccagtagctgagtacgtgacaccagatgccttcgagaggtatcgccttcttggcatggaaatgggattcagatacgtagcatcaggaccaatggtgaggtcgtcgtacaaagcgggagagtactacataaagtcgatgatagaagccgatcgagtggcttctccttctacatccccgtagattacacactataatatgtgaattctttcactttattgctttgtttcttctgcgggtaagccattcacaacacttatccgccacattctgaataatgtaatactattattgtccaatcttccatgtgtgtctagtctctctctctttctcatactatcattgtacttgtggaatgtttcatctttctctgatatataccagtcactctgttcttttaggagc

SEQ ID NO: 45368 - protein, 393 aa, Arabidopsis thaliana
  peptide (1)..(393): Ceres Seq. ID no. 12560682
ITVTGEIPPKSGLFLRTFEMHSRSALLYRFLRPASRCFSSSSAVTPVTVTQSPKSLEALRARLANESPSLTDFIHGDTYSVEVGTKKKPLPKPKWMKESIPGGERYVQIKKKLRDLKLHTVCEEAKCPNLGECWSGGETGTATATIMILGDTCTRGCRFCNVKTSRTPPPPDPNEPNNVAEAIASWGVDYVVITSVDRDDLPDQGSGHFAETVQRLKFLKPEMLIEALVPDFRGDGGCVEKVSKSGLDVLAHNIETVEELQSFVRDHRANFKQSLDVLRMAKEYAPAGTLTKTSVMLGCGETPDQVVKTMEKVRAAGVDVMTFGQYMRPSKRHMPVAEYVTPDAFERYRLLGMEMGFRYVASGPMVRSSYKAGEYYIKSMIEADRVASPSTSP

SEQ ID NO: 45369 - protein, 374 aa, Arabidopsis thaliana
  peptide (1)..(374): Ceres Seq. ID no. 12560683
MHSRSALLYRFLRPASRCFSSSSAVTPVTVTQSPKSLEALRARLANESPSLTDFIHGDTYSVEVGTKKKPLPKPKWMKESIPGGERYVQIKKKLRDLKLHTVCEEAKCPNLGECWSGGETGTATATIMILGDTCTRGCRFCNVKTSRTPPPPDPNEPNNVAEAIASWGVDYVVITSVDRDDLPDQGSGHFAETVQRLKFLKPEMLIEALVPDFRGDGGCVEKVSKSGLDVLAHNIETVEELQSFVRDHRANFKQSLDVLRMAKEYAPAGTLTKTSVMLGCGETPDQVVKTMEKVRAAGVDVMTFGQYMRPSKRHMPVAEYVTPDAFERYRLLGMEMGFRYVASGPMVRSSYKAGEYYIKSMIEADRVASPSTSP

SEQ ID NO: 45370 - protein, 298 aa, Arabidopsis thaliana
  peptide (1)..(298): Ceres Seq. ID no. 12560684
MKESIPGGERYVQIKKKLRDLKLHTVCEEAKCPNLGECWSGGETGTATATIMILGDTCTRGCRFCNVKTSRTPPPPDPNEPNNVAEAIASWGVDYVVITSVDRDDLPDQGSGHFAETVQRLKFLKPEMLIEALVPDFRGDGGCVEKVSKSGLDVLAHNIETVEELQSFVRDHRANFKQSLDVLRMAKEYAPAGTLTKTSVMLGCGETPDQVVKTMEKVRAAGVDVMTFGQYMRPSKRHMPVAEYVTPDAFERYRLLGMEMGFRYVASGPMVRSSYKAGEYYIKSMIEADRVASPSTSP

SEQ ID NO: 45371 - DNA, 1451 bp, Arabidopsis thaliana
  misc_feature (1)..(1451): Ceres Seq. ID no. 12561269
  misc_feature (1)..(1451): Ortholog of  Ceres SEQ ID NO 14304479 as cited in SEQ ID NO 53547
aaaaaaaaactccaaagtcaaaggaactaaaaatcaaacaatgtccttcctttgaatgattcaccatcttctctttcaccttcccccattttcaaaaacccagaaacaaagcttctcactttcttcacccaaccatgaattccccaagacccatctccgtcgtctccaccttcgcttcaccatcctccacctctgacccaacccgaaaacccttaagcttatggccaggtatgtaccattcacctgtcaccaccgctctttgggaagccagatccaaaatcttcgaatctcttctcgatcctcctaaagacgctccaccacagagccagcttctcaccagaactccttctcatagccgtaccaccattttctaccctttctccactgatttcattctcagagagcaatacagagatccttggaacgaggtccgtatcgggatcttgctcgaagatctcgatgctttagccggcactatctccgtcaagcattgttctgatgatgatagtacaacgaggccactcttgcttgttacagcttctgttcataagattgtcttaaagaagccgatttgtgtcgacattgatctcaagattgttgcttctgtcatttgggttggtcgttcatctatcgagattcaactcgaagttatgcaatccgaattgaaagatgtcaaggcttcttcagattctgttgctttaactgcaaatttcatttttgtggcgcgtgattctaagactggtaaagctgctcctatcaaccgtctttctcctgaaaccgaggttgagaaacttctctttgaggaagctgaagctaggaataacttaaggaagaagaagagaggaggtgacagaagggaatttgatcacggggagtgtaagaagcttgaggcttggttggctgaaggaaggattttctctgacatgccagctcttgctgacagaaacagcattcttcttaaagacactcgtcttgagaattcgctgatatgccaaccgcagcagaggaacatccatggtaggatctttggagggtttttaatgcatagagcatttgagttggctttctctactgcttatacgtttgcgggtctagtgccttacttcttagaagttgatcacgtcgatttcctaagaccggtggacgtcggggatttcttacgtttcaaatcctgtgttctttacactcaactggataaacaggattgtccgctcatcaatatcgaagttgttgctcatgttacaagtccagagattcgctccagtgaggtttcaaatacattctacttcaagttcactgtaaggccagaggcaaaggccagaaacaatgggtttaaacttcgaaatgtagttcctgccacagaggaagaagctcgtcatatcctcgagcgcatggatgcagaagctttgaagtcaagcaaacaacaatgtgtaggcacaattcttcagtaa

SEQ ID NO: 45372 - protein, 438 aa, Arabidopsis thaliana
  peptide (1)..(438): Ceres Seq. ID no. 12561270
MNSPRPISVVSTFASPSSTSDPTRKPLSLWPGMYHSPVTTALWEARSKIFESLLDPPKDAPPQSQLLTRTPSHSRTTIFYPFSTDFILREQYRDPWNEVRIGILLEDLDALAGTISVKHCSDDDSTTRPLLLVTASVHKIVLKKPICVDIDLKIVASVIWVGRSSIEIQLEVMQSELKDVKASSDSVALTANFIFVARDSKTGKAAPINRLSPETEVEKLLFEEAEARNNLRKKKRGGDRREFDHGECKKLEAWLAEGRIFSDMPALADRNSILLKDTRLENSLICQPQQRNIHGRIFGGFLMHRAFELAFSTAYTFAGLVPYFLEVDHVDFLRPVDVGDFLRFKSCVLYTQLDKQDCPLINIEVVAHVTSPEIRSSEVSNTFYFKFTVRPEAKARNNGFKLRNVVPATEEEARHILERMDAEALKSSKQQCVGTILQ

SEQ ID NO: 45373 - protein, 406 aa, Arabidopsis thaliana
  peptide (1)..(406): Ceres Seq. ID no. 12561271
MYHSPVTTALWEARSKIFESLLDPPKDAPPQSQLLTRTPSHSRTTIFYPFSTDFILREQYRDPWNEVRIGILLEDLDALAGTISVKHCSDDDSTTRPLLLVTASVHKIVLKKPICVDIDLKIVASVIWVGRSSIEIQLEVMQSELKDVKASSDSVALTANFIFVARDSKTGKAAPINRLSPETEVEKLLFEEAEARNNLRKKKRGGDRREFDHGECKKLEAWLAEGRIFSDMPALADRNSILLKDTRLENSLICQPQQRNIHGRIFGGFLMHRAFELAFSTAYTFAGLVPYFLEVDHVDFLRPVDVGDFLRFKSCVLYTQLDKQDCPLINIEVVAHVTSPEIRSSEVSNTFYFKFTVRPEAKARNNGFKLRNVVPATEEEARHILERMDAEALKSSKQQCVGTILQ

SEQ ID NO: 45374 - protein, 266 aa, Arabidopsis thaliana
  peptide (1)..(266): Ceres Seq. ID no. 12561272
MQSELKDVKASSDSVALTANFIFVARDSKTGKAAPINRLSPETEVEKLLFEEAEARNNLRKKKRGGDRREFDHGECKKLEAWLAEGRIFSDMPALADRNSILLKDTRLENSLICQPQQRNIHGRIFGGFLMHRAFELAFSTAYTFAGLVPYFLEVDHVDFLRPVDVGDFLRFKSCVLYTQLDKQDCPLINIEVVAHVTSPEIRSSEVSNTFYFKFTVRPEAKARNNGFKLRNVVPATEEEARHILERMDAEALKSSKQQCVGTILQ

SEQ ID NO: 45375 - DNA, 1677 bp, Arabidopsis thaliana
  misc_feature (1)..(1677): Ceres Seq. ID no. 12600469
  misc_feature (1)..(1677): Ortholog of  Ceres SEQ ID NO 14311305 as cited in SEQ ID NO 53731
  misc_feature (1)..(1677): Ortholog of  Ceres SEQ ID NO 13501807 as cited in SEQ ID NO 67558
ttcttctctatctctctcgccaaagaatcgtacttcttctctcaggttttaaggagatgggatctggtcaatggcacgttgagaaaaggtctacgtttaggaatgattcgtttgtgagagaatatggtatagttccagaaactggttgtctttcaatcatagttcttggtgcttctggtgatcttgctaagaagaagacttttcctgctctttttaacttataccgtcagggatttctcaatccagatgaagttcatattttcgggtatgcgaggactaagatttctgatgaagagctgagagataggattcgtggatatcttgttgatgagaagaatgctgagcaagctgaagctttgtcaaagtttctgcagctgattaagtatgtgagtggcccttatgatgctgaggaggggttccagagattagacaaggcaatttcagagcacgaaatctccaaaaatagtactgaagggtcttctagaagactgttttatcttgcacttccaccgtctgtttatccttctgtatgcaagatgatcaagacgtgctgcatgaacaaatctgatcttggtggatggacacggattgttgtggagaagccatttggcaaggaccttgaatctgcagagcaactgagttctcagattggagagttatttgatgaatcacagatctatcgtatagaccattatcttgggaaggaattagttcaaaacatgttggtcctccggtttgcaaatcgctttttcttgccactttggaaccgtgacaatatcgagaacgtgcagattgttttcagggaagattttggaactgaagggcgtggcggatattttgacgaatatggaataatccgtgatattattcaaaaccatctgctacaggttctttgccttgttgccatggagaaaccaatatctcttaaacctgagcatatccgggatgagaaagtgaaggtgcttcaatctgtggttccgataagcgatgacgaggtagttcttggacaatacgaaggatatagggatgatgatactgttccaaacgactcaaacactccaacatttgccacaacaatccttcgcatacacaacgaaagatgggaaggtgttccatttatattaaaggccggaaaagcgttgaattcaaggaaggcagaaattcgcattcaattcaaggatgtcccaggcgacatattcagatgtcaaaagcaaggaaggaacgagtttgtgatacgcttgcaaccttcagaggcaatgtacatgaaactaactgttaagcaaccaggtctagatatgaatactgtgcaaagtgaactagacttgtcgtatgggcaacggtatcaaggtgtcgctatccctgaggcatacgagcgcttaattcttgacacaatcaaaggcgatcaacaacatttcgttcgtagagacgaattaaaggttgcgtgggagatcttcacgccgctactccacaggatcgacaaaggagaagtaaagtcaatcccatacaaaccaggaagccgaggaccgaaagaagctgatcagctactagagaaagctggttatcttcagactcacggctatatctggatccctcctacactataaaaccctacatatatataaatacacaatacatgtatctacatgtatatgtataaattatgctgaatagtccctc

SEQ ID NO: 45376 - protein, 533 aa, Arabidopsis thaliana
  peptide (1)..(533): Ceres Seq. ID no. 12600470
LLYLSRQRIVLLLSGFKEMGSGQWHVEKRSTFRNDSFVREYGIVPETGCLSIIVLGASGDLAKKKTFPALFNLYRQGFLNPDEVHIFGYARTKISDEELRDRIRGYLVDEKNAEQAEALSKFLQLIKYVSGPYDAEEGFQRLDKAISEHEISKNSTEGSSRRLFYLALPPSVYPSVCKMIKTCCMNKSDLGGWTRIVVEKPFGKDLESAEQLSSQIGELFDESQIYRIDHYLGKELVQNMLVLRFANRFFLPLWNRDNIENVQIVFREDFGTEGRGGYFDEYGIIRDIIQNHLLQVLCLVAMEKPISLKPEHIRDEKVKVLQSVVPISDDEVVLGQYEGYRDDDTVPNDSNTPTFATTILRIHNERWEGVPFILKAGKALNSRKAEIRIQFKDVPGDIFRCQKQGRNEFVIRLQPSEAMYMKLTVKQPGLDMNTVQSELDLSYGQRYQGVAIPEAYERLILDTIKGDQQHFVRRDELKVAWEIFTPLLHRIDKGEVKSIPYKPGSRGPKEADQLLEKAGYLQTHGYIWIPPTL

SEQ ID NO: 45377 - protein, 515 aa, Arabidopsis thaliana [sequence omitted]

SEQ ID NO: 45378 - protein, 355 aa, Arabidopsis thaliana
  peptide (1)..(355): Ceres Seq. ID no. 12600472
MIKTCCMNKSDLGGWTRIVVEKPFGKDLESAEQLSSQIGELFDESQIYRIDHYLGKELVQNMLVLRFANRFFLPLWNRDNIENVQIVFREDFGTEGRGGYFDEYGIIRDIIQNHLLQVLCLVAMEKPISLKPEHIRDEKVKVLQSVVPISDDEVVLGQYEGYRDDDTVPNDSNTPTFATTILRIHNERWEGVPFILKAGKALNSRKAEIRIQFKDVPGDIFRCQKQGRNEFVIRLQPSEAMYMKLTVKQPGLDMNTVQSELDLSYGQRYQGVAIPEAYERLILDTIKGDQQHFVRRDELKVAWEIFTPLLHRIDKGEVKSIPYKPGSRGPKEADQLLEKAGYLQTHGYIWIPPTL

SEQ ID NO: 45379 - DNA, 2510 bp, Arabidopsis thaliana
  misc_feature (1)..(2510): Ceres Seq. ID no. 12561296
  misc_feature (1)..(2510): Ortholog of  Ceres SEQ ID NO 14310886 as cited in SEQ ID NO 54536
  misc_feature (1)..(2510): Ortholog of  Ceres SEQ ID NO 14315515 as cited in SEQ ID NO 57454
atacacaaacagtttctcgctctaaaccctcaaagttgttctctctctctctcttctcctttttcacagccatttattagattcctctctcacaattagtctcttctcttttctattggattgttgtattagactgatagctcaaggaacccaaaaaacaaaaaccaaaaaagataacataaattatcttcttgaaattgttctctttcttgctttgattttttcaattttcttatactgagtttttgtatttctgtaaaatttgcttataggagactttctgggtatcttggcttcaatttgcagaaaaccaaaaaaaaaaaaaaactttttttctgggtttttttccttagcagagaaaaggttcttaatagttttaagactctggttttgtatattccaattatagctgaatattaaacacaatttataaaacttaaatttctttccaaaaaatctcttctttttaagtctataaaaattgcaactttcttctgaaattattcatttttgaaaaacacaaaagaaacaaagagagagatagagatattatggggaagcaaggaccttgctaccactgtggagttacaaacacacctttgtggagaaatggaccaccagagaagccggtattgtgcaatgcgtgtggatcgcgttggaggacaaagggaacacttgtgaactacacaccgcttcatgctcgtgctgatggtgatgagaatgatgatcatcacaggtttcaaagaatgaagagcatttctttaggcaataagaacaaagagataaagatgctcaagaggaaagcaattcaagaaaacatcatcattaaaagaccggtctttgaattcagttatggtttgaaggcggctgtgatagaggaggatgctagtaatagatcgagttccggttcggctgtatcaaactctgagagctgtgcacagtttagcagtgcagatgggagtccatctcaatctaatgcgtgggacacaactgttccttgcaagaggaggacgtgtgtgggccgtcctaagtcctcttctgttgaaaagctcacaaaggacctttacaatattttacaagagcagcaatcgtcatgtctctcagtttcatcagaggaagatcttctttttgagaatgaaatgtcaatggtctcagttgagattggacatgggagtgttctgatgaagaatccccactcgtttgctcgggaagaggagtctgaagccagctcactctcttcgattgagaacaagtcctccatcagtgacgcatactcacattccgtgaagcgtgttgagattggagcagtgagaggttcatattatggtggacaaacaataaagcaagaacaattcaagagaaccaagtctcaaactgaaagagtgcatgtcctggggagtcatggttcaccactatgtagcatagatttgaaggatgttttcaactttgatgagttcatagaacaattcacagaggaagaacagaagaaactgatgaacttgcttcctcagattgactctgatgaccttcctcatagcctcagaatgatgtttgaaagtgctcagttcaaggacaacttctctttgtttcagcagctcattgctgatggtgtctttgatgtgtcttcttcctcgggggcaaaactcgaagaaatcaggacttttaagaagcttgctttgacagattttaacaaatctcgtttggtggaaagctataacctcctcaaggaacgcgaaaaagggaccggagattctgttactacaacttcaaaaagctcaatcccaaatgtacctaaaaatattgtaaccattaagaggcgctatgaaaaccaaatccaagtaaagtcagagtcaagggggctaatgaggagccccaaaagggtgatgaagatgaaagcaagccatgagacagagaacaatgtctcatgcttcagaccaagaagcttggcttctgtgtttgcacaagaaggtggctctgcagtgtttagctatgaaggtaattgcagttctgatcaagatctccttcttctggacttgccgtcaaacgggtcatttcctcaagcagagctacttcaccaactctgaaaggtcaaagctacaaaacctcattgagcttctcagagcttaaaggaaggattcttaagctctctatctctcttctttgatgagagatatactcttaagctttctgagaaaacgaccaaaatgaggtttctgctttagaaattggaatttgcagacataaaaaaaggaaggatatttatttgagtcttgcttgggcttctctttggtggttaagtttataaagtgggtcttataatatacatacatatacataaagcctcttctcttacctctctttctgtgacccttttaattttaaacttgaaagttccatcttttttggtttcttatctttggacttttttagtttctgcttttttttttgtataggatgaaaaagatactgtaatatcatgtaaacttccgaaaatgcagaaaatggaatac

SEQ ID NO: 45380 - protein, 510 aa, Arabidopsis thaliana
  peptide (1)..(510): Ceres Seq. ID no. 12561297
MGKQGPCYHCGVTNTPLWRNGPPEKPVLCNACGSRWRTKGTLVNYTPLHARADGDENDDHHRFQRMKSISLGNKNKEIKMLKRKAIQENIIIKRPVFEFSYGLKAAVIEEDASNRSSSGSAVSNSESCAQFSSADGSPSQSNAWDTTVPCKRRTCVGRPKSSSVEKLTKDLYNILQEQQSSCLSVSSEEDLLFENEMSMVSVEIGHGSVLMKNPHSFAREEESEASSLSSIENKSSISDAYSHSVKRVEIGAVRGSYYGGQTIKQEQFKRTKSQTERVHVLGSHGSPLCSIDLKDVFNFDEFIEQFTEEEQKKLMNLLPQIDSDDLPHSLRMMFESAQFKDNFSLFQQLIADGVFDVSSSSGAKLEEIRTFKKLALTDFNKSRLVESYNLLKEREKGTGDSVTTTSKSSIPNVPKNIVTIKRRYENQIQVKSESRGLMRSPKRVMKMKASHETENNVSCFRPRSLASVFAQEGGSAVFSYEGNCSSDQDLLLLDLPSNGSFPQAELLHQL

SEQ ID NO: 45381 - protein, 445 aa, Arabidopsis thaliana
  peptide (1)..(445): Ceres Seq. ID no. 12561298
MKSISLGNKNKEIKMLKRKAIQENIIIKRPVFEFSYGLKAAVIEEDASNRSSSGSAVSNSESCAQFSSADGSPSQSNAWDTTVPCKRRTCVGRPKSSSVEKLTKDLYNILQEQQSSCLSVSSEEDLLFENEMSMVSVEIGHGSVLMKNPHSFAREEESEASSLSSIENKSSISDAYSHSVKRVEIGAVRGSYYGGQTIKQEQFKRTKSQTERVHVLGSHGSPLCSIDLKDVFNFDEFIEQFTEEEQKKLMNLLPQIDSDDLPHSLRMMFESAQFKDNFSLFQQLIADGVFDVSSSSGAKLEEIRTFKKLALTDFNKSRLVESYNLLKEREKGTGDSVTTTSKSSIPNVPKNIVTIKRRYENQIQVKSESRGLMRSPKRVMKMKASHETENNVSCFRPRSLASVFAQEGGSAVFSYEGNCSSDQDLLLLDLPSNGSFPQAELLHQL

SEQ ID NO: 45382 - protein, 431 aa, Arabidopsis thaliana
  peptide (1)..(431): Ceres Seq. ID no. 12561299
MLKRKAIQENIIIKRPVFEFSYGLKAAVIEEDASNRSSSGSAVSNSESCAQFSSADGSPSQSNAWDTTVPCKRRTCVGRPKSSSVEKLTKDLYNILQEQQSSCLSVSSEEDLLFENEMSMVSVEIGHGSVLMKNPHSFAREEESEASSLSSIENKSSISDAYSHSVKRVEIGAVRGSYYGGQTIKQEQFKRTKSQTERVHVLGSHGSPLCSIDLKDVFNFDEFIEQFTEEEQKKLMNLLPQIDSDDLPHSLRMMFESAQFKDNFSLFQQLIADGVFDVSSSSGAKLEEIRTFKKLALTDFNKSRLVESYNLLKEREKGTGDSVTTTSKSSIPNVPKNIVTIKRRYENQIQVKSESRGLMRSPKRVMKMKASHETENNVSCFRPRSLASVFAQEGGSAVFSYEGNCSSDQDLLLLDLPSNGSFPQAELLHQL

SEQ ID NO: 45383 - DNA, 948 bp, Arabidopsis thaliana
  misc_feature (1)..(948): Ceres Seq. ID no. 12561300
  misc_feature (1)..(948): Ortholog of  Ceres SEQ ID NO 14314461 as cited in SEQ ID NO 52355
  misc_feature (1)..(948): Ortholog of  Ceres SEQ ID NO 14306812 as cited in SEQ ID NO 56361
  misc_feature (1)..(948): Ortholog of  Ceres SEQ ID NO 15168461 as cited in SEQ ID NO 57068
agtcgtcttgttttttggttcggcgaaaacaagaatgtcaggtcatcagtgcaccgagaacccgcctgatctggatccaactagcgggtcgggtcatgtcgagaaactcggtaaccttgacacctacgtctgtggttccactcattcaaagcttgctgttcttcttgtccctcatgttttcggatatgaaactccaaacctgaggaaacttgctgacaaggttgcagaagctggattctacgcggtggttcctgatttcttccatggagatccttataatcccgagaaccaggatcgtccgtttcctatttggatgaaagatcatgaactagagaaagggtttgaggagtcaaagccaatagtggaggccttgaagaacaaaggcataactagtataggagcagcagggttctgttggggtgcaaaagttgcggtggaactagctaaggaaaagcttgttgacgctactgttttgttacatcctgctcgcgttacggtggatgatatcaaggaggtcaaccttccaattgctgtattaggagctgaaatcgatcaagtgtctcctccagaacttgtgaggcagttcgaagatattttagcttctaaacctcaggtgaagagttttgtgaagatattcccaagatgcaaacacggttggactgttagatacaatgaaaatgatccatcagaagttgaagctgcaatggaagctcacaaggacatgctcgcttggctcatcgactatctcaagtgagaacttgaaacggtctaagctttggtttgcacataaccagcggagacccaaaatcatgtctagtactctttaaataataaatgtaactagtagtatcttctttaatttatgttgctttgtcatgtttgtggctagtgttctctgtttcgtttcagtctgagaaacatcagtttgagttaaacttaagacgttct

SEQ ID NO: 45384 - protein, 250 aa, Arabidopsis thaliana
  peptide (1)..(250): Ceres Seq. ID no. 12561301
VVLFFGSAKTRMSGHQCTENPPDLDPTSGSGHVEKLGNLDTYVCGSTHSKLAVLLVPHVFGYETPNLRKLADKVAEAGFYAVVPDFFHGDPYNPENQDRPFPIWMKDHELEKGFEESKPIVEALKNKGITSIGAAGFCWGAKVAVELAKEKLVDATVLLHPARVTVDDIKEVNLPIAVLGAEIDQVSPPELVRQFEDILASKPQVKSFVKIFPRCKHGWTVRYNENDPSEVEAAMEAHKDMLAWLIDYLK

SEQ ID NO: 45385 - protein, 239 aa, Arabidopsis thaliana
  peptide (1)..(239): Ceres Seq. ID no. 12561302
MSGHQCTENPPDLDPTSGSGHVEKLGNLDTYVCGSTHSKLAVLLVPHVFGYETPNLRKLADKVAEAGFYAVVPDFFHGDPYNPENQDRPFPIWMKDHELEKGFEESKPIVEALKNKGITSIGAAGFCWGAKVAVELAKEKLVDATVLLHPARVTVDDIKEVNLPIAVLGAEIDQVSPPELVRQFEDILASKPQVKSFVKIFPRCKHGWTVRYNENDPSEVEAAMEAHKDMLAWLIDYLK

SEQ ID NO: 45386 - protein, 146 aa, Arabidopsis thaliana
  peptide (1)..(146): Ceres Seq. ID no. 12561303
MKDHELEKGFEESKPIVEALKNKGITSIGAAGFCWGAKVAVELAKEKLVDATVLLHPARVTVDDIKEVNLPIAVLGAEIDQVSPPELVRQFEDILASKPQVKSFVKIFPRCKHGWTVRYNENDPSEVEAAMEAHKDMLAWLIDYLK

SEQ ID NO: 45387 - DNA, 2062 bp, Arabidopsis thaliana
  misc_feature (1)..(2062): Ceres Seq. ID no. 12600320
  misc_feature (1)..(2062): Ortholog of  Ceres SEQ ID NO 15177692 as cited in SEQ ID NO 52664
  misc_feature (1)..(2062): Ortholog of  Ceres SEQ ID NO 14303959 as cited in SEQ ID NO 53709
gatggtagacccaattctctctctctctcttaacaacactctctcctctctctccctctctctatctatccccatttccatggaagcaagcagatgtgttcttacatctctttctctctctacagccttacatgaacagtgactgttctctctctttccctctccttccttttttcttctacttctccttccctttgcttcgaaaagggtatctcgtgatctttatcgctcaaaaatcttcactttcagatcaggccactcgttgatggaatctgtgacagtattgattactagagagtaaagacaagttctttaaatctcagggaagaaggaattggtgtttaagattgctctgtgttaatgatggcttcaaaaactccagaaggatcacttaccaattccagtcaaagtatgtcaatcaacactttagcagatcaagtatcttcgagtttgtctttcgctgatccaagtagtgatggcaaaaccggtaatagtaagatcaacgagcaaggtgagagtggaaagagtagcacttgtagaccaagtacaagcagtgatataagcgatgagagcacttgtagcagctttagtagcagtatcaacaaacctcacaaggctaatgatgtgagatgggaagctattcaagctgttagaactaaacatggtggtttgggtttgaatcattttaggctcttgaagaggttaggatgtggagatattggaactgttcatcttgctgagttgaatggaactaggtgttattttgcgatgaaggttatggataaaactgctttggctagccggaaaaagcttcttagggctcaaactgaaagagagatattgcagtgtcttgatcacccgtttcttccgactttgtatagtcattttgagacagagaagttctcttgtttggtgatggagttttgtcctggtggtgatttgcatacactaaggcagagacaacccgggaaacgcttcaccgagcaagcagctaagttttatgtcgcggaagtgcttcttgcaatggaatatttacacatgcttgggatcatttaccgtgatctgaaacccgagaacgttcttgtgagagatgatgggcacgtgatgctttcggattttgatctctccctgagatgtactgtgagcctctctatagtcagatcagctaatgttggatccgaaggcttgtcgaagaattcggtttcttgctcgcaacaacctgcatgcatccagcaaccatcttgcatctcaatggctccaacatcttgcttcggtcctcggttcttctcatcgaaatccaagaaagacaagaaaccgaaaaccgaaaacgggaaccaccaagtaactccgttaccagaactcgttgcagagcccacaggcgcccgttctatgtcttttgttggcacacacgagtacttagctccagagatcatcaaaggtgaaggacatggaagtgcagttgattggtggacctttgggatctttctttatgaactattgtttggtaaaacaccgtttaaagggtcaggaaatcgagcaacgctcttcaacgtggttggtcagcctcttagattccctgaatctccggttgttagcttcgcagctagggatttgataaggagtttgcttgtgaaggagccacaacatagattagcttataagcgtggagcaacagagataaagcaacatcctttctttgaaggagtgaattgggctctggttcgatgtgccagtccaccggagattcctaaaccggttgatcttgaagctttgaatcctactcctactgtgccagcagccgcatcttcgagtgtaagatctgatcagagtaattatcttgagtttgatttcttctgaagaaactgtttccacagttgatgattctcattattgtttctttgcaaattctgtttagtgttttctacaaatgtgtttctttttttttcttctttttaattttcacgtcttggaaaaagttatgagatttgtaatcattcttcaaagttgtgagacagtctctgtaccatcttcttgagtttaatgttagacacgaaccattgag

SEQ ID NO: 45388 - protein, 498 aa, Arabidopsis thaliana
  peptide (1)..(498): Ceres Seq. ID no. 12600321
MMASKTPEGSLTNSSQSMSINTLADQVSSSLSFADPSSDGKTGNSKINEQGESGKSSTCRPSTSSDISDESTCSSFSSSINKPHKANDVRWEAIQAVRTKHGGLGLNHFRLLKRLGCGDIGTVHLAELNGTRCYFAMKVMDKTALASRKKLLRAQTEREILQCLDHPFLPTLYSHFETEKFSCLVMEFCPGGDLHTLRQRQPGKRFTEQAAKFYVAEVLLAMEYLHMLGIIYRDLKPENVLVRDDGHVMLSDFDLSLRCTVSLSIVRSANVGSEGLSKNSVSCSQQPACIQQPSCISMAPTSCFGPRFFSSKSKKDKKPKTENGNHQVTPLPELVAEPTGARSMSFVGTHEYLAPEIIKGEGHGSAVDWWTFGIFLYELLFGKTPFKGSGNRATLFNVVGQPLRFPESPVVSFAARDLIRSLLVKEPQHRLAYKRGATEIKQHPFFEGVNWALVRCASPPEIPKPVDLEALNPTPTVPAAASSSVRSDQSNYLEFDFF

SEQ ID NO: 45389 - protein, 497 aa, Arabidopsis thaliana
  peptide (1)..(497): Ceres Seq. ID no. 12600322
MASKTPEGSLTNSSQSMSINTLADQVSSSLSFADPSSDGKTGNSKINEQGESGKSSTCRPSTSSDISDESTCSSFSSSINKPHKANDVRWEAIQAVRTKHGGLGLNHFRLLKRLGCGDIGTVHLAELNGTRCYFAMKVMDKTALASRKKLLRAQTEREILQCLDHPFLPTLYSHFETEKFSCLVMEFCPGGDLHTLRQRQPGKRFTEQAAKFYVAEVLLAMEYLHMLGIIYRDLKPENVLVRDDGHVMLSDFDLSLRCTVSLSIVRSANVGSEGLSKNSVSCSQQPACIQQPSCISMAPTSCFGPRFFSSKSKKDKKPKTENGNHQVTPLPELVAEPTGARSMSFVGTHEYLAPEIIKGEGHGSAVDWWTFGIFLYELLFGKTPFKGSGNRATLFNVVGQPLRFPESPVVSFAARDLIRSLLVKEPQHRLAYKRGATEIKQHPFFEGVNWALVRCASPPEIPKPVDLEALNPTPTVPAAASSSVRSDQSNYLEFDFF

SEQ ID NO: 45390 - protein, 481 aa, Arabidopsis thaliana
  peptide (1)..(481): Ceres Seq. ID no. 12600323
MSINTLADQVSSSLSFADPSSDGKTGNSKINEQGESGKSSTCRPSTSSDISDESTCSSFSSSINKPHKANDVRWEAIQAVRTKHGGLGLNHFRLLKRLGCGDIGTVHLAELNGTRCYFAMKVMDKTALASRKKLLRAQTEREILQCLDHPFLPTLYSHFETEKFSCLVMEFCPGGDLHTLRQRQPGKRFTEQAAKFYVAEVLLAMEYLHMLGIIYRDLKPENVLVRDDGHVMLSDFDLSLRCTVSLSIVRSANVGSEGLSKNSVSCSQQPACIQQPSCISMAPTSCFGPRFFSSKSKKDKKPKTENGNHQVTPLPELVAEPTGARSMSFVGTHEYLAPEIIKGEGHGSAVDWWTFGIFLYELLFGKTPFKGSGNRATLFNVVGQPLRFPESPVVSFAARDLIRSLLVKEPQHRLAYKRGATEIKQHPFFEGVNWALVRCASPPEIPKPVDLEALNPTPTVPAAASSSVRSDQSNYLEFDFF

SEQ ID NO: 45391 - DNA, 1485 bp, Arabidopsis thaliana
  misc_feature (1)..(1485): Ceres Seq. ID no. 12561304
  misc_feature (1)..(1485): Ortholog of  Ceres SEQ ID NO 15172476 as cited in SEQ ID NO 54945
  misc_feature (1)..(1485): Ortholog of  Ceres SEQ ID NO 13654989 as cited in SEQ ID NO 63117
  misc_feature (1)..(1485): Ortholog of  Ceres SEQ ID NO 13584744 as cited in SEQ ID NO 69137
atatccactagctcttgtctgaattggtaaaacaagaagaagaagaagaagaagaagaagaaagagaaggctcattagaaattgatgggtgcttgtatttcgttcttttcttcttcctctccttccaaaacaggtctccatagtcatgccacaacgaacaaccacagcaatggaacagagttctcgtcaaccaccggcgcgacaacaaacagcagcgtcggacaacagagccaattctccgatatttccactgggattataagtgattccggtaaactactggaatcgccaaatctcaaagtctataactttctggatctaaagacggcgacgaagaatttcaaaccggattcgatgttgggtcaaggaggtttcgggaaagtatacagaggttgggtcgatgccacgactcttgctccttccagagtcggttctggtatgatcgttgccatcaagagattgaattctgagagtgttcaaggatttgcagagtggcgttcagaagttaacttcttgggaatgctttcgcaccgaaatctggtgaagttattgggatactgtcgtgaagacaaagagcttctccttgtctacgagttcatgcccaaaggaagtcttgagagtcatctttttagacgaaacgatccttttccttgggatttaaggatcaagattgtgattggtgcagctcgtggccttgcgtttctacacagcttacaaagagaagtcatctatagagacttcaaagcttccaatatacttcttgattcgaactatgacgcaaagctttcagatttcggactagcaaagctaggaccagcagatgagaagtcacacgtcacgactaggatcatgggcacatatggttatgctgctcctgaatatatggcaacaggccatttatacgttaagagtgacgtattcgcctttggtgtggttttactagaaataatgaccggactgacggcgcacaacacaaaacggcccagaggacaagagagtcttgtcgactggttaagaccagaactctcaaacaaacacagagtgaaacaaataatggacaaaggaatcaaaggtcaatacacaaccaaggtcgcgaccgaaatggcacgcattacactctcttgtatcgagccagacccaaaaaaccgaccacacatgaaggaagtagtcgaagtcctcgaacacatccaagggcttaatgttgtccctaaccgttcttccactaaacaggccgttgctaactcttcacgttcttcgccacatcactatcgctataaagctggcgcacttggggctgaacgcaagagagcaacgcctggacggtttggatcagtagaaaaataaatagttgtttggtatcttttttttccggcggtatgaaatgattttagagtctttattgtttcattctctttgaattaattcttgaaaggttttgtgtataatactgtttcttttgtaattctagataaatattttcattct

SEQ ID NO: 45392 - protein, 419 aa, Arabidopsis thaliana
  peptide (1)..(419): Ceres Seq. ID no. 12561305
MGACISFFSSSSPSKTGLHSHATTNNHSNGTEFSSTTGATTNSSVGQQSQFSDISTGIISDSGKLLESPNLKVYNFLDLKTATKNFKPDSMLGQGGFGKVYRGWVDATTLAPSRVGSGMIVAIKRLNSESVQGFAEWRSEVNFLGMLSHRNLVKLLGYCREDKELLLVYEFMPKGSLESHLFRRNDPFPWDLRIKIVIGAARGLAFLHSLQREVIYRDFKASNILLDSNYDAKLSDFGLAKLGPADEKSHVTTRIMGTYGYAAPEYMATGHLYVKSDVFAFGVVLLEIMTGLTAHNTKRPRGQESLVDWLRPELSNKHRVKQIMDKGIKGQYTTKVATEMARITLSCIEPDPKNRPHMKEVVEVLEHIQGLNVVPNRSSTKQAVANSSRSSPHHYRYKAGALGAERKRATPGRFGSVEK

SEQ ID NO: 45393 - protein, 329 aa, Arabidopsis thaliana
  peptide (1)..(329): Ceres Seq. ID no. 12561306
MLGQGGFGKVYRGWVDATTLAPSRVGSGMIVAIKRLNSESVQGFAEWRSEVNFLGMLSHRNLVKLLGYCREDKELLLVYEFMPKGSLESHLFRRNDPFPWDLRIKIVIGAARGLAFLHSLQREVIYRDFKASNILLDSNYDAKLSDFGLAKLGPADEKSHVTTRIMGTYGYAAPEYMATGHLYVKSDVFAFGVVLLEIMTGLTAHNTKRPRGQESLVDWLRPELSNKHRVKQIMDKGIKGQYTTKVATEMARITLSCIEPDPKNRPHMKEVVEVLEHIQGLNVVPNRSSTKQAVANSSRSSPHHYRYKAGALGAERKRATPGRFGSVEK

SEQ ID NO: 45394 - protein, 301 aa, Arabidopsis thaliana
  peptide (1)..(301): Ceres Seq. ID no. 12561307
MIVAIKRLNSESVQGFAEWRSEVNFLGMLSHRNLVKLLGYCREDKELLLVYEFMPKGSLESHLFRRNDPFPWDLRIKIVIGAARGLAFLHSLQREVIYRDFKASNILLDSNYDAKLSDFGLAKLGPADEKSHVTTRIMGTYGYAAPEYMATGHLYVKSDVFAFGVVLLEIMTGLTAHNTKRPRGQESLVDWLRPELSNKHRVKQIMDKGIKGQYTTKVATEMARITLSCIEPDPKNRPHMKEVVEVLEHIQGLNVVPNRSSTKQAVANSSRSSPHHYRYKAGALGAERKRATPGRFGSVEK

SEQ ID NO: 45395 - DNA, 1837 bp, Arabidopsis thaliana
  misc_feature (1)..(1837): Ceres Seq. ID no. 12600379
  misc_feature (1)..(1837): Ortholog of  Ceres SEQ ID NO 14314526 as cited in SEQ ID NO 52420
aagagcctgagattatcccagtggaaagaagagaaaccctaatgggaacgagctcgtgtggcgatcacgagaagcagagaattgaagatgaagagcaatacggtgtgttgctgtactacaagtacacctctgttcctgatctagatgagctcgtttccttctatgaatctagctgcaactcattaggtctactcggccgagtcaggctctcccctaaaggcgtcaatgttactgttggtgggaaattaactgcattggaggaacatattgccgctgcaaagtcgaattgtttgtttgaagggactgacttcaagcttgcatcttgccatcatcccttgaatgacaaagttgctgaggaatgtgggtttacatcactctccatccgagttgttgaggagttagtgacctttagtccttgccctccccttaaacccccagaaatttcaaatgctgggaagcatctctctgctgcagagtttcattcggtcctgcagagtgccaatgggaagtctgagaataaggaacttgttttgcttgacgcgaggaacctgtacgagacacggattggaaaattcgaatcagaaaatgtggagacccttgatcctgaaatcaggcaatatagcgatttgccaacctggattgatcagaatgccgagaaaatgaagggcaaaaacgtgctcatgtactgcactggtggaatcagatgtgaaatggcatctgcatatatcagatctaaaggtgctggatttgagaatacttttcagctctatggtggcatacagagataccttgaacaatttcccagtggtgggttcttcaaagggaagaactttgtgtttgatcaccggatctcagttgggagctcaaaagaggatataataggcagctgccttctctgcaacaatacctttgacgactattctccacgttgccgttgcagattatgccggatgcttgttttagtctgcaatcattgtcgggttaaaggagatatatatatatgtgagctgtgtcgtaaacacggaaaaggggaagtccctttgagtcttgatcccttaaaccaaccttctgaaagcaatggtgacaatacaagacggaagctgaggatcttgtgcttgcatggatttaggcagaacgcgtctagctttaaagggaggaccggatcactagcaaagaaactgaagaatattgccgagcttgtgttcatcgatgcaccacacgaattacagttcatctaccaaactgctacccctccatccggagtatgcaataagaagtttgcgtggttggtgtcatcagattttgataaaccgagtgaaacaggctggacagtggcccaatgccagttcgatccattgcagtatcagactcaaactgaagggtttgataaatcgttgacatacttgaagacggcatttgaagagaaagggccttttgatggcattctcggattctctcaaggtgcagcaatggctgcggctgtatgtgggaaacaggagcagctcgtaggtgaaatagacttcagattctgcgtgttgtgctcgggtttcacaccgtggccattgttggagatgaaggagaaacgatcgattaaatgcccttcacttcacatattcggaagtcagcctggaaaagacagacaaattgtgactcaagccagctcagacctggcggggttgtttgaagatggttgcgccaccattgttgagcacgattttggccacatcattcctacaaagtctccttatattgatgagattaaagctttcctttaccaattcatttgaggactttattaacaagacaagaagactcttttgcaatcaaatatttcttg

SEQ ID NO: 45396 - protein, 594 aa, Arabidopsis thaliana
  peptide (1)..(594): Ceres Seq. ID no. 12600380
EPEIIPVERRETLMGTSSCGDHEKQRIEDEEQYGVLLYYKYTSVPDLDELVSFYESSCNSLGLLGRVRLSPKGVNVTVGGKLTALEEHIAAAKSNCLFEGTDFKLASCHHPLNDKVAEECGFTSLSIRVVEELVTFSPCPPLKPPEISNAGKHLSAAEFHSVLQSANGKSENKELVLLDARNLYETRIGKFESENVETLDPEIRQYSDLPTWIDQNAEKMKGKNVLMYCTGGIRCEMASAYIRSKGAGFENTFQLYGGIQRYLEQFPSGGFFKGKNFVFDHRISVGSSKEDIIGSCLLCNNTFDDYSPRCRCRLCRMLVLVCNHCRVKGDIYICELCRKHGKGEVPLSLDPLNQPSESNGDNTRRKLRILCLHGFRQNASSFKGRTGSLAKKLKNIAELVFIDAPHELQFIYQTATPPSGVCNKKFAWLVSSDFDKPSETGWTVAQCQFDPLQYQTQTEGFDKSLTYLKTAFEEKGPFDGILGFSQGAAMAAAVCGKQEQLVGEIDFRFCVLCSGFTPWPLLEMKEKRSIKCPSLHIFGSQPGKDRQIVTQASSDLAGLFEDGCATIVEHDFGHIIPTKSPYIDEIKAFLYQFI

SEQ ID NO: 45397 - protein, 581 aa, Arabidopsis thaliana
  peptide (1)..(581): Ceres Seq. ID no. 12600381
MGTSSCGDHEKQRIEDEEQYGVLLYYKYTSVPDLDELVSFYESSCNSLGLLGRVRLSPKGVNVTVGGKLTALEEHIAAAKSNCLFEGTDFKLASCHHPLNDKVAEECGFTSLSIRVVEELVTFSPCPPLKPPEISNAGKHLSAAEFHSVLQSANGKSENKELVLLDARNLYETRIGKFESENVETLDPEIRQYSDLPTWIDQNAEKMKGKNVLMYCTGGIRCEMASAYIRSKGAGFENTFQLYGGIQRYLEQFPSGGFFKGKNFVFDHRISVGSSKEDIIGSCLLCNNTFDDYSPRCRCRLCRMLVLVCNHCRVKGDIYICELCRKHGKGEVPLSLDPLNQPSESNGDNTRRKLRILCLHGFRQNASSFKGRTGSLAKKLKNIAELVFIDAPHELQFIYQTATPPSGVCNKKFAWLVSSDFDKPSETGWTVAQCQFDPLQYQTQTEGFDKSLTYLKTAFEEKGPFDGILGFSQGAAMAAAVCGKQEQLVGEIDFRFCVLCSGFTPWPLLEMKEKRSIKCPSLHIFGSQPGKDRQIVTQASSDLAGLFEDGCATIVEHDFGHIIPTKSPYIDEIKAFLYQFI

SEQ ID NO: 45398 - protein, 375 aa, Arabidopsis thaliana
  peptide (1)..(375): Ceres Seq. ID no. 12600382
MKGKNVLMYCTGGIRCEMASAYIRSKGAGFENTFQLYGGIQRYLEQFPSGGFFKGKNFVFDHRISVGSSKEDIIGSCLLCNNTFDDYSPRCRCRLCRMLVLVCNHCRVKGDIYICELCRKHGKGEVPLSLDPLNQPSESNGDNTRRKLRILCLHGFRQNASSFKGRTGSLAKKLKNIAELVFIDAPHELQFIYQTATPPSGVCNKKFAWLVSSDFDKPSETGWTVAQCQFDPLQYQTQTEGFDKSLTYLKTAFEEKGPFDGILGFSQGAAMAAAVCGKQEQLVGEIDFRFCVLCSGFTPWPLLEMKEKRSIKCPSLHIFGSQPGKDRQIVTQASSDLAGLFEDGCATIVEHDFGHIIPTKSPYIDEIKAFLYQFI

SEQ ID NO: 45399 - DNA, 1842 bp, Arabidopsis thaliana
  misc_feature (1)..(1842): Ceres Seq. ID no. 12600477
  misc_feature (1)..(1842): Ortholog of  Ceres SEQ ID NO 13598023 as cited in SEQ ID NO 66487
aataaagcttgaccggagtgtcttgtctctgctgcttcaatcgccggcgaacgatggcggtctcagctttccgtggcacgcggttaccgttatttcaccattctcagtttcccgtcgcgagaactgtgtcaggaacgtctaagaagatgatcggagccaggaatttcaagggttttgttcttacagcccagtattcgcaaactcaggaccttttcacttctcgtcttcaaagccagatagagaaattgcccaaattggttgaggatatagttcagacatcgataaacacaggtccacgaggtgtgacacgccttgtccaaggtgttcaagcctttgtaggggttggaggagagtggctaaatgatttatctaagtctacaagcgcgtctggtggattaccaagtgaattgcagcttggtctactgtctcctctatatttgaggaaactctttgaacgcatgggagctacttacattaagctgggccagtttatagcatctgcgccaactttgttcccaccagaatatgtcaaagaatttcagaactgctttgacaaagctcctcctgtgccatttgaagaaattcgtaaaatcttgcaagaggagcttgggagacccattgaaagtgtatacgaatatgttgaccctacgccaattgcatcagcctcaatagcacaagtccatggtgcaaggcttcgaggctcccaagaggatgttgtgattaaagtcttgaagcctgggatagaagatttcttagtggcagatttgaactttatctacgttgtttcccgtatatttgagttccttagtcctgagtttagccgtacttcactggttggaattgtcaaagatattcgtgagtcaatgcttgaagaagtagatttcaataaggaggctcaaaacattgagtcatttaagagatatcttgaaaccatggggttgacagggcaagctactgctccaagagtatataagtactgcagcagccggcgggtacttacaatggagaggctatatggagttcctctgactgatctggactctataagatcacttgtttccagtcccgaaaacagccttattaccgcgcttaatgtgtggtttggaagcttacttgcttgtgaaagcttccatgctgatgtacatgcaggaaacttatggctgttgcgtgatggccggattgggtttcttgattttggcattgttggtcggatatcccccaaaacatgggctgctatggaagtatttttagcgtctattgcaactgaagaatatgaatccatggcctcagctttgattcaaatgggcgccacaaacagagatgttgatggcaaagcttttgcaaaagacttggaaaagatgttctcatctatccaggaactagatacagagatagtagtggctacagctcgtggaacaaattcagacactactgctgttgctgctaacgtagttatggatgagagacagatgaatgctcttttcctcgacctggtgcgtgttagcgaatcatatggtcttaagttcccgagagagtttgcacttctgttgaagcaacttctgtacttcgatcgatacacaagactattagccccaaacctgaacatgctgcaggatcagcggatctctatcgcgtccaacaagaggacgaatggatacaaggacagcttcaactaagtttatgcaaatatacttcactaaacctattcaaactttttatttatttacaagtggtaatgttatagtagattatcaagccaagaacgatgatgaattcaatcttgttacaaacatatcatgactatatacaacagatgaactatatcttcttctatttttttgt

SEQ ID NO: 45400 - protein, 540 aa, Arabidopsis thaliana
  peptide (1)..(540): Ceres Seq. ID no. 12600478
MAVSAFRGTRLPLFHHSQFPVARTVSGTSKKMIGARNFKGFVLTAQYSQTQDLFTSRLQSQIEKLPKLVEDIVQTSINTGPRGVTRLVQGVQAFVGVGGEWLNDLSKSTSASGGLPSELQLGLLSPLYLRKLFERMGATYIKLGQFIASAPTLFPPEYVKEFQNCFDKAPPVPFEEIRKILQEELGRPIESVYEYVDPTPIASASIAQVHGARLRGSQEDVVIKVLKPGIEDFLVADLNFIYVVSRIFEFLSPEFSRTSLVGIVKDIRESMLEEVDFNKEAQNIESFKRYLETMGLTGQATAPRVYKYCSSRRVLTMERLYGVPLTDLDSIRSLVSSPENSLITALNVWFGSLLACESFHADVHAGNLWLLRDGRIGFLDFGIVGRISPKTWAAMEVFLASIATEEYESMASALIQMGATNRDVDGKAFAKDLEKMFSSIQELDTEIVVATARGTNSDTTAVAANVVMDERQMNALFLDLVRVSESYGLKFPREFALLLKQLLYFDRYTRLLAPNLNMLQDQRISIASNKRTNGYKDSFN

SEQ ID NO: 45401 - protein, 509 aa, Arabidopsis thaliana
  peptide (1)..(509): Ceres Seq. ID no. 12600479
MIGARNFKGFVLTAQYSQTQDLFTSRLQSQIEKLPKLVEDIVQTSINTGPRGVTRLVQGVQAFVGVGGEWLNDLSKSTSASGGLPSELQLGLLSPLYLRKLFERMGATYIKLGQFIASAPTLFPPEYVKEFQNCFDKAPPVPFEEIRKILQEELGRPIESVYEYVDPTPIASASIAQVHGARLRGSQEDVVIKVLKPGIEDFLVADLNFIYVVSRIFEFLSPEFSRTSLVGIVKDIRESMLEEVDFNKEAQNIESFKRYLETMGLTGQATAPRVYKYCSSRRVLTMERLYGVPLTDLDSIRSLVSSPENSLITALNVWFGSLLACESFHADVHAGNLWLLRDGRIGFLDFGIVGRISPKTWAAMEVFLASIATEEYESMASALIQMGATNRDVDGKAFAKDLEKMFSSIQELDTEIVVATARGTNSDTTAVAANVVMDERQMNALFLDLVRVSESYGLKFPREFALLLKQLLYFDRYTRLLAPNLNMLQDQRISIASNKRTNGYKDSFN

SEQ ID NO: 45402 - protein, 405 aa, Arabidopsis thaliana
  peptide (1)..(405): Ceres Seq. ID no. 12600480
MGATYIKLGQFIASAPTLFPPEYVKEFQNCFDKAPPVPFEEIRKILQEELGRPIESVYEYVDPTPIASASIAQVHGARLRGSQEDVVIKVLKPGIEDFLVADLNFIYVVSRIFEFLSPEFSRTSLVGIVKDIRESMLEEVDFNKEAQNIESFKRYLETMGLTGQATAPRVYKYCSSRRVLTMERLYGVPLTDLDSIRSLVSSPENSLITALNVWFGSLLACESFHADVHAGNLWLLRDGRIGFLDFGIVGRISPKTWAAMEVFLASIATEEYESMASALIQMGATNRDVDGKAFAKDLEKMFSSIQELDTEIVVATARGTNSDTTAVAANVVMDERQMNALFLDLVRVSESYGLKFPREFALLLKQLLYFDRYTRLLAPNLNMLQDQRISIASNKRTNGYKDSFN

SEQ ID NO: 45403 - DNA, 1768 bp, Arabidopsis thaliana
  misc_feature (1)..(1768): Ceres Seq. ID no. 12639286
  misc_feature (1)..(1768): Ortholog of  Ceres SEQ ID NO 13639419 as cited in SEQ ID NO 54220
  misc_feature (1)..(1768): Ortholog of  Ceres SEQ ID NO 13593967 as cited in SEQ ID NO 56966
atgcagactccaaaacctaggccgggatcgttggaggtgcctcagaagaaatctcctgcatcaactcctaaaactgctcggaagctcaagacttcagaatccgaccctgtctcgtctcctaacacgaaaatcaggacaccgaaaactcaaagcccaaaagtagttgctgatcgccgttctccaagaacccctgtaaatgagattcagaagaaacggacaggaaaaacacccgaattggcatctcagatatctcagcttcaagaggagctaaagaaggcaaaggaacagctaagtgcttcagaagctctgaagaaggaagctcaagatcaagcagaggaaacaaagcagcagttaatggagattaacgcctctgaggattccaggatcgatgagcttcgcaagctctctcaagaacgagacaaagcgtggcagtctgaactcgaagcaatgcagagacagcatgccatggattccgctgctctatcatctaccatgaacgaggtccagaaactgaaagcacagctgtctgaatctgaaaatgttgagaacttaaggatggaacttaacgagacgttgtcacttgtcgagaagctcagaggtgagctgtttgatgcaaaggaaggggaagctcaggcgcatgaaattgtgtcgggaactgaaaagcaattagagatagccaacttgacgcttgagatgttacgttcagatggtatgaagatgtctgaagcttgtaattcactaacaactgagctagagcagtctaaatctgaggtaaggtcactagagcaacttgtgagacagcttgaggaagaagatgaagcccgaggaaatgctaacggggactcatcatcagtggaagagctcaaggaagagataaatgttgcaaggcaagagattagccagttgaaatctgcagtggaagtaacagagagaaggtaccatgaagagtatatccagagcacgttgcagatcagaactgcttatgaacaagtcgatgaagtaaaatccggatatgcacagagagaggctgagttgggggaagaactgaagaaaaccaaagctgaaagagattctttgcatgaacggttgatggataaggaagctaagctcaggatactcgtcgatgaaaacgagatactgaactcgaaaatcaaagaaaaagaagaagtatacttaaacttggagaacagcttgaaccagaacgagcctgaggataccggtgaactcaagaagctagaatccgatgtgatggagttgagagcaaatctaatggacaaggagatggagctacagagcgtaatgtcgcaatacgagagtctcaggagcgaaatggagacaatgcagagtgagaagaacaaggctatcgacgaggccttagcaaagctcgggagtctgacagaggaagcagataagagcgggaagagagccgaaaatgcgacagaacagctaggggcggcacaagtcaccaacaccgaactagaagctgagctgaggagactcaaggttcagtgtgatcaatggaggaaagcagctgaagccgcagctactatgctctctggtggtaacaacaacaataacagtaacgggaagtacgtggagagaacaggatcgttagagagtccgttgaggaggagaaacgtcaacatgtcgccttatatgggtgaaactgatgatgaattgtcatcaccaaagaagaagaatggaagtatgctgaagaaaattggtgtgttactgaagaaaagtcagaaatgatccattgaagttcagg

SEQ ID NO: 45404 - protein, 583 aa, Arabidopsis thaliana
  peptide (1)..(583): Ceres Seq. ID no. 12639287
MQTPKPRPGSLEVPQKKSPASTPKTARKLKTSESDPVSSPNTKIRTPKTQSPKVVADRRSPRTPVNEIQKKRTGKTPELASQISQLQEELKKAKEQLSASEALKKEAQDQAEETKQQLMEINASEDSRIDELRKLSQERDKAWQSELEAMQRQHAMDSAALSSTMNEVQKLKAQLSESENVENLRMELNETLSLVEKLRGELFDAKEGEAQAHEIVSGTEKQLEIANLTLEMLRSDGMKMSEACNSLTTELEQSKSEVRSLEQLVRQLEEEDEARGNANGDSSSVEELKEEINVARQEISQLKSAVEVTERRYHEEYIQSTLQIRTAYEQVDEVKSGYAQREAELGEELKKTKAERDSLHERLMDKEAKLRILVDENEILNSKIKEKEEVYLNLENSLNQNEPEDTGELKKLESDVMELRANLMDKEMELQSVMSQYESLRSEMETMQSEKNKAIDEALAKLGSLTEEADKSGKRAENATEQLGAAQVTNTELEAELRRLKVQCDQWRKAAEAAATMLSGGNNNNNSNGKYVERTGSLESPLRRRNVNMSPYMGETDDELSSPKKKNGSMLKKIGVLLKKSQK

SEQ ID NO: 45405 - protein, 465 aa, Arabidopsis thaliana
  peptide (1)..(465): Ceres Seq. ID no. 12639288
MEINASEDSRIDELRKLSQERDKAWQSELEAMQRQHAMDSAALSSTMNEVQKLKAQLSESENVENLRMELNETLSLVEKLRGELFDAKEGEAQAHEIVSGTEKQLEIANLTLEMLRSDGMKMSEACNSLTTELEQSKSEVRSLEQLVRQLEEEDEARGNANGDSSSVEELKEEINVARQEISQLKSAVEVTERRYHEEYIQSTLQIRTAYEQVDEVKSGYAQREAELGEELKKTKAERDSLHERLMDKEAKLRILVDENEILNSKIKEKEEVYLNLENSLNQNEPEDTGELKKLESDVMELRANLMDKEMELQSVMSQYESLRSEMETMQSEKNKAIDEALAKLGSLTEEADKSGKRAENATEQLGAAQVTNTELEAELRRLKVQCDQWRKAAEAAATMLSGGNNNNNSNGKYVERTGSLESPLRRRNVNMSPYMGETDDELSSPKKKNGSMLKKIGVLLKKSQK

SEQ ID NO: 45406 - protein, 434 aa, Arabidopsis thaliana
  peptide (1)..(434): Ceres Seq. ID no. 12639289
MQRQHAMDSAALSSTMNEVQKLKAQLSESENVENLRMELNETLSLVEKLRGELFDAKEGEAQAHEIVSGTEKQLEIANLTLEMLRSDGMKMSEACNSLTTELEQSKSEVRSLEQLVRQLEEEDEARGNANGDSSSVEELKEEINVARQEISQLKSAVEVTERRYHEEYIQSTLQIRTAYEQVDEVKSGYAQREAELGEELKKTKAERDSLHERLMDKEAKLRILVDENEILNSKIKEKEEVYLNLENSLNQNEPEDTGELKKLESDVMELRANLMDKEMELQSVMSQYESLRSEMETMQSEKNKAIDEALAKLGSLTEEADKSGKRAENATEQLGAAQVTNTELEAELRRLKVQCDQWRKAAEAAATMLSGGNNNNNSNGKYVERTGSLESPLRRRNVNMSPYMGETDDELSSPKKKNGSMLKKIGVLLKKSQK

SEQ ID NO: 45407 - DNA, 1375 bp, Arabidopsis thaliana
  misc_feature (1)..(1375): Ceres Seq. ID no. 12561316
  misc_feature (1)..(1375): Ortholog of  Ceres SEQ ID NO 13595351 as cited in SEQ ID NO 55934
  misc_feature (1)..(1375): Ortholog of  Ceres SEQ ID NO 13639645 as cited in SEQ ID NO 57488
aaagaaaaacattcgacattacagaaaagaaaaaactataagaaaatcttaattaataaaataatatattcaggagggcgagagagagagagagggatgatgaaggaagaacaatgggcaccagtgatagtaatgttaatatcaagtgttgcaatgggatcagtgaacgctctcgttaagaaagcacttgatgttggtgttaaccatatgatctttggtgcttatagaatggctatttctgctctaatcttggttccgttttcttatatttgggagaggaaaacaaggccacaactaacgttcatgcttttgtgcgaacatttcatcagcggattacttggggcaagtttgatgcaatttttctttttacttgggctttcgtacacgtcagcaactgtttcgatggctctagttagcatgttacctgctatcacctttgcgttagcccttattttccggatagagaatgcgcaaaacctaaagagcaaagcaggcgtgctcaaagtaatgggaaccctaatttgcataatgggagcaatgttgttgacattttacaaaggcccagagttatcaaaccctcattctcatccacaagctcgtcacaacaacaacaataacaatggtcacgaccaaacaaagaaatggcttctaggctgtctttatttagtcattgggacagtgttgttgtctctatggatgttgtttcaagggaaattaagctttaagtatcctggaaataaatactcaagcacttgtctcatgtcagtcttcgcatcatttcaatgtgctattttgagtctttataaaagtagagacgtcaaagattggatcattgaagataaattcgtcattttggtcaccctttacgctggaatagtgggacaagcgatgtcgacagtggtaacgtcatggtccataaaaatgacaggagcagttttcgtctcaacattcagccccgtcagcctcgtcgccgctacgttattcgatttcctcatcttacactctcctttataccttggcagcatacttggatcagtagtgactataactggcctctacgtttttctttggggaaggaagaatgagacagatcagtctgtttcgaagactttgaacagttcccagttttctcagaataaggataacgaagaccatacaatagcaaatcataaggatactaatttgcccgtttgatatatatatatatcatatttatagaggtagctagatatttgctatcataatcgtgatagtactgtcattgatcagctctatattataagacttatgttcttctgtattgccaactatagctcactgtatgtttgtaaccagttggattggtttaattggaaataaaagtagttggagatgt

SEQ ID NO: 45408 - protein, 397 aa, Arabidopsis thaliana
  peptide (1)..(397): Ceres Seq. ID no. 12561317
KEKHSTLQKRKNYKKILINKIIYSGGRERERGMMKEEQWAPVIVMLISSVAMGSVNALVKKALDVGVNHMIFGAYRMAISALILVPFSYIWERKTRPQLTFMLLCEHFISGLLGASLMQFFFLLGLSYTSATVSMALVSMLPAITFALALIFRIENAQNLKSKAGVLKVMGTLICIMGAMLLTFYKGPELSNPHSHPQARHNNNNNNGHDQTKKWLLGCLYLVIGTVLLSLWMLFQGKLSFKYPGNKYSSTCLMSVFASFQCAILSLYKSRDVKDWIIEDKFVILVTLYAGIVGQAMSTVVTSWSIKMTGAVFVSTFSPVSLVAATLFDFLILHSPLYLGSILGSVVTITGLYVFLWGRKNETDQSVSKTLNSSQFSQNKDNEDHTIANHKDTNLPV

SEQ ID NO: 45409 - protein, 365 aa, Arabidopsis thaliana
  peptide (1)..(365): Ceres Seq. ID no. 12561318
MMKEEQWAPVIVMLISSVAMGSVNALVKKALDVGVNHMIFGAYRMAISALILVPFSYIWERKTRPQLTFMLLCEHFISGLLGASLMQFFFLLGLSYTSATVSMALVSMLPAITFALALIFRIENAQNLKSKAGVLKVMGTLICIMGAMLLTFYKGPELSNPHSHPQARHNNNNNNGHDQTKKWLLGCLYLVIGTVLLSLWMLFQGKLSFKYPGNKYSSTCLMSVFASFQCAILSLYKSRDVKDWIIEDKFVILVTLYAGIVGQAMSTVVTSWSIKMTGAVFVSTFSPVSLVAATLFDFLILHSPLYLGSILGSVVTITGLYVFLWGRKNETDQSVSKTLNSSQFSQNKDNEDHTIANHKDTNLPV

SEQ ID NO: 45410 - protein, 364 aa, Arabidopsis thaliana
  peptide (1)..(364): Ceres Seq. ID no. 12561319
MKEEQWAPVIVMLISSVAMGSVNALVKKALDVGVNHMIFGAYRMAISALILVPFSYIWERKTRPQLTFMLLCEHFISGLLGASLMQFFFLLGLSYTSATVSMALVSMLPAITFALALIFRIENAQNLKSKAGVLKVMGTLICIMGAMLLTFYKGPELSNPHSHPQARHNNNNNNGHDQTKKWLLGCLYLVIGTVLLSLWMLFQGKLSFKYPGNKYSSTCLMSVFASFQCAILSLYKSRDVKDWIIEDKFVILVTLYAGIVGQAMSTVVTSWSIKMTGAVFVSTFSPVSLVAATLFDFLILHSPLYLGSILGSVVTITGLYVFLWGRKNETDQSVSKTLNSSQFSQNKDNEDHTIANHKDTNLPV

SEQ ID NO: 45411 - DNA, 1776 bp, Arabidopsis thaliana
  misc_feature (1)..(1776): Ceres Seq. ID no. 12600395
  misc_feature (1)..(1776): Ortholog of  Ceres SEQ ID NO 15178173 as cited in SEQ ID NO 54139
  misc_feature (1)..(1776): Ortholog of  Ceres SEQ ID NO 14304136 as cited in SEQ ID NO 59024
gatagccccattgtcgtgggttcccactagcagctttcttgtcttcctccattttcttttccttcattctactaaaacagaggtttttgcctcttcctctcttgtttcactctttagggtacacacaaattcactcttttttcttctttgtttgggaggggaaaagttacagttttttcctctgttttggatcaaaatttcgtttttttggttgtgttaagaaagcaacagagagagagagaaagattgaaactttggatgtgaatttagggttttgtgaattggggaaaaagcaatccagagatggctcaacagagacaatttcagatggaaggtggtaataataatacaacagataccaagttgacgaaaatctttgttggaggattagcttgggagactcagagagatacaatgagacgttactttgaacagtttggtgaaatcgttgaagctgttgtcattactgataagaacactggaagatctaaaggatatggatttgtcacgtttaaggaagctgaagcagcgatgagagcttgtcagaacatgaatcctgtgattgatggaagaagagctaattgcaatcttgcttgtcttggtgctcaaaaacctcgtcctcctacttctcctcgacatggaacaggtagattcagatcaccaggatcaggagttggattagttgctccttctcctcagtttcgaggctcttcttcttcctctgcttttgttcatcaacaacaacaacaacacactgctcaattcccatttccttactctacttacgggttttctggttattctcaagagggaatgtacccaatgaactactacaatcatcatctctatggaggacaacagttttcaccatatatgggacatccatcagcaggatcaacaggaatgttccatggtttttatccctactatcctcaatacaatgcagcacaaagtagcaatcaagctcaagctcaagttcaagctcaacatcaccaaggtttcagctttcaatacactgctcctcctgctcctcctctgctgcaatatccttacttgcctcaccagccacacttcagttctcagcagcaatttagctctcagcaacctcctcctccaatcctctccctcccaacctctctggctctatctttaccttcatcatcatcaccgtcctcttcaacttccacctcagctgcaacaacagcaacaaaaacagtagttataactacagcaacaaagaaagcagaaactgaagctagcagcaaagatggtaatgaagcaatgacaacatcaaccatcaagatagagggttgattcagaactactacaatagccagaagaagggacaaacttcattgtacactaactcatcatcaaatctctccaacaacgttctagaaacattcattcatccatcgtttttaggattctagaatcttaattagtacttaggaggaggaagaagaagaagaaaccatcatcacattctttctttttttttgttgttgtttcaaattgcattttaggtaaaagaatcaagagaaagcattggtggctttcttttagattcttaagaaaacttggattggtgcagaaagcatcatcagattattacattcatttggggaattttatttttcaggttcaaaagaaatgttttatgtcttcttttgaacctaaacaggatttttaagcttcggataagcttaaaatcatttcttttacatttgtaattcttgaaattgttataattcaatcacattgcttcttcttact

SEQ ID NO: 45412 - protein, 336 aa, Arabidopsis thaliana
  peptide (1)..(336): Ceres Seq. ID no. 12600396
MAQQRQFQMEGGNNNTTDTKLTKIFVGGLAWETQRDTMRRYFEQFGEIVEAVVITDKNTGRSKGYGFVTFKEAEAAMRACQNMNPVIDGRRANCNLACLGAQKPRPPTSPRHGTGRFRSPGSGVGLVAPSPQFRGSSSSSAFVHQQQQQHTAQFPFPYSTYGFSGYSQEGMYPMNYYNHHLYGGQQFSPYMGHPSAGSTGMFHGFYPYYPQYNAAQSSNQAQAQVQAQHHQGFSFQYTAPPAPPLLQYPYLPHQPHFSSQQQFSSQQPPPPILSLPTSLALSLPSSSSPSSSTSTSAATTATKTVVITTATKKAETEASSKDGNEAMTTSTIKIEG

SEQ ID NO: 45413 - protein, 328 aa, Arabidopsis thaliana
  peptide (1)..(328): Ceres Seq. ID no. 12600397
MEGGNNNTTDTKLTKIFVGGLAWETQRDTMRRYFEQFGEIVEAVVITDKNTGRSKGYGFVTFKEAEAAMRACQNMNPVIDGRRANCNLACLGAQKPRPPTSPRHGTGRFRSPGSGVGLVAPSPQFRGSSSSSAFVHQQQQQHTAQFPFPYSTYGFSGYSQEGMYPMNYYNHHLYGGQQFSPYMGHPSAGSTGMFHGFYPYYPQYNAAQSSNQAQAQVQAQHHQGFSFQYTAPPAPPLLQYPYLPHQPHFSSQQQFSSQQPPPPILSLPTSLALSLPSSSSPSSSTSTSAATTATKTVVITTATKKAETEASSKDGNEAMTTSTIKIEG

SEQ ID NO: 45414 - protein, 299 aa, Arabidopsis thaliana
  peptide (1)..(299): Ceres Seq. ID no. 12600398
MRRYFEQFGEIVEAVVITDKNTGRSKGYGFVTFKEAEAAMRACQNMNPVIDGRRANCNLACLGAQKPRPPTSPRHGTGRFRSPGSGVGLVAPSPQFRGSSSSSAFVHQQQQQHTAQFPFPYSTYGFSGYSQEGMYPMNYYNHHLYGGQQFSPYMGHPSAGSTGMFHGFYPYYPQYNAAQSSNQAQAQVQAQHHQGFSFQYTAPPAPPLLQYPYLPHQPHFSSQQQFSSQQPPPPILSLPTSLALSLPSSSSPSSSTSTSAATTATKTVVITTATKKAETEASSKDGNEAMTTSTIKIEG

SEQ ID NO: 45415 - DNA, 3798 bp, Arabidopsis thaliana
  misc_feature (1)..(3798): Ceres Seq. ID no. 13618884
  misc_feature (1)..(3798): Ortholog of  Ceres SEQ ID NO 13658778 as cited in SEQ ID NO 66511
ggataaaataggcaaaagcagatttgaagaagaagcagcttgagatatcaaatagagagagagagtgacagaggagtgtgtgaacatccttttttagtagatttgggttttcgagatgccgtattgaatcggctacgaatttcccaattttgaattttgtgaatctctctctttctctgtgtgtcggtggctgcgatggaggccagtgccggcttggttgctggatcctaccggagaaacgagctcgttcggatccgacatgaatctgatggcgggaccaaacctttgaagaatatgaatggccagatatgtcagatctgtggtgatgatgttggactcgctgaaactggagatgtctttgtcgcgtgtaatgaatgtgccttccctgtgtgtcggccttgctatgagtacgagaggaaagatggaactcagtgttgccctcaatgcaagactagattcagacgacacagggggagtcctcgtgttgaaggagatgaagatgaggatgatgttgatgatatcgagaatgagttcaattacgcccagggagctaacaaggcgagacaccaacgccatggcgaagagttttcttcttcctctagacatgaatctcaaccaattcctcttctcacccatggccatacggtttctggagagattcgcacgcctgatacacaatctgtgcgaactacatcaggtcctttgggtccttctgacaggaatgctatttcatctccatatattgatccacggcaacctgtccctgtaagaatcgtggacccgtcaaaagacttgaactcttatgggcttggtaatgttgactggaaagaaagagttgaaggctggaagctgaagcaggagaaaaatatgttacagatgactggtaaataccatgaagggaaaggaggagaaattgaagggactggttccaatggcgaagaactccaaatggctgatgatacacgtcttcctatgagtcgtgtggtgcctatcccatcttctcgcctaaccccttatcgggttgtgattattctccggcttatcatcttgtgtttcttcttgcaatatcgtacaactcaccctgtgaaaaatgcatatcctttgtggttgacctcggttatctgtgagatctggtttgcattttcttggcttcttgatcagtttcccaaatggtaccccattaacagggagacttatcttgaccgtctcgctataagatatgatcgagacggtgaaccatcacagctcgttcctgttgatgtgtttgttagtacagtggacccattgaaagagcctccccttgttacagcaaacacagttctctcgattctttctgtggactacccggtagataaagtagcctgttatgtttcagatgatggttcagctatgcttacctttgaatccctttctgaaaccgctgagtttgcaaagaaatgggtaccattttgcaagaaattcaacattgaacctagggcccctgaattctattttgcccagaagatagattacttgaaggacaagatccaaccgtcttttgttaaagagcgacgagctatgaagagagagtatgaagagtttaaagtgaggataaatgctcttgttgccaaagcacagaaaatccctgaagaaggctggacaatgcaggatggtactccctggcctggtaacaacactagagatcatcctggaatgatacaggtgttcttaggccatagtgggggtctggataccgatggaaatgagctgcctagactcatctatgtttctcgtgaaaagcggcctggatttcaacaccacaaaaaggctggagctatgaatgcattgatccgtgtatctgctgttcttaccaatggagcatatcttttgaacgtggattgtgatcattactttaataacagtaaggctattaaagaagctatgtgtttcatgatggacccggctattggaaagaagtgctgctatgtccagttccctcaacgttttgacggtattgatttgcacgatcgatatgccaacaggaatatagtctttttcgatattaacatgaaggggttggatggtatccagggtccagtatatgtgggtactggttgttgttttaataggcaggctctatatgggtatgatcctgttttgacggaagaagatttagaaccaaatattattgtcaagagctgttgcgggtcaaggaagaaaggtaaaagtagcaagaagtataactacgaaaagaggagaggcatcaacagaagtgactccaatgctccacttttcaatatggaggacatcgatgagggttttgaaggttatgatgatgagaggtctattctaatgtcccagaggagtgtagagaagcgttttggtcagtcgccggtatttattgcggcaaccttcatggaacaaggcggcattccaccaacaaccaatcccgctactcttctgaaggaggctattcatgttataagctgtggttacgaagacaagactgaatggggcaaagagattggttggatctatggttccgtgacggaagatattcttactgggttcaagatgcatgcccggggttggatatcgatctactgcaatcctccacgccctgcgttcaagggatctgcaccaatcaatctttctgatcgtttgaaccaagttcttcgatgggctttgggatctatcgagattcttcttagcagacattgtcctatctggtatggttaccatggaaggttgagacttttggagaggatcgcttatatcaacaccatcgtctatcctattacatccatccctcttattgcgtattgtattcttcccgctttttgtctcatcaccgacagattcatcatacccgagataagcaactacgcgagtatttggttcattctactcttcatctcaattgctgtgactggaatcctggagctgagatggagcggtgtgagcattgaggattggtggaggaacgagcagttctgggtcattggtggcacatccgcccatctttttgctgtcttccaaggtctacttaaggttcttgctggtatcgacaccaacttcaccgttacatctaaagccacagacgaagatggggattttgcagaactctacatcttcaaatggacagctcttctcattccaccaaccaccgtcctacttgtgaacctcataggcattgtggctggtgtctcttatgctgtaaacagtggctaccagtcgtggggtccgcttttcgggaagctcttcttcgccttatgggttattgcccatctctaccctttcttgaaaggtctgttgggaagacaaaaccgaacaccaaccatcgtcattgtctggtctgttcttctcgcctccatcttctcgttgctttgggtcaggatcaatccctttgtggacgccaatcccaatgccaacaacttcaatggcaaaggaggtgtcttttagaccctatttatatacttgtgtgtgcatatatcaaaaacgcgcaatgggaattccaaatcatctaaacccatcaaaccccagtgaaccgggcagttaaggtgattccatgtccaagattagctttctccgagtagccagagaaggtgaaattgttcgtaacactattgtaatgattttccagtggggaagaagatgtggacccaaatgatacatagtctacaaaaagaatttgttattctttcttatatttattttatttaaagcttgttagactcacacttatgtaatgttggaacttgttgtcctaaaaagggattggagttttctttttatctaagaatctgaagtttatatgcc

SEQ ID NO: 45416 - protein, 1081 aa, Arabidopsis thaliana
  peptide (1)..(1081): Ceres Seq. ID no. 13618885
MEASAGLVAGSYRRNELVRIRHESDGGTKPLKNMNGQICQICGDDVGLAETGDVFVACNECAFPVCRPCYEYERKDGTQCCPQCKTRFRRHRGSPRVEGDEDEDDVDDIENEFNYAQGANKARHQRHGEEFSSSSRHESQPIPLLTHGHTVSGEIRTPDTQSVRTTSGPLGPSDRNAISSPYIDPRQPVPVRIVDPSKDLNSYGLGNVDWKERVEGWKLKQEKNMLQMTGKYHEGKGGEIEGTGSNGEELQMADDTRLPMSRVVPIPSSRLTPYRVVIILRLIILCFFLQYRTTHPVKNAYPLWLTSVICEIWFAFSWLLDQFPKWYPINRETYLDRLAIRYDRDGEPSQLVPVDVFVSTVDPLKEPPLVTANTVLSILSVDYPVDKVACYVSDDGSAMLTFESLSETAEFAKKWVPFCKKFNIEPRAPEFYFAQKIDYLKDKIQPSFVKERRAMKREYEEFKVRINALVAKAQKIPEEGWTMQDGTPWPGNNTRDHPGMIQVFLGHSGGLDTDGNELPRLIYVSREKRPGFQHHKKAGAMNALIRVSAVLTNGAYLLNVDCDHYFNNSKAIKEAMCFMMDPAIGKKCCYVQFPQRFDGIDLHDRYANRNIVFFDINMKGLDGIQGPVYVGTGCCFNRQALYGYDPVLTEEDLEPNIIVKSCCGSRKKGKSSKKYNYEKRRGINRSDSNAPLFNMEDIDEGFEGYDDERSILMSQRSVEKRFGQSPVFIAATFMEQGGIPPTTNPATLLKEAIHVISCGYEDKTEWGKEIGWIYGSVTEDILTGFKMHARGWISIYCNPPRPAFKGSAPINLSDRLNQVLRWALGSIEILLSRHCPIWYGYHGRLRLLERIAYINTIVYPITSIPLIAYCILPAFCLITDRFIIPEISNYASIWFILLFISIAVTGILELRWSGVSIEDWWRNEQFWVIGGTSAHLFAVFQGLLKVLAGIDTNFTVTSKATDEDGDFAELYIFKWTALLIPPTTVLLVNLIGIVAGVSYAVNSGYQSWGPLFGKLFFALWVIAHLYPFLKGLLGRQNRTPTIVIVWSVLLASIFSLLWVRINPFVDANPNANNFNGKGGVF

SEQ ID NO: 45417 - protein, 1048 aa, Arabidopsis thaliana
  peptide (1)..(1048): Ceres Seq. ID no. 13618886
MNGQICQICGDDVGLAETGDVFVACNECAFPVCRPCYEYERKDGTQCCPQCKTRFRRHRGSPRVEGDEDEDDVDDIENEFNYAQGANKARHQRHGEEFSSSSRHESQPIPLLTHGHTVSGEIRTPDTQSVRTTSGPLGPSDRNAISSPYIDPRQPVPVRIVDPSKDLNSYGLGNVDWKERVEGWKLKQEKNMLQMTGKYHEGKGGEIEGTGSNGEELQMADDTRLPMSRVVPIPSSRLTPYRVVIILRLIILCFFLQYRTTHPVKNAYPLWLTSVICEIWFAFSWLLDQFPKWYPINRETYLDRLAIRYDRDGEPSQLVPVDVFVSTVDPLKEPPLVTANTVLSILSVDYPVDKVACYVSDDGSAMLTFESLSETAEFAKKWVPFCKKFNIEPRAPEFYFAQKIDYLKDKIQPSFVKERRAMKREYEEFKVRINALVAKAQKIPEEGWTMQDGTPWPGNNTRDHPGMIQVFLGHSGGLDTDGNELPRLIYVSREKRPGFQHHKKAGAMNALIRVSAVLTNGAYLLNVDCDHYFNNSKAIKEAMCFMMDPAIGKKCCYVQFPQRFDGIDLHDRYANRNIVFFDINMKGLDGIQGPVYVGTGCCFNRQALYGYDPVLTEEDLEPNIIVKSCCGSRKKGKSSKKYNYEKRRGINRSDSNAPLFNMEDIDEGFEGYDDERSILMSQRSVEKRFGQSPVFIAATFMEQGGIPPTTNPATLLKEAIHVISCGYEDKTEWGKEIGWIYGSVTEDILTGFKMHARGWISIYCNPPRPAFKGSAPINLSDRLNQVLRWALGSIEILLSRHCPIWYGYHGRLRLLERIAYINTIVYPITSIPLIAYCILPAFCLITDRFIIPEISNYASIWFILLFISIAVTGILELRWSGVSIEDWWRNEQFWVIGGTSAHLFAVFQGLLKVLAGIDTNFTVTSKATDEDGDFAELYIFKWTALLIPPTTVLLVNLIGIVAGVSYAVNSGYQSWGPLFGKLFFALWVIAHLYPFLKGLLGRQNRTPTIVIVWSVLLASIFSLLWVRINPFVDANPNANNFNGKGGVF

SEQ ID NO: 45418 - protein, 857 aa, Arabidopsis thaliana
  peptide (1)..(857): Ceres Seq. ID no. 13618887
MLQMTGKYHEGKGGEIEGTGSNGEELQMADDTRLPMSRVVPIPSSRLTPYRVVIILRLIILCFFLQYRTTHPVKNAYPLWLTSVICEIWFAFSWLLDQFPKWYPINRETYLDRLAIRYDRDGEPSQLVPVDVFVSTVDPLKEPPLVTANTVLSILSVDYPVDKVACYVSDDGSAMLTFESLSETAEFAKKWVPFCKKFNIEPRAPEFYFAQKIDYLKDKIQPSFVKERRAMKREYEEFKVRINALVAKAQKIPEEGWTMQDGTPWPGNNTRDHPGMIQVFLGHSGGLDTDGNELPRLIYVSREKRPGFQHHKKAGAMNALIRVSAVLTNGAYLLNVDCDHYFNNSKAIKEAMCFMMDPAIGKKCCYVQFPQRFDGIDLHDRYANRNIVFFDINMKGLDGIQGPVYVGTGCCFNRQALYGYDPVLTEEDLEPNIIVKSCCGSRKKGKSSKKYNYEKRRGINRSDSNAPLFNMEDIDEGFEGYDDERSILMSQRSVEKRFGQSPVFIAATFMEQGGIPPTTNPATLLKEAIHVISCGYEDKTEWGKEIGWIYGSVTEDILTGFKMHARGWISIYCNPPRPAFKGSAPINLSDRLNQVLRWALGSIEILLSRHCPIWYGYHGRLRLLERIAYINTIVYPITSIPLIAYCILPAFCLITDRFIIPEISNYASIWFILLFISIAVTGILELRWSGVSIEDWWRNEQFWVIGGTSAHLFAVFQGLLKVLAGIDTNFTVTSKATDEDGDFAELYIFKWTALLIPPTTVLLVNLIGIVAGVSYAVNSGYQSWGPLFGKLFFALWVIAHLYPFLKGLLGRQNRTPTIVIVWSVLLASIFSLLWVRINPFVDANPNANNFNGKGGVF

SEQ ID NO: 45419 - DNA, 2687 bp, Arabidopsis thaliana
  misc_feature (1)..(2687): Ceres Seq. ID no. 12600411
  misc_feature (1)..(2687): Ortholog of  Ceres SEQ ID NO 14302351 as cited in SEQ ID NO 66690
aaagagagaaaagaaacgttgtagagaaaaaaaggagcagaagaaaacggaggtttttgtttaatttccggatcgtccaaaagtttctcttttttttctcttccttcattgtttcgctgttcctgcgattctgaaactcctcaagctttccattcagaatcgtagcaatggcttttcctctttgattttgtttttgatccgtctctctctctctctctcattgcgtttaaggggtcgctttttttcctcttcatcctcgccgccggcttatggccaactcgccaccaccttcgtcgcgaaatcctccgaagttgttggtggattgttggtcgtttccgtttcttctctctatggttcctactccctcataatttaaggatctgtatcggaataaccgaaacgatctccggtttcggatttgaatattttgggggaaattaaaagaatggggaaaggttggttcatggtagagaaagctagaagatgcttaaggacggtgttcttcatggttgcgatgcttgtctcgctgttagtttcttcgttgcctgtgcttgtagccatcggcgacgttttggttccgacctttttgctttcaagctttacctgtttgacgtgttacggcttcaaggagcatctgagtcgatacgctttcaagagctctttgactgatattcctctcgtctccctcgtcagatctttccttgtcatctgtgtctactctctatccgatgctcctgcactttcgcatggcccttaccttggaactgtatcgctgtgttctgttgtttctgttgttcttctatcagtaaaagcttgcgtttttactgcaaattctcaacttaacgaccaagcctcgtcctctccgtcaaggcaaagactccatctgaaaaagtcttgggggatgccagttttgttcctttcatctgttgtttttgctcttggtcatatggttgttgcttatagaacaagttgcagagctaggaggaaactcttgtatcacagagttgaccctgaagctgttctttcttgcaaaagtgtcttctctggttaccagaaagtcccacgttctccaattcctttggtaggaaaggcctccaaggttgatggcgaggcaagacgaaagctgcatccttcagtatccaacgatgacggagagctacctgcgagattgcttgctgatcttgacagcttattcattacagtcagagggctcactgtgcattacaagatttgcacacctgcttctcctcgccactctatctcctcctcagttgaagccaactctatgcttaatatgccagaggcgatggtgggaaggttgaagcttgacaggaatatattgagcatggtcacgagaaacaagctcaaccatcaccaccataggagctacagcagtctgtttaacaattcttcttccttgcacgaccctctccttgatggtcttcctacttctcctcgtcttttcaaagatattcaggaagaatcgtgccgagaggatggcatcaatgtgtccaattttggtgccacggaacagcaagatgttggtggaaacggccaatttggtgtagtgttggtccatggatttggcggaggagtgttttcttggagacatgtgatgagttctcttgcccatcaacttggctgtgttgtcactgcatttgataggcctggttggggattaaccgccagacctcataaaaaggatttggaagaaagagagatgccaaacccttacactctggataatcaggtagacatgcttcttgccttttgccacgaaatgggatttgcttctgtagtcttggttggccatgatgatggaggtttgcttgctctcaaggctgcacaaagattgctagaaacaaaagatcccatcaaagtcaaaggagtggttttgcttaatgtaagcttgacgagggaagtagtgccagcttttgcaagaatacttctgcacacatcactaggaaagaaacaccttgttcgtccgcttttacgcactgaaatagctcaggtggtgaatcgcagagcttggtatgatcctgccaagatgacaaccgatgtcttaaggctatacaaggcaccacttcatgtggaaggctgggatgaggcacttcacgagataggcagactctcatccgagatggtgcttccaactcaaaatgcattgtcacttctcaaggcagtggaaaacttaccagtattagtcgttgctggagccgaagacgcacttgttcccctcaagtcctcccaagtcatggcttcaaaactcgaaaactctaggctagtagcaatctcaggatgcggacatctgccacatgaggagtgtcccaaggcacttcttgcagccatgtgcccattcataagcagacttgtatttagtgaggactgagtgactgagtgatcactgtacttagtgaggagtgagtgactgagtgatcacttctagttgtcttcttagctcacaatcgattagtgtttgcgagttttttttgtctgccccaaaaggaaagaagttggggtgattgaggtcttagtaagtctgtattcattataagcagagttattgtaacattctctgtttttctcatcagagtttttaatggtttggaataattctgtttattttccacttaagagaagagtggctaaatctttgtaaaattttgcggtagaatacgcgcagtttg

SEQ ID NO: 45420 - protein, 647 aa, Arabidopsis thaliana
  peptide (1)..(647): Ceres Seq. ID no. 12600412
MGKGWFMVEKARRCLRTVFFMVAMLVSLLVSSLPVLVAIGDVLVPTFLLSSFTCLTCYGFKEHLSRYAFKSSLTDIPLVSLVRSFLVICVYSLSDAPALSHGPYLGTVSLCSVVSVVLLSVKACVFTANSQLNDQASSSPSRQRLHLKKSWGMPVLFLSSVVFALGHMVVAYRTSCRARRKLLYHRVDPEAVLSCKSVFSGYQKVPRSPIPLVGKASKVDGEARRKLHPSVSNDDGELPARLLADLDSLFITVRGLTVHYKICTPASPRHSISSSVEANSMLNMPEAMVGRLKLDRNILSMVTRNKLNHHHHRSYSSLFNNSSSLHDPLLDGLPTSPRLFKDIQEESCREDGINVSNFGATEQQDVGGNGQFGVVLVHGFGGGVFSWRHVMSSLAHQLGCVVTAFDRPGWGLTARPHKKDLEEREMPNPYTLDNQVDMLLAFCHEMGFASVVLVGHDDGGLLALKAAQRLLETKDPIKVKGVVLLNVSLTREVVPAFARILLHTSLGKKHLVRPLLRTEIAQVVNRRAWYDPAKMTTDVLRLYKAPLHVEGWDEALHEIGRLSSEMVLPTQNALSLLKAVENLPVLVVAGAEDALVPLKSSQVMASKLENSRLVAISGCGHLPHEECPKALLAAMCPFISRLVFSED

SEQ ID NO: 45421 - protein, 641 aa, Arabidopsis thaliana
  peptide (1)..(641): Ceres Seq. ID no. 12600413
MVEKARRCLRTVFFMVAMLVSLLVSSLPVLVAIGDVLVPTFLLSSFTCLTCYGFKEHLSRYAFKSSLTDIPLVSLVRSFLVICVYSLSDAPALSHGPYLGTVSLCSVVSVVLLSVKACVFTANSQLNDQASSSPSRQRLHLKKSWGMPVLFLSSVVFALGHMVVAYRTSCRARRKLLYHRVDPEAVLSCKSVFSGYQKVPRSPIPLVGKASKVDGEARRKLHPSVSNDDGELPARLLADLDSLFITVRGLTVHYKICTPASPRHSISSSVEANSMLNMPEAMVGRLKLDRNILSMVTRNKLNHHHHRSYSSLFNNSSSLHDPLLDGLPTSPRLFKDIQEESCREDGINVSNFGATEQQDVGGNGQFGVVLVHGFGGGVFSWRHVMSSLAHQLGCVVTAFDRPGWGLTARPHKKDLEEREMPNPYTLDNQVDMLLAFCHEMGFASVVLVGHDDGGLLALKAAQRLLETKDPIKVKGVVLLNVSLTREVVPAFARILLHTSLGKKHLVRPLLRTEIAQVVNRRAWYDPAKMTTDVLRLYKAPLHVEGWDEALHEIGRLSSEMVLPTQNALSLLKAVENLPVLVVAGAEDALVPLKSSQVMASKLENSRLVAISGCGHLPHEECPKALLAAMCPFISRLVFSED

SEQ ID NO: 45422 - protein, 627 aa, Arabidopsis thaliana
  peptide (1)..(627): Ceres Seq. ID no. 12600414
MVAMLVSLLVSSLPVLVAIGDVLVPTFLLSSFTCLTCYGFKEHLSRYAFKSSLTDIPLVSLVRSFLVICVYSLSDAPALSHGPYLGTVSLCSVVSVVLLSVKACVFTANSQLNDQASSSPSRQRLHLKKSWGMPVLFLSSVVFALGHMVVAYRTSCRARRKLLYHRVDPEAVLSCKSVFSGYQKVPRSPIPLVGKASKVDGEARRKLHPSVSNDDGELPARLLADLDSLFITVRGLTVHYKICTPASPRHSISSSVEANSMLNMPEAMVGRLKLDRNILSMVTRNKLNHHHHRSYSSLFNNSSSLHDPLLDGLPTSPRLFKDIQEESCREDGINVSNFGATEQQDVGGNGQFGVVLVHGFGGGVFSWRHVMSSLAHQLGCVVTAFDRPGWGLTARPHKKDLEEREMPNPYTLDNQVDMLLAFCHEMGFASVVLVGHDDGGLLALKAAQRLLETKDPIKVKGVVLLNVSLTREVVPAFARILLHTSLGKKHLVRPLLRTEIAQVVNRRAWYDPAKMTTDVLRLYKAPLHVEGWDEALHEIGRLSSEMVLPTQNALSLLKAVENLPVLVVAGAEDALVPLKSSQVMASKLENSRLVAISGCGHLPHEECPKALLAAMCPFISRLVFSED

SEQ ID NO: 45423 - DNA, 2079 bp, Arabidopsis thaliana
  misc_feature (1)..(2079): Ceres Seq. ID no. 12603831
  misc_feature (1)..(2079): Ortholog of  Ceres SEQ ID NO 13594536 as cited in SEQ ID NO 51382
  misc_feature (1)..(2079): Ortholog of  Ceres SEQ ID NO 15172549 as cited in SEQ ID NO 57185
acgatacaatctggtacatgtaaggcagcattttgccatttctgaaaaacctaaacacaaaactatcttcatcatcatcatcaaatcccagctttcttccaagtgatccttcactctctatactgcgatttaccgttcttctgactcttgttgcgaattcggatcggctgacgcagctccgattgcacaacaatggcttctcgtatcatcaatcattccaaaaagttgaaacatgtttccgctttactgcggcgtgaccatgctgtggcagtccgctgtttctccaacagtacccacccctctctcgttggaagagaagatatcttcaaggcccgcctgaattattcctctgtagagagaatttcaaaatgtggtactggcaatgtaacaatgcttagtggtatttcaacaacgagcacaaaactaagcagcccaatggcaggaccaaaactatttaaagaatttataagctcccagatgcgatcagtgagaggattttcatccagttcagatcttcctcctcatcaagagattggaatgccttctctttcgccaacaatgactgagggtaacattgccaggtggctgaagaaagaaggtgataaagttgctcctggtgaagtgctttgtgaagttgaaactgacaaagcaacagtcgaaatggaatgcatggaagagggttttctcgccaagatagtaaaggaggagggggcaaaagaaattcaagttggggaggtgattgctatcacagttgaagatgaagatgatattcaaaagtttaaagattacacaccctcatccgatactggtcccgctgcgcctgaagcaaaaccagctccttccctaccaaaggaagagaaggtagagaagccagccagtgctcctgaagccaagatctctaagccaagctcagctccttcagaagatcgtatttttgccagtcctcttgcaagaaagttggctgaagataataatgtacctctctcaagcattaaaggcacaggtcctgaaggacggatagtgaaggctgatgtcgaagatttcttagcttcaggcagtaaagaaactactgccaaaccttccaagcaagtggattcaaaggttccagctcttgactatgttgacatccctcacactcagatacgaaaggtcacagcctcacgtttggcattctcaaagcaaactattcctcactactacttgaccgtggatacatgtgttgacaaaatgatgggtcttaggagtcaactcaattcatttcaagaggcttccggtgggaaaaggatatctgtaaatgatcttgttattaaggctgctgcactggctcttcgaaaagttcctcagtgcaatagttcatggacagatgaatacatccgccaatttaaaaatgtgaacatcaatgtcgctgtacaaacagaaaatgggctctacgttcctgtggtcaaggacgcggacaagaaaggactgtctacaattggagaagaggttcgattcttggctcaaaaagcaaaagaaaacagcttgaagccggaagattatgagggaggaacattcacagtctccaacctggggggaccttttggcatcaaacagttctgtgccgtcatcaatccacctcaagcagccattctagcaatcggatctgctgaaaagagagttgttcccggtactggtccagaccaatacaacgttgcttcatacatgtctgtaacactaagctgtgaccaccgcgtaatagatggtgcaattggagccgagtggctgaaagcattcaagggctacatcgagaccccagaatctatgttgctctaaaattcagacgcacacacacatcaaaagctaaactcataagagtcttctgacctcaaatttctttcccacaacatattctaccagatttgatcagcagtaggcaatggcctttaaagttgagtgttttgctattctttaaatcattgagttgacagatttttgtctcaaaataaaatcaggaatccaacaatttcactgtgcacttgttttttggcttaatgcttgttcatcatgggttggcaaaataaaacccatttacttaatttt

SEQ ID NO: 45424 - protein, 539 aa, Arabidopsis thaliana
  peptide (1)..(539): Ceres Seq. ID no. 12603832
MASRIINHSKKLKHVSALLRRDHAVAVRCFSNSTHPSLVGREDIFKARLNYSSVERISKCGTGNVTMLSGISTTSTKLSSPMAGPKLFKEFISSQMRSVRGFSSSSDLPPHQEIGMPSLSPTMTEGNIARWLKKEGDKVAPGEVLCEVETDKATVEMECMEEGFLAKIVKEEGAKEIQVGEVIAITVEDEDDIQKFKDYTPSSDTGPAAPEAKPAPSLPKEEKVEKPASAPEAKISKPSSAPSEDRIFASPLARKLAEDNNVPLSSIKGTGPEGRIVKADVEDFLASGSKETTAKPSKQVDSKVPALDYVDIPHTQIRKVTASRLAFSKQTIPHYYLTVDTCVDKMMGLRSQLNSFQEASGGKRISVNDLVIKAAALALRKVPQCNSSWTDEYIRQFKNVNINVAVQTENGLYVPVVKDADKKGLSTIGEEVRFLAQKAKENSLKPEDYEGGTFTVSNLGGPFGIKQFCAVINPPQAAILAIGSAEKRVVPGTGPDQYNVASYMSVTLSCDHRVIDGAIGAEWLKAFKGYIETPESMLL

SEQ ID NO: 45425 - protein, 473 aa, Arabidopsis thaliana
  peptide (1)..(473): Ceres Seq. ID no. 12603833
MLSGISTTSTKLSSPMAGPKLFKEFISSQMRSVRGFSSSSDLPPHQEIGMPSLSPTMTEGNIARWLKKEGDKVAPGEVLCEVETDKATVEMECMEEGFLAKIVKEEGAKEIQVGEVIAITVEDEDDIQKFKDYTPSSDTGPAAPEAKPAPSLPKEEKVEKPASAPEAKISKPSSAPSEDRIFASPLARKLAEDNNVPLSSIKGTGPEGRIVKADVEDFLASGSKETTAKPSKQVDSKVPALDYVDIPHTQIRKVTASRLAFSKQTIPHYYLTVDTCVDKMMGLRSQLNSFQEASGGKRISVNDLVIKAAALALRKVPQCNSSWTDEYIRQFKNVNINVAVQTENGLYVPVVKDADKKGLSTIGEEVRFLAQKAKENSLKPEDYEGGTFTVSNLGGPFGIKQFCAVINPPQAAILAIGSAEKRVVPGTGPDQYNVASYMSVTLSCDHRVIDGAIGAEWLKAFKGYIETPESMLL

SEQ ID NO: 45426 - protein, 458 aa, Arabidopsis thaliana
  peptide (1)..(458): Ceres Seq. ID no. 12603834
MAGPKLFKEFISSQMRSVRGFSSSSDLPPHQEIGMPSLSPTMTEGNIARWLKKEGDKVAPGEVLCEVETDKATVEMECMEEGFLAKIVKEEGAKEIQVGEVIAITVEDEDDIQKFKDYTPSSDTGPAAPEAKPAPSLPKEEKVEKPASAPEAKISKPSSAPSEDRIFASPLARKLAEDNNVPLSSIKGTGPEGRIVKADVEDFLASGSKETTAKPSKQVDSKVPALDYVDIPHTQIRKVTASRLAFSKQTIPHYYLTVDTCVDKMMGLRSQLNSFQEASGGKRISVNDLVIKAAALALRKVPQCNSSWTDEYIRQFKNVNINVAVQTENGLYVPVVKDADKKGLSTIGEEVRFLAQKAKENSLKPEDYEGGTFTVSNLGGPFGIKQFCAVINPPQAAILAIGSAEKRVVPGTGPDQYNVASYMSVTLSCDHRVIDGAIGAEWLKAFKGYIETPESMLL

SEQ ID NO: 45427 - DNA, 1586 bp, Arabidopsis thaliana
  misc_feature (1)..(1586): Ceres Seq. ID no. 13646588
  misc_feature (1)..(1586): Ortholog of  Ceres SEQ ID NO 14313413 as cited in SEQ ID NO 58766
  misc_feature (1)..(1586): Ortholog of  Ceres SEQ ID NO 15171109 as cited in SEQ ID NO 59576
actagtccccccccccccaaataaatataactcccgtatttgattctttcttcaagatatcaatcaagatcaagagtaagacagagacacaaaggcgagagctatgtcgtcgtcggtggatttcgtgacggaacaggggagatgcggcgacgatggtaacggcgccggagagacagtaaagaatggcgaaattgatcatttgctttccgaaccgtcggctccgactatttctctccctacggaatctttcctcagagcagcgacgttactcaagaaccaggttctggaggccacgtggaaaggtggtgtcgaagctcttgcctctggttcgggtccagtgctggatccgactgtgtacacaggactactcggcacagcgttcacctgcttgaagtcgtacgaggtaacgcggaaccatcaagatctgctaacttgcgcagagataatcgacacgtgtgccaacgttgcgcgtgccacaaccaggcacgtgacatttttatgtggaagaggaggagtttgtacgcttggtgcaattgtagccaattacagaggggaccaatcaaagcgtgacttcttcctcggtctttttcttgagcttgcagaagagagagagttaccagcaggaccagaggaaggaggatttgggatgtcatatgaccttctctatggaagagcgggtttcctttgggctgctctgttcctaaaccgatatctcggccaaggaactgttcctgaccatctcttatcacccattgttgcagccatcttagccggtgggcgagttggagctgcagatcatgaagcttgtcctctgttatacaggtttcacggaacgcgattttggggtgctgcgaatggattagctggaatcttgtatgtattgctgcattttccactatcggaagaggatgttaaagatgttcaagggacattgaggtatatgatgagtaataggtttccgaacagcggaaactacccgtgcagcgaagggaatccgagggataagctagtccaatgggctcatggagcaaccggcatggccattactttggctaaagcatctcaggtgtttcccaaggaaagggatttccgcgaagcagccattgaagcaggagaagtagtgtggaagagtggcttggtgaagaaggtaggtttagccgatggagttgctggtaatgcctacgctttcttatccctttatcgcttaaccggagatgttgtatatgaagagagagcaaaagcgtttgcgagttacttgtgccgtgatgcgatagagctcgtgaatatgacaagccaagaaacagaacatgattattcgcttttccggggactagctggaccagtatgcctctggttcgatcttgtgtcaccggtagattctaagtttcctggttatgagatataatttaaaacaggtaatagataaaccgtaggttctattatgactatctctttgtgaaaggatcttaggttctccggtttattccactttctataatctattgaagtaacttgagatttgggagaaaaaaaaaaaaaaaaaaactcgagggggggcccggtacccaattcgccctatagtgatg

SEQ ID NO: 45428 - protein, 433 aa, Arabidopsis thaliana
  peptide (1)..(433): Ceres Seq. ID no. 13646589
MSSSVDFVTEQGRCGDDGNGAGETVKNGEIDHLLSEPSAPTISLPTESFLRAATLLKNQVLEATWKGGVEALASGSGPVLDPTVYTGLLGTAFTCLKSYEVTRNHQDLLTCAEIIDTCANVARATTRHVTFLCGRGGVCTLGAIVANYRGDQSKRDFFLGLFLELAEERELPAGPEEGGFGMSYDLLYGRAGFLWAALFLNRYLGQGTVPDHLLSPIVAAILAGGRVGAADHEACPLLYRFHGTRFWGAANGLAGILYVLLHFPLSEEDVKDVQGTLRYMMSNRFPNSGNYPCSEGNPRDKLVQWAHGATGMAITLAKASQVFPKERDFREAAIEAGEVVWKSGLVKKVGLADGVAGNAYAFLSLYRLTGDVVYEERAKAFASYLCRDAIELVNMTSQETEHDYSLFRGLAGPVCLWFDLVSPVDSKFPGYEI

SEQ ID NO: 45429 - protein, 252 aa, Arabidopsis thaliana
  peptide (1)..(252): Ceres Seq. ID no. 13646590
MSYDLLYGRAGFLWAALFLNRYLGQGTVPDHLLSPIVAAILAGGRVGAADHEACPLLYRFHGTRFWGAANGLAGILYVLLHFPLSEEDVKDVQGTLRYMMSNRFPNSGNYPCSEGNPRDKLVQWAHGATGMAITLAKASQVFPKERDFREAAIEAGEVVWKSGLVKKVGLADGVAGNAYAFLSLYRLTGDVVYEERAKAFASYLCRDAIELVNMTSQETEHDYSLFRGLAGPVCLWFDLVSPVDSKFPGYEI

SEQ ID NO: 45430 - DNA, 2301 bp, Arabidopsis thaliana; identical to SEQ ID NO: 45244
  misc_feature (1)..(2301): Ceres Seq. ID no. 12560567
  misc_feature (1)..(2301): Ortholog of  Ceres SEQ ID NO 14315434 as cited in SEQ ID NO 58671

SEQ ID NO: 45431 - protein, 613 aa, Arabidopsis thaliana; identical to SEQ ID NO: 45245
  peptide (1)..(613): Ceres Seq. ID no. 12560568

SEQ ID NO: 45432 - protein, 558 aa, Arabidopsis thaliana; identical to SEQ ID NO: 45246
  peptide (1)..(558): Ceres Seq. ID no. 12560569

SEQ ID NO: 45433 - protein, 539 aa, Arabidopsis thaliana; identical to SEQ ID NO: 45247
  peptide (1)..(539): Ceres Seq. ID no. 12560570

SEQ ID NO: 45434 - DNA, 2274 bp, Arabidopsis thaliana; identical to SEQ ID NO: 25855
  misc_feature (1)..(2274): Ceres Seq. ID no. 13591529
  misc_feature (1)..(2274): Ortholog of  Ceres SEQ ID NO 14303276 as cited in SEQ ID NO 1264
  misc_feature (1)..(2274): Ortholog of  Ceres SEQ ID NO 12465083 as cited in SEQ ID NO 68239

SEQ ID NO: 45435 - protein, 690 aa, Arabidopsis thaliana; identical to SEQ ID NO: 25856
  peptide (1)..(690): Ceres Seq. ID no. 13591530

SEQ ID NO: 45436 - protein, 669 aa, Arabidopsis thaliana; identical to SEQ ID NO: 25857
  peptide (1)..(669): Ceres Seq. ID no. 13591531

SEQ ID NO: 45437 - protein, 516 aa, Arabidopsis thaliana; identical to SEQ ID NO: 25858
  peptide (1)..(516): Ceres Seq. ID no. 13591532

SEQ ID NO: 45438 - DNA, 1197 bp, Arabidopsis thaliana
  misc_feature (1)..(1197): Ceres Seq. ID no. 12606693
  misc_feature (1)..(1197): Ortholog of  Ceres SEQ ID NO 12612333 as cited in SEQ ID NO 56421
acaccatccactctactcaacatggactcctccaaactctcatctctctctctttgcctcttcctcatttgcattatctatctcccccaacattctctcgcatgcggctcttgcaacccacggaagggcggaaagcactcccctaaagcccctaagctaccagttcctccggtgaccgtccctaagctaccagttcctccggtgaccgtccctaagctaccagtccctccggtgaccgtccctaagctacccgttcctcctgtgaccatccctaagctacccgttccaccagtgactgtacctaagctacccgttcctcctgtgaccgtccccaagctacccgttcctccagtgaccgtccccaagctacccgttcctccagtgacagtccctaagctacccgttcccccggtaactgtacctaagctacccgttcctccagtgaccgtccctaagctaccccttcctccgatttcagggctacccatacctccagtggtaggtcccaatctgccattgccgcctttgccaattgtaggtcctattcttccaccgggaacaaccccaccagccacaggagggaaggactgtcctccaccgccagggagcgtaaagccaccatcagggggcgggaaggcgacatgtccaatagacacgctgaagttaggtgcttgcgtcgacttgttgggaggtttagtaaagatagggcttggggatccagcagttaacaaatgttgtccgttacttaaaggcctcgttgaagtcgaagccgcggcttgtctctgcactaccctcaagctcaaagctcttgacctcaatctttatgtccctgttgctcttcagcttctccttacctgtggcaaaaatccacctccgggctacacttgttccatatgataaactcactccacttataaaggatgctttggagaaaaaagtgagaagagaatggcagagctccaatctttcctgtcttggtttaccaaatatatcatatcaaatcctatccctttgattctttcctctatcgttcccttatgcttgtatcattaattaatgtgtgctttttagattaatgattcttctcttgtattaaagtatgatttgaaatcctttttttttctctatctctttttattgaatggattgaactgcgttcatgatactgtcaaaaagagagaaaaagagtacaatttt

SEQ ID NO: 45439 - protein, 298 aa, Arabidopsis thaliana
  peptide (1)..(298): Ceres Seq. ID no. 12606694
TPSTLLNMDSSKLSSLSLCLFLICIIYLPQHSLACGSCNPRKGGKHSPKAPKLPVPPVTVPKLPVPPVTVPKLPVPPVTVPKLPVPPVTIPKLPVPPVTVPKLPVPPVTVPKLPVPPVTVPKLPVPPVTVPKLPVPPVTVPKLPVPPVTVPKLPLPPISGLPIPPVVGPNLPLPPLPIVGPILPPGTTPPATGGKDCPPPPGSVKPPSGGGKATCPIDTLKLGACVDLLGGLVKIGLGDPAVNKCCPLLKGLVEVEAAACLCTTLKLKALDLNLYVPVALQLLLTCGKNPPPGYTCSI

SEQ ID NO: 45440 - protein, 291 aa, Arabidopsis thaliana
  peptide (1)..(291): Ceres Seq. ID no. 12606695
MDSSKLSSLSLCLFLICIIYLPQHSLACGSCNPRKGGKHSPKAPKLPVPPVTVPKLPVPPVTVPKLPVPPVTVPKLPVPPVTIPKLPVPPVTVPKLPVPPVTVPKLPVPPVTVPKLPVPPVTVPKLPVPPVTVPKLPVPPVTVPKLPLPPISGLPIPPVVGPNLPLPPLPIVGPILPPGTTPPATGGKDCPPPPGSVKPPSGGGKATCPIDTLKLGACVDLLGGLVKIGLGDPAVNKCCPLLKGLVEVEAAACLCTTLKLKALDLNLYVPVALQLLLTCGKNPPPGYTCSI

SEQ ID NO: 45441 - DNA, 2045 bp, Arabidopsis thaliana
  misc_feature (1)..(2045): Ceres Seq. ID no. 13646629
  misc_feature (1)..(2045): Ortholog of  Ceres SEQ ID NO 14313636 as cited in SEQ ID NO 64205
atcagagagttctttctcaaaaactatttacacatcaaaaataaaatcaaaataaattgttgtgatcatagagttctcttgcaccaatgagtgctccaaagtttggttatgtattactattgattgtattaatcaatattagcaataatggcgtcgatgcatttcacaaagttttcaagaaattgcaatcaaaatcgacatcattggagtcagtaagtcctcttcacagaaccgcttatcactttcaacctccccgccattggatcaacgatccgaatgctccaatgctctacaagggagtttaccatctcttctaccaatacaatcccaaaggtgcggtttggggtaacattgtgtgggctcactcggtttctaaggacttgatcaattgggaagcccttgaaccagccatttacccatccaaatggttcgacatcaacggtacatggtccggttcagctacccacgtaccgggaaaaggaccggttatcctctacaccggtatcaccgagaaccagactcagattcaaaactacgccattccacaagatctttccgacccatacctcaagacatggataaagccagacgataaccccatcgtaaaacccgataatggcgagaacggatccgctttccgtgacccgaccacggcttggttcaacaaaaaagatgggtattggagaatgcttgttggctcaaagagaaagaacagaggaattgcttatatgtacaagagccgtgacttcaaaaaatgggtcaaaagcaaacgtcctatccactcaagaaagaaaaccggtatgtgggaatgtcccgatttcttcccggtatccgtaaccgacaagaaaaacggtttggacttcagctacgacggtccaaacgccaagcatgtgttgaaggttagtttggacttgaccagatacgagtactacactcttggaacgtatgacaccaagaaggatcgttacaggccagacagttacactcctgacggttgggatggtttgagatttgattatggtaactactatgcgtcaaagacattctttgatgacaagacgaacagaagaattctttgggggtgggccaatgaatccgacaccgttcaagatgataccgtgaagggttgggccggaattcagcttatcccaagaacaatcttgcttgactctagcggtaagcaactcgtgttttggcctattgaagagattgagtcattgagaggaaagaatgtccaaatgaccaaccagaaaatggagatgggccaacgctttgaggtccaaggaatcactcctgctcaggtggatgtggatgtgacattcaacgttggaaatctagagaaggccgaaaagtttgacgaaagcttcgcaactaaaccactagagttatgtaacttgaaaggttcgaatgtgaatggtggagttggtccttttggtttgatcacgttggctacatctgacttagaagaatacactcctgttttctttagagtcttcaaagatgccgcatccaacaagcctaaggttctcatgtgctctgacgccaagccttcgagtctcaaaaaagacaccgggactgacgccaaggagaggatgtacaaaccatcgtttgctggttttgtggatgtcggtctccttgacggaaagatctctctaaggagtttgattgatcactcggttgtggagagctttggagcaaaaggaaagacagtgataacatctagagtgtatccgacaaaagcagtaggagaaaaagctcatttgtttgtctttaacaacggctcacaacctgtgaccgtagagagcctcaatgcatggaacatgcagaagcctctgaagatgaaccaaggtgcaaagtgatcacatcattctttaattttttcgttgacaaatttaattcattcgttaaaacagagagtctgtcacaatatattgtagaaaaaaggaacctattgtgtttcttttacaatcaatacaatttgtacatagtttatcactactaacaaagtattgatcttatattttattaatgaaacacgtttcctt

SEQ ID NO: 45442 - protein, 590 aa, Arabidopsis thaliana
  peptide (1)..(590): Ceres Seq. ID no. 13646630
MSAPKFGYVLLLIVLINISNNGVDAFHKVFKKLQSKSTSLESVSPLHRTAYHFQPPRHWINDPNAPMLYKGVYHLFYQYNPKGAVWGNIVWAHSVSKDLINWEALEPAIYPSKWFDINGTWSGSATHVPGKGPVILYTGITENQTQIQNYAIPQDLSDPYLKTWIKPDDNPIVKPDNGENGSAFRDPTTAWFNKKDGYWRMLVGSKRKNRGIAYMYKSRDFKKWVKSKRPIHSRKKTGMWECPDFFPVSVTDKKNGLDFSYDGPNAKHVLKVSLDLTRYEYYTLGTYDTKKDRYRPDSYTPDGWDGLRFDYGNYYASKTFFDDKTNRRILWGWANESDTVQDDTVKGWAGIQLIPRTILLDSSGKQLVFWPIEEIESLRGKNVQMTNQKMEMGQRFEVQGITPAQVDVDVTFNVGNLEKAEKFDESFATKPLELCNLKGSNVNGGVGPFGLITLATSDLEEYTPVFFRVFKDAASNKPKVLMCSDAKPSSLKKDTGTDAKERMYKPSFAGFVDVGLLDGKISLRSLIDHSVVESFGAKGKTVITSRVYPTKAVGEKAHLFVFNNGSQPVTVESLNAWNMQKPLKMNQGAK

SEQ ID NO: 45443 - protein, 524 aa, Arabidopsis thaliana
  peptide (1)..(524): Ceres Seq. ID no. 13646631
MLYKGVYHLFYQYNPKGAVWGNIVWAHSVSKDLINWEALEPAIYPSKWFDINGTWSGSATHVPGKGPVILYTGITENQTQIQNYAIPQDLSDPYLKTWIKPDDNPIVKPDNGENGSAFRDPTTAWFNKKDGYWRMLVGSKRKNRGIAYMYKSRDFKKWVKSKRPIHSRKKTGMWECPDFFPVSVTDKKNGLDFSYDGPNAKHVLKVSLDLTRYEYYTLGTYDTKKDRYRPDSYTPDGWDGLRFDYGNYYASKTFFDDKTNRRILWGWANESDTVQDDTVKGWAGIQLIPRTILLDSSGKQLVFWPIEEIESLRGKNVQMTNQKMEMGQRFEVQGITPAQVDVDVTFNVGNLEKAEKFDESFATKPLELCNLKGSNVNGGVGPFGLITLATSDLEEYTPVFFRVFKDAASNKPKVLMCSDAKPSSLKKDTGTDAKERMYKPSFAGFVDVGLLDGKISLRSLIDHSVVESFGAKGKTVITSRVYPTKAVGEKAHLFVFNNGSQPVTVESLNAWNMQKPLKMNQGAK

SEQ ID NO: 45444 - protein, 390 aa, Arabidopsis thaliana
  peptide (1)..(390): Ceres Seq. ID no. 13646632
MLVGSKRKNRGIAYMYKSRDFKKWVKSKRPIHSRKKTGMWECPDFFPVSVTDKKNGLDFSYDGPNAKHVLKVSLDLTRYEYYTLGTYDTKKDRYRPDSYTPDGWDGLRFDYGNYYASKTFFDDKTNRRILWGWANESDTVQDDTVKGWAGIQLIPRTILLDSSGKQLVFWPIEEIESLRGKNVQMTNQKMEMGQRFEVQGITPAQVDVDVTFNVGNLEKAEKFDESFATKPLELCNLKGSNVNGGVGPFGLITLATSDLEEYTPVFFRVFKDAASNKPKVLMCSDAKPSSLKKDTGTDAKERMYKPSFAGFVDVGLLDGKISLRSLIDHSVVESFGAKGKTVITSRVYPTKAVGEKAHLFVFNNGSQPVTVESLNAWNMQKPLKMNQGAK

SEQ ID NO: 45445 - DNA, 1788 bp, Arabidopsis thaliana
  misc_feature (1)..(1788): Ceres Seq. ID no. 14315390
  misc_feature (1)..(1788): Ortholog of  Ceres SEQ ID NO 15179007 as cited in SEQ ID NO 1038
  misc_feature (1)..(1788): Ortholog of  Ceres SEQ ID NO 13597146 as cited in SEQ ID NO 63311
gaaacgatcattttctaggaaaacgaacgaacagaggacaaatatattagataaacagagggaaacaagaacaaaaacgtttgcttcattctctaatggcagccaccacgagacggttgctttactctgtgtccaaaagattctctaccgccggagtgcggcggagctatggcggtctgccacaatcgaattccaaatctcctccgtcttcttctcaacgattgatggaattggaatctgaattcagtgcccacaattaccatcctgttccggttgtgttttctcgcgcgaatggctcaactatatgggaccctgaaggaaagagatacattgattttcttgcagcttactctgcagttaatcagggacattgtcatcctaagatcatgaaggcattgcaggaacaagtggagaagctcactttaagttcacgagcgttttacaacgataaattcccggtatttgctgagcgtctcacaaacatgttcggttatgatatggtgcttcctatgaacacgggtgctgaaggtgtcgaaaccgctttgaaactagcaagaaaatggggtcatgaaaagaaaaatattcccaaagacgaggctatcattgtctcttgttgtggctgctttcatggacgtacattagcaattgtttccatgagttgtgacaatgatgctactcgtggattcgggccattgttgccagggaatcttaaagttgattttggtgatgcggattcacttgagaaaatcattaaagaaaagggagatagaatagcgggatttctattcgagcctattcaaggcgaagctggagttattattcctcccgacggttacttgaaagctgttagagaactctgcacaaaatacaatgttttgatgatagcggatgaagtacaaagcggtctggctagatccgggaagatgctagcttgtgattgggaagaaattcgtcctgacatggtgatacttgggaaagcattaggtggaggagtaattccagtaagtgcagtgcttgctgataaagacgtgatgcttcatataaaacctggtcaacacggaagcacatttggtggtaaccctttagctagtgctgtagctatggcttctttagacgttatcgtggaagaaaaactcgttgaaagatcagcaagtcttggagaggaactgaggattcaattgaatgaaatcaagaaacagtttccgaagtacataaaggaagtacgaggaagaggcttgtttaatgcgattgagttcaatagcgaaagcttgtccccggtttcagcttacgatatttgcttgagcttgaaggagagaggagtcttggctaaacctactcacaacactattgtccggttaactccaccactctctataagctctgatgaactccgagaaggatctgaggctcttcacgatgtcctcgagctcgatcttccaaatctgctgaaaatcaattccggtaaaactccggtttctcatataaccgagtgtgatcgctgtggaagaaacctctatgcttgaaccggtttgaaacttgattaggttctggtataattagattctttgtatcttgtgatttccataggacacagcaccggtttggtataagaaatatattaaagtataaggccgaaccggattgtaccgagcttggtagaaataactctggtttatttctggtttggcattaaataaaaccaacataaaataatatgatgcctgttttcataggtgttatacatgatatctcaacaaacaaataaatgttacataacaatatgtatgg

SEQ ID NO: 45446 - protein, 475 aa, Arabidopsis thaliana
  peptide (1)..(475): Ceres Seq. ID no. 14315391
MAATTRRLLYSVSKRFSTAGVRRSYGGLPQSNSKSPPSSSQRLMELESEFSAHNYHPVPVVFSRANGSTIWDPEGKRYIDFLAAYSAVNQGHCHPKIMKALQEQVEKLTLSSRAFYNDKFPVFAERLTNMFGYDMVLPMNTGAEGVETALKLARKWGHEKKNIPKDEAIIVSCCGCFHGRTLAIVSMSCDNDATRGFGPLLPGNLKVDFGDADSLEKIIKEKGDRIAGFLFEPIQGEAGVIIPPDGYLKAVRELCTKYNVLMIADEVQSGLARSGKMLACDWEEIRPDMVILGKALGGGVIPVSAVLADKDVMLHIKPGQHGSTFGGNPLASAVAMASLDVIVEEKLVERSASLGEELRIQLNEIKKQFPKYIKEVRGRGLFNAIEFNSESLSPVSAYDICLSLKERGVLAKPTHNTIVRLTPPLSISSDELREGSEALHDVLELDLPNLLKINSGKTPVSHITECDRCGRNLYA

SEQ ID NO: 45447 - protein, 432 aa, Arabidopsis thaliana
  peptide (1)..(432): Ceres Seq. ID no. 14315392
MELESEFSAHNYHPVPVVFSRANGSTIWDPEGKRYIDFLAAYSAVNQGHCHPKIMKALQEQVEKLTLSSRAFYNDKFPVFAERLTNMFGYDMVLPMNTGAEGVETALKLARKWGHEKKNIPKDEAIIVSCCGCFHGRTLAIVSMSCDNDATRGFGPLLPGNLKVDFGDADSLEKIIKEKGDRIAGFLFEPIQGEAGVIIPPDGYLKAVRELCTKYNVLMIADEVQSGLARSGKMLACDWEEIRPDMVILGKALGGGVIPVSAVLADKDVMLHIKPGQHGSTFGGNPLASAVAMASLDVIVEEKLVERSASLGEELRIQLNEIKKQFPKYIKEVRGRGLFNAIEFNSESLSPVSAYDICLSLKERGVLAKPTHNTIVRLTPPLSISSDELREGSEALHDVLELDLPNLLKINSGKTPVSHITECDRCGRNLYA

SEQ ID NO: 45448 - protein, 378 aa, Arabidopsis thaliana
  peptide (1)..(378): Ceres Seq. ID no. 14315393
MKALQEQVEKLTLSSRAFYNDKFPVFAERLTNMFGYDMVLPMNTGAEGVETALKLARKWGHEKKNIPKDEAIIVSCCGCFHGRTLAIVSMSCDNDATRGFGPLLPGNLKVDFGDADSLEKIIKEKGDRIAGFLFEPIQGEAGVIIPPDGYLKAVRELCTKYNVLMIADEVQSGLARSGKMLACDWEEIRPDMVILGKALGGGVIPVSAVLADKDVMLHIKPGQHGSTFGGNPLASAVAMASLDVIVEEKLVERSASLGEELRIQLNEIKKQFPKYIKEVRGRGLFNAIEFNSESLSPVSAYDICLSLKERGVLAKPTHNTIVRLTPPLSISSDELREGSEALHDVLELDLPNLLKINSGKTPVSHITECDRCGRNLYA

SEQ ID NO: 45449 - DNA, 2676 bp, Arabidopsis thaliana
  misc_feature (1)..(2676): Ceres Seq. ID no. 13576299
  misc_feature (1)..(2676): Ortholog of  Ceres SEQ ID NO 13595900 as cited in SEQ ID NO 69289
gaagaaaccaaaaaaaaaacatcccataaataagaagatcccttaacagaaggttaaaaaaaaaagatcagagtcctttggattcttcaattgcttagtctcataaatccccaaaatctctccacccagttggatttgcagctctctcagattcatcagtttcttgatctctttgttatattcaatttcacgaagattgtatccagagcagatgggtctggaagcttctttctttctcagtgatttcgatcgttccatggaccagacgtacgatgcctgagctgcgtagcaacgcacgcagagatcgggataagaagaacccgaagcagaacccaattgctttgaaacaatcacctgttaggagaaatccgaggcggcagctgaagaagaaagtggtggtgaaggaagcgatcgttgcagctgaaaagacgacgcctttggtgaaagaggaagaagaacagattagggtttcgagtgaagataagaagatggatgagaacgacagtggtggtcaagcagctccagtgcctgatgatgaaggaaacgctcctccacttcctgaaaaggttcaggttggtaattcacccatgtacaagttagatagaaagctaggcaaaggtggttttggacaagtttatgttggtcgaaagatgggcacgagtacttctaatgctagatttggcccgggagctttggaggtggctttgaagtttgagcatagaaccagcaaaggatgtaactatgggccaccgtatgagtggcaagtttacaatgcacttggtggcagtcatggtgtgccacgagttcattttaagggtcggcagggcgatttttacgtgatggttatggatatccttgggcctagcttatgggatgtttggaatagtaccacccaggcgtaaacattcactctgagaaacatttactttattttgtagcatctgaagattttgttatatgaaccattgataaacataatttttcctgagatgagcccttcaatattggtggcactcaccatatgatttgtgtgttttatacattccaggatgtcaacagagatggttgcatgcattgcaattgaggcaatatccatattagaaaagatgcattctagaggatatgtgcatggcgatgtaaaaccagagaattttctgcttgggcctcctggaactcctgaagagaaaaaacttttccttgtagacctcggcttagcatccaaatggcgagatactgcaactggactacatgttgaatatgaccagcgtcctgatgtttttagaggaacagtacgttatgctagtgtacatgctcatcttggcagaacttgcagtcggagggatgacctggaatctcttgcttacactcttgttttccttcttcgaggccggcttccatggcaagggtaccagggagagaacaaaggtttccttgtttgcaagaagaagatggccacttccccagaaactctttgctgcttctgtccccaaccttttcgtcagtttgtcgagtatgtggtcaatttgaagtttgatgaggagcctgattatgctaaatatgtctccctttttgatggaatagtcggcccaaacccagacattaggccaataaatactgagggtgcacagaagctcatacatcaagtgggtcaaaagagggggaggctgacaatggacgaggaggatgaacaaccaacaaagaagatcagattgggcatgccagcaacacaatggatcagcatttacagtgctcacagaccaatgaaacaacgatatcattataatgttactgatacaaggcttgcacaacacattgaaaaaggaaatgaggatgggttatttatcagcagtgtggcttcttgcacggatctctgggctttgatcatggatgcaggaagtggctttacggatcaagtttaccagttatcaccaagctttctccacaaggaatggattatggaacaatgggaaaagaattactatattacagcagtggcaggagcaaatagtgggaactcattcgtggttatgtcaaaagggacccagtatttacaacaatcctacaaagtcagtgattcttttcccttcaagtggataaataaaaagtggagggaagggttttatgttacatcaatggcaactgctggaagcaaatggggaattgtaatgtctcgtggggcttctttttctgatcaggttatagaactagattttctataccctagtgaaggtatacatcgtcgatgggaaaatggctacagaattacatcagttgctgcaacttgggatcaggctgcctttgttcttagtgtgccaagaaggaagcttaccgatgagacacaggagactcttagaacctctgcttttcctagtaatcatgtcaaggaaaaatggggcaagaatctttacattgcatcgatttgttatggtcgaactgtgtcatgaagttctaaattttttgttaggatgcatctcaatttagctttaccatatatccgctaagaaaaaagaatcgttgtgatcagtgatggtatgggcttagggaaccttttagcaaggttgaatgaatgtttgccaaacttcagtgatgctgcaatgtagtgtatcgactgcaaaaacttatcctacttttcaacttggatgacttgtttgatgaaagaagttaaaatttctttag

SEQ ID NO: 45450 - protein, 464 aa, Arabidopsis thaliana
  peptide (1)..(464): Ceres Seq. ID no. 13576300
MSTEMVACIAIEAISILEKMHSRGYVHGDVKPENFLLGPPGTPEEKKLFLVDLGLASKWRDTATGLHVEYDQRPDVFRGTVRYASVHAHLGRTCSRRDDLESLAYTLVFLLRGRLPWQGYQGENKGFLVCKKKMATSPETLCCFCPQPFRQFVEYVVNLKFDEEPDYAKYVSLFDGIVGPNPDIRPINTEGAQKLIHQVGQKRGRLTMDEEDEQPTKKIRLGMPATQWISIYSAHRPMKQRYHYNVTDTRLAQHIEKGNEDGLFISSVASCTDLWALIMDAGSGFTDQVYQLSPSFLHKEWIMEQWEKNYYITAVAGANSGNSFVVMSKGTQYLQQSYKVSDSFPFKWINKKWREGFYVTSMATAGSKWGIVMSRGASFSDQVIELDFLYPSEGIHRRWENGYRITSVAATWDQAAFVLSVPRRKLTDETQETLRTSAFPSNHVKEKWGKNLYIASICYGRTVS

SEQ ID NO: 45451 - protein, 460 aa, Arabidopsis thaliana
  peptide (1)..(460): Ceres Seq. ID no. 13576301
MVACIAIEAISILEKMHSRGYVHGDVKPENFLLGPPGTPEEKKLFLVDLGLASKWRDTATGLHVEYDQRPDVFRGTVRYASVHAHLGRTCSRRDDLESLAYTLVFLLRGRLPWQGYQGENKGFLVCKKKMATSPETLCCFCPQPFRQFVEYVVNLKFDEEPDYAKYVSLFDGIVGPNPDIRPINTEGAQKLIHQVGQKRGRLTMDEEDEQPTKKIRLGMPATQWISIYSAHRPMKQRYHYNVTDTRLAQHIEKGNEDGLFISSVASCTDLWALIMDAGSGFTDQVYQLSPSFLHKEWIMEQWEKNYYITAVAGANSGNSFVVMSKGTQYLQQSYKVSDSFPFKWINKKWREGFYVTSMATAGSKWGIVMSRGASFSDQVIELDFLYPSEGIHRRWENGYRITSVAATWDQAAFVLSVPRRKLTDETQETLRTSAFPSNHVKEKWGKNLYIASICYGRTVS

SEQ ID NO: 45452 - protein, 445 aa, Arabidopsis thaliana
  peptide (1)..(445): Ceres Seq. ID no. 13576302
MHSRGYVHGDVKPENFLLGPPGTPEEKKLFLVDLGLASKWRDTATGLHVEYDQRPDVFRGTVRYASVHAHLGRTCSRRDDLESLAYTLVFLLRGRLPWQGYQGENKGFLVCKKKMATSPETLCCFCPQPFRQFVEYVVNLKFDEEPDYAKYVSLFDGIVGPNPDIRPINTEGAQKLIHQVGQKRGRLTMDEEDEQPTKKIRLGMPATQWISIYSAHRPMKQRYHYNVTDTRLAQHIEKGNEDGLFISSVASCTDLWALIMDAGSGFTDQVYQLSPSFLHKEWIMEQWEKNYYITAVAGANSGNSFVVMSKGTQYLQQSYKVSDSFPFKWINKKWREGFYVTSMATAGSKWGIVMSRGASFSDQVIELDFLYPSEGIHRRWENGYRITSVAATWDQAAFVLSVPRRKLTDETQETLRTSAFPSNHVKEKWGKNLYIASICYGRTVS

SEQ ID NO: 45453 - DNA, 2045 bp, Arabidopsis thaliana
  misc_feature (1)..(2045): Ceres Seq. ID no. 13646591
  misc_feature (1)..(2045): Ortholog of  Ceres SEQ ID NO 14310841 as cited in SEQ ID NO 53666
  misc_feature (1)..(2045): Ortholog of  Ceres SEQ ID NO 14308493 as cited in SEQ ID NO 60320
gggccacttttactcacagaaaaccttctctctaaacttcttcgaaaatctcacagagcttcttcttcttcgcttttagggtttttgctctattgtttcgagtgacccaacttcgaagcttatagatcgttaccttagaaaatggtgggtatgtcgatgcagccatatggtattcaatcgatgcttaaagaaggttacaggcatctctctggtctcgacgaagccgtcattaagaacattgaagcttgcaaggagctctccaccattactcgcacctctctcggtcccaatggaatgaataaaatggttatcaatcatttggacaaactgtttgtcacaaatgacgctgctactatagtgaatgagctcgagattcagcacccggctgctaaacttctggttttagctgctaaggctcagcaagaagaaatcggagatggagctaatctgacaatctcctttgctggtgaacttcttcaaaacgctgaggagcttatcaggatgggacttcatccgagtgagatcattagtggatatactaaagctgtcagcaaggctgttgaaatactggaacaactggttgagactggttctgagaccatggatgtacgtaacaaggatgaagttatttctcggatgagagcagctgttgcaagcaagcagtttgggcaagaggaaataatttgctctttagttactgacgcatgtattcaagtctgcccaaagaatccaacgaatttcaatgtggataatgttcgtgtttccaagcttttgggaggaggcttgcacaattcttgcatagtccgtggtatggtcttgaaaagtgatgctgttggtagcattaagcgaatggagaaagcgaaggttgctgtatttgctggtggcgttgataccactgcaacagagaccaaaggaactgtcctcattcatagtgctgagcagctagagaactatgcaaagacagaggaagctaaagttgaggagttgattaaagcagttgcggaatcaggagccaaagtcattgttagtggaggatcaattggagaaatggcattgcatttctgtgagcgctacaagataatggtattgaaaatcagctcaaagtttgaactgaggcgtttttgccgtacagcgggggctgtcgcccatttgaagcttagccggccaagccctgaagatcttggatatgttgattctatatcggttgaggaaattggtggtgtgacagtcacgattgcaagaaacgaggaaggtggtaactccatctccactgtggtcttgcgtggaagcacagatagcattttggacgaccttgagagagctgttgatgatggagttaacacatacaaggccatgtgcagagacagccgtattgttcccggggctgcagcgactgaaatagagttggctcaaaggttgaaggaatacgccaatgcagaaatagggttggacaaatatgccatcaccaaatacgctgagagttttgagtttgtacccaagacccttgcagataatgctggcctcaatgcgatggaaatcatagccgctctgtacactggacatggatctggaaacacaaaactaggcattgacttagaggaaggtgcttgtaaagatgtttcagagacaaaagtatgggatctttttgcaaccaagttatttgcccttaaatatgcttcagatgctgcatgcactgtacttcgtgtagaccagattataatggcgaaaccagcaggtggaccaaggagagatgcagctcaagctgcaggtgctggtgcggaggaagactaagccggagaacaaatacctcgtagtgaaactctcttcttttgtaaccttctgttcctgaaagtctgagaaaattttggtatgtctcagtttaagatttgtgatctttgtaacgcaccaccaacttaagtgttttgccttctttttctgttttgccttgttttggctcgtctcaacactcagattttccggtttagctagtgaaattattactaggatttttggcttaactctgtattaatgtcaatttggtttct

SEQ ID NO: 45454 - protein, 549 aa, Arabidopsis thaliana
  peptide (1)..(549): Ceres Seq. ID no. 13646592
MVGMSMQPYGIQSMLKEGYRHLSGLDEAVIKNIEACKELSTITRTSLGPNGMNKMVINHLDKLFVTNDAATIVNELEIQHPAAKLLVLAAKAQQEEIGDGANLTISFAGELLQNAEELIRMGLHPSEIISGYTKAVSKAVEILEQLVETGSETMDVRNKDEVISRMRAAVASKQFGQEEIICSLVTDACIQVCPKNPTNFNVDNVRVSKLLGGGLHNSCIVRGMVLKSDAVGSIKRMEKAKVAVFAGGVDTTATETKGTVLIHSAEQLENYAKTEEAKVEELIKAVAESGAKVIVSGGSIGEMALHFCERYKIMVLKISSKFELRRFCRTAGAVAHLKLSRPSPEDLGYVDSISVEEIGGVTVTIARNEEGGNSISTVVLRGSTDSILDDLERAVDDGVNTYKAMCRDSRIVPGAAATEIELAQRLKEYANAEIGLDKYAITKYAESFEFVPKTLADNAGLNAMEIIAALYTGHGSGNTKLGIDLEEGACKDVSETKVWDLFATKLFALKYASDAACTVLRVDQIIMAKPAGGPRRDAAQAAGAGAEED

SEQ ID NO: 45455 - protein, 546 aa, Arabidopsis thaliana
  peptide (1)..(546): Ceres Seq. ID no. 13646593
MSMQPYGIQSMLKEGYRHLSGLDEAVIKNIEACKELSTITRTSLGPNGMNKMVINHLDKLFVTNDAATIVNELEIQHPAAKLLVLAAKAQQEEIGDGANLTISFAGELLQNAEELIRMGLHPSEIISGYTKAVSKAVEILEQLVETGSETMDVRNKDEVISRMRAAVASKQFGQEEIICSLVTDACIQVCPKNPTNFNVDNVRVSKLLGGGLHNSCIVRGMVLKSDAVGSIKRMEKAKVAVFAGGVDTTATETKGTVLIHSAEQLENYAKTEEAKVEELIKAVAESGAKVIVSGGSIGEMALHFCERYKIMVLKISSKFELRRFCRTAGAVAHLKLSRPSPEDLGYVDSISVEEIGGVTVTIARNEEGGNSISTVVLRGSTDSILDDLERAVDDGVNTYKAMCRDSRIVPGAAATEIELAQRLKEYANAEIGLDKYAITKYAESFEFVPKTLADNAGLNAMEIIAALYTGHGSGNTKLGIDLEEGACKDVSETKVWDLFATKLFALKYASDAACTVLRVDQIIMAKPAGGPRRDAAQAAGAGAEED

SEQ ID NO: 45456 - protein, 544 aa, Arabidopsis thaliana
  peptide (1)..(544): Ceres Seq. ID no. 13646594
MQPYGIQSMLKEGYRHLSGLDEAVIKNIEACKELSTITRTSLGPNGMNKMVINHLDKLFVTNDAATIVNELEIQHPAAKLLVLAAKAQQEEIGDGANLTISFAGELLQNAEELIRMGLHPSEIISGYTKAVSKAVEILEQLVETGSETMDVRNKDEVISRMRAAVASKQFGQEEIICSLVTDACIQVCPKNPTNFNVDNVRVSKLLGGGLHNSCIVRGMVLKSDAVGSIKRMEKAKVAVFAGGVDTTATETKGTVLIHSAEQLENYAKTEEAKVEELIKAVAESGAKVIVSGGSIGEMALHFCERYKIMVLKISSKFELRRFCRTAGAVAHLKLSRPSPEDLGYVDSISVEEIGGVTVTIARNEEGGNSISTVVLRGSTDSILDDLERAVDDGVNTYKAMCRDSRIVPGAAATEIELAQRLKEYANAEIGLDKYAITKYAESFEFVPKTLADNAGLNAMEIIAALYTGHGSGNTKLGIDLEEGACKDVSETKVWDLFATKLFALKYASDAACTVLRVDQIIMAKPAGGPRRDAAQAAGAGAEED

SEQ ID NO: 45457 - DNA, 1996 bp, Arabidopsis thaliana; identical to SEQ ID NO: 41756
  misc_feature (1)..(1996): Ceres Seq. ID no. 12639081
  misc_feature (1)..(1996): Ortholog of  Ceres SEQ ID NO 13660024 as cited in SEQ ID NO 67241

SEQ ID NO: 45458 - protein, 610 aa, Arabidopsis thaliana; identical to SEQ ID NO: 41757
  peptide (1)..(610): Ceres Seq. ID no. 12639082

SEQ ID NO: 45459 - protein, 583 aa, Arabidopsis thaliana [sequence omitted]

SEQ ID NO: 45460 - protein, 506 aa, Arabidopsis thaliana; identical to SEQ ID NO: 41759
  peptide (1)..(506): Ceres Seq. ID no. 12639084

SEQ ID NO: 45461 - DNA, 1821 bp, Arabidopsis thaliana
  misc_feature (1)..(1821): Ceres Seq. ID no. 12600449
  misc_feature (1)..(1821): Ortholog of  Ceres SEQ ID NO 15177298 as cited in SEQ ID NO 52711
agagatagaaattgagagacgataagcaaagtagaaaacacaagtttctctcacacacattatctctttctctattaccaccactcattcataacagaaacccaccaaaaaataaaaagagagacttttcactctggggagagagctcaagttctaatggcgaacttggtcttatcagaatgtggtatacgacctctccccagaatctacacaacacccagatccaatttcctctccaacaacaacaaattcagaccatcactttcttcttcttcttacaaaacatcatcatctcctctgtcttttggtctgaattcacgagatgggttcacgaggaattgggcgttgaatgtgagcacaccattaacgacaccaatatttgaggagtctccattggaggaagataataaacagagattcgatccaggtgcgcctcctccgttcaatttagctgatattagagcagctatacctaagcattgttgggttaagaatccatggaagtctttgagttatgtcgtcagagacgtcgctatcgtctttgcattggctgctggagctgcttacctcaacaattggattgtttggcctctctattggctcgctcaaggaaccatgttttgggctctctttgttcttggtcatgactgtggacatggtagtttctcaaatgatccgaagttgaacagtgtggtcggtcatcttcttcattcctcaattctggtcccataccatggctggagaattagtcacagaactcaccaccagaaccatggacatgttgagaatgacgaatcttggcatcctatgtctgagaaaatctacaatactttggacaagccgactagattctttagatttacactgcctctcgtgatgcttgcataccctttctacttgtgggctcgaagtccggggaaaaagggttctcattaccatccagacagtgacttgttcctccctaaagagagaaaggatgtcctcacttctactgcttgttggactgcaatggctgctctgcttgtttgtctcaacttcacaatcggtccaattcaaatgctcaaactttatggaattccttactggataaatgtaatgtggttggactttgtgacttacctgcatcaccatggtcatgaagataagcttccttggtaccgtggcaaggagtggagttacctgagaggaggacttacaacattggatcgtgactacggattgatcaataacatccatcatgatattggaactcatgtgatacatcatcttttcccgcagatcccacattatcatctagtagaagcaacagaagcagctaaaccagtattagggaagtattacagggagcctgataagtctggaccgttgccattacatttactggaaattctagcgaaaagtataaaagaagatcattacgtgagcgacgaaggagaagttgtatactataaagcagatccaaatctctatggagaggtcaaagtaagagcagattgaaatgaagcaggcttgagattgaagttttttctatttcagaccagctgattttttgcttactgtatcaatttattgtgtcacccaccagagagttagtatctctgaatacgatcgatcagatggaaacaacaaatttgtttgcgatactgaagctatatataccatacattgcattatcttagatacatttaaattctagcaaaaagtataaaagaagatcattacgtgagcgacgaaggagatgttgtatatatactacaaattaagcagatccaaatctctatgtttccgatactgaagctttatactaataaaatatacatt

SEQ ID NO: 45462 - protein, 446 aa, Arabidopsis thaliana
  peptide (1)..(446): Ceres Seq. ID no. 12600450
MANLVLSECGIRPLPRIYTTPRSNFLSNNNKFRPSLSSSSYKTSSSPLSFGLNSRDGFTRNWALNVSTPLTTPIFEESPLEEDNKQRFDPGAPPPFNLADIRAAIPKHCWVKNPWKSLSYVVRDVAIVFALAAGAAYLNNWIVWPLYWLAQGTMFWALFVLGHDCGHGSFSNDPKLNSVVGHLLHSSILVPYHGWRISHRTHHQNHGHVENDESWHPMSEKIYNTLDKPTRFFRFTLPLVMLAYPFYLWARSPGKKGSHYHPDSDLFLPKERKDVLTSTACWTAMAALLVCLNFTIGPIQMLKLYGIPYWINVMWLDFVTYLHHHGHEDKLPWYRGKEWSYLRGGLTTLDRDYGLINNIHHDIGTHVIHHLFPQIPHYHLVEATEAAKPVLGKYYREPDKSGPLPLHLLEILAKSIKEDHYVSDEGEVVYYKADPNLYGEVKVRAD

SEQ ID NO: 45463 - protein, 293 aa, Arabidopsis thaliana
  peptide (1)..(293): Ceres Seq. ID no. 12600451
MFWALFVLGHDCGHGSFSNDPKLNSVVGHLLHSSILVPYHGWRISHRTHHQNHGHVENDESWHPMSEKIYNTLDKPTRFFRFTLPLVMLAYPFYLWARSPGKKGSHYHPDSDLFLPKERKDVLTSTACWTAMAALLVCLNFTIGPIQMLKLYGIPYWINVMWLDFVTYLHHHGHEDKLPWYRGKEWSYLRGGLTTLDRDYGLINNIHHDIGTHVIHHLFPQIPHYHLVEATEAAKPVLGKYYREPDKSGPLPLHLLEILAKSIKEDHYVSDEGEVVYYKADPNLYGEVKVRAD

SEQ ID NO: 45464 - protein, 229 aa, Arabidopsis thaliana
  peptide (1)..(229): Ceres Seq. ID no. 12600452
MSEKIYNTLDKPTRFFRFTLPLVMLAYPFYLWARSPGKKGSHYHPDSDLFLPKERKDVLTSTACWTAMAALLVCLNFTIGPIQMLKLYGIPYWINVMWLDFVTYLHHHGHEDKLPWYRGKEWSYLRGGLTTLDRDYGLINNIHHDIGTHVIHHLFPQIPHYHLVEATEAAKPVLGKYYREPDKSGPLPLHLLEILAKSIKEDHYVSDEGEVVYYKADPNLYGEVKVRAD

SEQ ID NO: 45465 - DNA, 1764 bp, Arabidopsis thaliana
  misc_feature (1)..(1764): Ceres Seq. ID no. 12561355
  misc_feature (1)..(1764): Ortholog of  Ceres SEQ ID NO 15169092 as cited in SEQ ID NO 60430
  misc_feature (1)..(1764): Ortholog of  Ceres SEQ ID NO 14303680 as cited in SEQ ID NO 66019
  misc_feature (1)..(1764): Ortholog of  Ceres SEQ ID NO 15224940 as cited in SEQ ID NO 0
atggcagttacagatactgaaagtcctcatcttggggaaattacttgtggtaccttacttgagaagttgcaggaaatctgggatgaagttggtgagagtgatgatgaacgagacaaactgcttcttcagatagagcaagagtgtcttgacgtttacaagagaaaagtcgagcaggctgcgaaatcccgagctgagcttcttcaaaccttgtcagatgctaatgctgaactttccagcctcacaatgtctcttggagacaaaagcttagttggcattccggataagtcttcaggaacgattaaagaacaacttgctgcaatagcaccggctcttgaacaactgtggcaacagaaagaggagagagtccgagagttctctgatgtacaatcacagattcagaagatatgtggagatattgctggaggtttgagcaatgaggttcctatagtcgatgagtctgatttgtcactgaagaaattagacgatttccagagccaactccaagagctccagaaagagaagagtgacaggctgcgcaaggtgttagagtttgtgagtactgttcatgatctatgtgctgttcttggtttggatttcttaagcaccgtcaccgaagttcatccgagcttagatgaagataccagtgtccagtctaagagcattagcaatgagactctttcaaggttggctaaaaccgtcttgactcttaaagatgataagaagcaaagacttcaaaagcttcaagagctggctactcagctaattgacctgtggaatctgatggatactcctgatgaggaaagagagctttttgatcatgttacctgtaacatttcatcttcagtcgatgaggtcactgtgccaggtgctcttgcacgtgatttgattgagcaggctgaggtggaagttgataggcttgaccagctgaaagctagccgaatgaaagaaattgcgttcaagaagcaatctgagcttgaagagatatatgctcgtgcccatgtagaagttaacccggaatctgctcgtgagagaatcatgtcgctgattgattctggaaacgttgagcctactgaattattggcagacatggatagccagatatcaaaggctaaggaagaagcatttagtagaaaagatatattggaccgagtcgagaaatggatgtcagcttgtgaggaagagagctggctagaagactacaatcgggatcagaacaggtacagcgcaagcagaggtgcacacttgaatctcaagagagctgagaaagctcggattctggttagcaagattcctgccatggttgacacattagttgccaagacccgggcttgggaagaagaacacagcatgtcctttgcctacgatggtgttcctctgctagctatgctagacgagtacggtatgcttaggcaagaacgagaagaggagaaacggaggctgagggaacaaaagaaggttcaagaacagccacacgtagagcaagaatctgcctttagcaccaggccaagccctgcaagaccggtcagtgctaagaaaacggtggggccacgagctaacaacggaggagccaatggaacacataaccggcgtttatctttgaatgcaaaccagaatggaagcaggtctactgcaaaagaagcagggagaagggagactctcaacaggccggctgctcctacaaactacgttgccatttcgaaagaggaagctgcttcatctccagtttctggtgctgcagatcatcaagttccagcttcaccatga

SEQ ID NO: 45466 - protein, 587 aa, Arabidopsis thaliana
  peptide (1)..(587): Ceres Seq. ID no. 12561356
MAVTDTESPHLGEITCGTLLEKLQEIWDEVGESDDERDKLLLQIEQECLDVYKRKVEQAAKSRAELLQTLSDANAELSSLTMSLGDKSLVGIPDKSSGTIKEQLAAIAPALEQLWQQKEERVREFSDVQSQIQKICGDIAGGLSNEVPIVDESDLSLKKLDDFQSQLQELQKEKSDRLRKVLEFVSTVHDLCAVLGLDFLSTVTEVHPSLDEDTSVQSKSISNETLSRLAKTVLTLKDDKKQRLQKLQELATQLIDLWNLMDTPDEERELFDHVTCNISSSVDEVTVPGALARDLIEQAEVEVDRLDQLKASRMKEIAFKKQSELEEIYARAHVEVNPESARERIMSLIDSGNVEPTELLADMDSQISKAKEEAFSRKDILDRVEKWMSACEEESWLEDYNRDQNRYSASRGAHLNLKRAEKARILVSKIPAMVDTLVAKTRAWEEEHSMSFAYDGVPLLAMLDEYGMLRQEREEEKRRLREQKKVQEQPHVEQESAFSTRPSPARPVSAKKTVGPRANNGGANGTHNRRLSLNANQNGSRSTAKEAGRRETLNRPAAPTNYVAISKEEAASSPVSGAADHQVPASP

SEQ ID NO: 45467 - protein, 506 aa, Arabidopsis thaliana
  peptide (1)..(506): Ceres Seq. ID no. 12561357
MSLGDKSLVGIPDKSSGTIKEQLAAIAPALEQLWQQKEERVREFSDVQSQIQKICGDIAGGLSNEVPIVDESDLSLKKLDDFQSQLQELQKEKSDRLRKVLEFVSTVHDLCAVLGLDFLSTVTEVHPSLDEDTSVQSKSISNETLSRLAKTVLTLKDDKKQRLQKLQELATQLIDLWNLMDTPDEERELFDHVTCNISSSVDEVTVPGALARDLIEQAEVEVDRLDQLKASRMKEIAFKKQSELEEIYARAHVEVNPESARERIMSLIDSGNVEPTELLADMDSQISKAKEEAFSRKDILDRVEKWMSACEEESWLEDYNRDQNRYSASRGAHLNLKRAEKARILVSKIPAMVDTLVAKTRAWEEEHSMSFAYDGVPLLAMLDEYGMLRQEREEEKRRLREQKKVQEQPHVEQESAFSTRPSPARPVSAKKTVGPRANNGGANGTHNRRLSLNANQNGSRSTAKEAGRRETLNRPAAPTNYVAISKEEAASSPVSGAADHQVPASP

SEQ ID NO: 45468 - protein, 327 aa, Arabidopsis thaliana
  peptide (1)..(327): Ceres Seq. ID no. 12561358
MDTPDEERELFDHVTCNISSSVDEVTVPGALARDLIEQAEVEVDRLDQLKASRMKEIAFKKQSELEEIYARAHVEVNPESARERIMSLIDSGNVEPTELLADMDSQISKAKEEAFSRKDILDRVEKWMSACEEESWLEDYNRDQNRYSASRGAHLNLKRAEKARILVSKIPAMVDTLVAKTRAWEEEHSMSFAYDGVPLLAMLDEYGMLRQEREEEKRRLREQKKVQEQPHVEQESAFSTRPSPARPVSAKKTVGPRANNGGANGTHNRRLSLNANQNGSRSTAKEAGRRETLNRPAAPTNYVAISKEEAASSPVSGAADHQVPASP

SEQ ID NO: 45469 - DNA, 1322 bp, Arabidopsis thaliana
  misc_feature (1)..(1322): Ceres Seq. ID no. 13646612
  misc_feature (1)..(1322): Ortholog of  Ceres SEQ ID NO 14311683 as cited in SEQ ID NO 51263
  misc_feature (1)..(1322): Ortholog of  Ceres SEQ ID NO 15177862 as cited in SEQ ID NO 56033
  misc_feature (1)..(1322): Ortholog of  Ceres SEQ ID NO 13661430 as cited in SEQ ID NO 61258
  misc_feature (1)..(1322): Ortholog of  Ceres SEQ ID NO 13590940 as cited in SEQ ID NO 68653
  misc_feature (1)..(1322): Ortholog of  Ceres SEQ ID NO 14301982 as cited in SEQ ID NO 0
  misc_feature (1)..(1322): Ortholog of  Ceres SEQ ID NO 15179001 as cited in SEQ ID NO 0
  misc_feature (1)..(1322): Ortholog of  Ceres SEQ ID NO 15180040 as cited in SEQ ID NO 0
ccccccccccgatttgaagatgatgtctcggccctccttatccttatctcgcccaccgttctaaaacccttcccttcctcttcttttctcttctccttccacttccacttcttctatctctcacaattcagcaatggcttcttctatagttacctctagcttgaagcctttagccatggccgattctacctcttctaccattttctcccatccttccatctcctctaccatctcttcctccagaattcgcagctccagtgtttccctccttaccggacgcattaacctgcccctctctttctctcgcgtctctctatctcttaaaaccaaaacccaccttaaaaaatccccctttgtctccttcgttgcccagacttcggattgggctgaagaaggtggagaaggaagcgtcgctgttgaggagaccgagaacagtttagagtcacaagatgtgagcgaaggagatgagagcgaaggagatgtgagcgaaggagatgtgagcgaaggagatgagagcgaaggagatgtgagcgaaggagctgtgagcgaaagagctgagttcccggagccatcggaagaagccaagcttttcgtcggaaatttggcttatgatgttaatagccaagctttggctatgctctttgagcaagccggtactgttgaaatcgccgaggttatatacaatagggaaactgaccagagtcgtgggtttggatttgtgacaatgagttctgtggacgaagctgagacagctgtggagaagttcaaccgttatgatcttaacggacgtctactaactgtaaacaaggcagctccaagaggatcacgtccagaacgtgcgcctcgggtatatgaacctgcattcagagtatatgtagggaatctaccatgggatgtggacaatggccgtctagaacagcttttcagtgagcatggtaaagttgtggaagctagggtggtttacgaccgtgagacaggtcgttcacgtggattcgggtttgtcacaatgtctgacgtggatgaactcaacgaagccatctctgccctcgatggacagaacttggagggtagagcaatcagagtgaatgtagcggaagagcgtcctccaaggcgtggatattaaagctgagatctagctgtgccctctctctctccctatcttgcattttgtttagacgagattcttacactcttcaacgattgtttttggctgaactctgaatgtgaaagttaagctgcttctaaagtaatttgtatcgcttgtttttgatgaaaaaaaaaaaaaaaaaaaaaaaaaaaaaactcgagggggggcccggtac

SEQ ID NO: 45470 - protein, 329 aa, Arabidopsis thaliana
  peptide (1)..(329): Ceres Seq. ID no. 15219069
MASSIVTSSLKPLAMADSTSSTIFSHPSISSTISSSRIRSSSVSLLTGRINLPLSFSRVSLSLKTKTHLKKSPFVSFVAQTSDWAEEGGEGSVAVEETENSLESQDVSEGDESEGDVSEGDVSEGDESEGDVSEGAVSERAEFPEPSEEAKLFVGNLAYDVNSQALAMLFEQAGTVEIAEVIYNRETDQSRGFGFVTMSSVDEAETAVEKFNRYDLNGRLLTVNKAAPRGSRPERAPRVYEPAFRVYVGNLPWDVDNGRLEQLFSEHGKVVEARVVYDRETGRSRGFGFVTMSDVDELNEAISALDGQNLEGRAIRVNVAEERPPRRGY

SEQ ID NO: 45471 - protein, 315 aa, Arabidopsis thaliana
  peptide (1)..(315): Ceres Seq. ID no. 15219070
MADSTSSTIFSHPSISSTISSSRIRSSSVSLLTGRINLPLSFSRVSLSLKTKTHLKKSPFVSFVAQTSDWAEEGGEGSVAVEETENSLESQDVSEGDESEGDVSEGDVSEGDESEGDVSEGAVSERAEFPEPSEEAKLFVGNLAYDVNSQALAMLFEQAGTVEIAEVIYNRETDQSRGFGFVTMSSVDEAETAVEKFNRYDLNGRLLTVNKAAPRGSRPERAPRVYEPAFRVYVGNLPWDVDNGRLEQLFSEHGKVVEARVVYDRETGRSRGFGFVTMSDVDELNEAISALDGQNLEGRAIRVNVAEERPPRRGY

SEQ ID NO: 45472 - DNA, 1812 bp, Arabidopsis thaliana
  misc_feature (1)..(1812): Ceres Seq. ID no. 13593062
  misc_feature (1)..(1812): Ortholog of  Ceres SEQ ID NO 13582285 as cited in SEQ ID NO 59817
ggactttcatttgcttcgtctctccggttgttaccaccacacaacgccatggaagctgctcttgctgcatgcgctcttccatcgctccgaattctcaatacgaaacctcgtttcagatgttccttctccaatccaagcctacccatttctcctaattcccttatcacccgcaaatcaagtcgattcacaaccgcagtatcatcaccaccatcatcatcagccgctacgtcaacgaattctccaccggaacctgaagccctattcgaacccgggtcggataagttcgattggtacgctaattggtacccagtgatgccaatttgcgatcttgacaagaaggttcctcatgggaagaaagttatggggattgatttggttgtttggtgggataggaacgagaagcaatggaaagtgatggatgacacgtgtcctcatcgtcttgctcctttgtctgatggaaggattgatcaatgggggaggttgcaatgtgtttatcatggatggtgctttaatggttccggtgactgtaaactcattcctcaagctcctcctgatggtcctccggtccacactttcaagcaagcttgtgtagctgtttacccgagtactgtgcagcatgagatcatttggttttggccaaacagtgatccaaagtacaaaaacattattgaaaccaacaagcctccttacattccagagttagaagacccatcattcactaagttgatggggaatcgtgatattccttacgggtacgatgtcttggtggaaaacctcatggacccggctcatgttccttatgcacattatggactgatgcggtttcctaaaccaaaagagaagattgacagagaaggggggaaaccactcgaaatcaacgttaaaaaactagacaacaaagggttcttttcaaaacaagaatggggttattctaattttattgcaccatgtgtgtatcgctcttccacagaccctctaccagagcaggaacatgagtatcccgcaccagctgcttctgacaaggcggcattgtcaaagcggagattgtctttgatctttatatgtattccggtcagtccaggtcgtagtaggctgatatggacgttcccgaggaattttggtgtatttattgataagattgtccctagatgggtgtttcacattggtcaaaatacgattctagactcagatttgcacctccttcatgtagaggagcggaagatactggagagaggccctgaaaactggcaaaaagcttgctttatcccaacaaaatcagacgctaatgtggttacattcaggagatggtttaacaagtacagcgaggctcgagtcgattggagaggaaagtttgatccatttcttcttcctcctacgcctccccgagaacagctcttaggtattggtcgcatgttgagaactgcagcagctgcaagaaagcttacaaatatctcaatgcgctagaggtgatcttacaaatcgcatccgttgctatgatcggagtcatggcggtgttgaagcaaacgacaatgtcgaatgtggctagaattgcagtgcttgtggcggctgttttaagttttgcagcttcaaagtggctatcacacttcatctacaagacattccattaccatgactacaaccatgctgttgtttgaaatgtatattggtgtttgtacttcgtatatatactcatcggatgtattcagtccacatggtgttgtacataacagttatacagaaactaattcttgaatctataccgtttactaacgaaaaaaaaaaaaaaaaaaaactcgagggggggcccggtac

SEQ ID NO: 45473 - protein, 487 aa, Arabidopsis thaliana
  peptide (1)..(487): Ceres Seq. ID no. 13593063
GLSFASSLRLLPPHNAMEAALAACALPSLRILNTKPRFRCSFSNPSLPISPNSLITRKSSRFTTAVSSPPSSSAATSTNSPPEPEALFEPGSDKFDWYANWYPVMPICDLDKKVPHGKKVMGIDLVVWWDRNEKQWKVMDDTCPHRLAPLSDGRIDQWGRLQCVYHGWCFNGSGDCKLIPQAPPDGPPVHTFKQACVAVYPSTVQHEIIWFWPNSDPKYKNIIETNKPPYIPELEDPSFTKLMGNRDIPYGYDVLVENLMDPAHVPYAHYGLMRFPKPKEKIDREGGKPLEINVKKLDNKGFFSKQEWGYSNFIAPCVYRSSTDPLPEQEHEYPAPAASDKAALSKRRLSLIFICIPVSPGRSRLIWTFPRNFGVFIDKIVPRWVFHIGQNTILDSDLHLLHVEERKILERGPENWQKACFIPTKSDANVVTFRRWFNKYSEARVDWRGKFDPFLLPPTPPREQLLGIGRMLRTAAAARKLTNISMR

SEQ ID NO: 45474 - protein, 471 aa, Arabidopsis thaliana
  peptide (1)..(471): Ceres Seq. ID no. 13593064
MEAALAACALPSLRILNTKPRFRCSFSNPSLPISPNSLITRKSSRFTTAVSSPPSSSAATSTNSPPEPEALFEPGSDKFDWYANWYPVMPICDLDKKVPHGKKVMGIDLVVWWDRNEKQWKVMDDTCPHRLAPLSDGRIDQWGRLQCVYHGWCFNGSGDCKLIPQAPPDGPPVHTFKQACVAVYPSTVQHEIIWFWPNSDPKYKNIIETNKPPYIPELEDPSFTKLMGNRDIPYGYDVLVENLMDPAHVPYAHYGLMRFPKPKEKIDREGGKPLEINVKKLDNKGFFSKQEWGYSNFIAPCVYRSSTDPLPEQEHEYPAPAASDKAALSKRRLSLIFICIPVSPGRSRLIWTFPRNFGVFIDKIVPRWVFHIGQNTILDSDLHLLHVEERKILERGPENWQKACFIPTKSDANVVTFRRWFNKYSEARVDWRGKFDPFLLPPTPPREQLLGIGRMLRTAAAARKLTNISMR

SEQ ID NO: 45475 - protein, 383 aa, Arabidopsis thaliana
  peptide (1)..(383): Ceres Seq. ID no. 13593065
MPICDLDKKVPHGKKVMGIDLVVWWDRNEKQWKVMDDTCPHRLAPLSDGRIDQWGRLQCVYHGWCFNGSGDCKLIPQAPPDGPPVHTFKQACVAVYPSTVQHEIIWFWPNSDPKYKNIIETNKPPYIPELEDPSFTKLMGNRDIPYGYDVLVENLMDPAHVPYAHYGLMRFPKPKEKIDREGGKPLEINVKKLDNKGFFSKQEWGYSNFIAPCVYRSSTDPLPEQEHEYPAPAASDKAALSKRRLSLIFICIPVSPGRSRLIWTFPRNFGVFIDKIVPRWVFHIGQNTILDSDLHLLHVEERKILERGPENWQKACFIPTKSDANVVTFRRWFNKYSEARVDWRGKFDPFLLPPTPPREQLLGIGRMLRTAAAARKLTNISMR

SEQ ID NO: 45476 - DNA, 2791 bp, Arabidopsis thaliana
  misc_feature (1)..(2791): Ceres Seq. ID no. 14308948
  misc_feature (1)..(2791): Ortholog of  Ceres SEQ ID NO 14307253 as cited in SEQ ID NO 54783
  misc_feature (1)..(2791): Ortholog of  Ceres SEQ ID NO 15225226 as cited in SEQ ID NO 58693
  misc_feature (1)..(2791): Ortholog of  Ceres SEQ ID NO 13654989 as cited in SEQ ID NO 63117
  misc_feature (1)..(2791): Ortholog of  Ceres SEQ ID NO 14303173 as cited in SEQ ID NO 66550
  misc_feature (1)..(2791): Ortholog of  Ceres SEQ ID NO 13584744 as cited in SEQ ID NO 69137
aaaagaaacaacactcgaaaaagttcttctttttcttccgcacatgtctgactctctcataagcgtaaatcgctctgtcaaatatctctgaccagagagacagagttgcctccacgtttcttcagacaagactcacgctcttccctttcaccacattcccttctccatttctcaatctcacttaccttctcgattcttgctccaatttcgaatcttccgagtgaaaaaagcttcaaagtttggaactttctagtgtttattaatctgggtctgctctgagtttcgtgtgtagctgcatatgagcttaaagctcgagtttttccatctgggtttggaattctagggctagtgattggagattttgggaatttaggttgattttagtaggtttgacttcaggttgcgtaatttaggttgattttgatccgatttgtggaattagggtttgtttgttcacaaagcttcaatttttggagtttaaatggatcgataacgactgtgttagaagaaagtttgctgcttcagattcgtattcgatatagaaatgagtttggttcctcctttaccgattttatcaccaccgtcgtcaaattcttcaacaactgcacctcctccgttacagactcagcccaccactccatctgctccacctccggttacaccacctccttctccgccgcaatctccgccgccggttgtatcatcatcaccaccaccaccggttgtttcgtcacctccaccgtcttcttctccaccaccgtcacctcctgtcatcacttcacctcctcccaccgttgcttcttcccctccacctcctgtggtgattgcttcccctcctccctcaactccggcgacaacaccaccagctcctccgcaaactgtctcacctccaccgcctcctgatgcttctccatcacctcccgcaccaacaacaacaaatcctcctcctaaaccttctccttcaccgccgggagaaacaccttcaccaccgggagaaacaccttcaccgcctaaaccttctccgtcaactccaactccaacaacaaccacatctcctcctcctcctccagctacctctgcttctcctccgtcttcaaatcctactgatccttctacgttagctcctcctccaactccattacctgttgttcccagagagaaaccaattgctaaaccaactggaccagcttcaaacaatggaaacaacactttgccgtctagttcaccaggtaaaagcgaagttggtactggaggtattgtagctatcggagtgattgtgggattggtttttcttagcctttttgtgatgggtgtgtggttcactcggaaacgaaagcgaaaggaccctggaacctttgttggatacacaatgcctccttccgcttattcatctcctcaaggctcagatgtagtgctcttcaactcgcgttcttcagctcctcctaaaatgagaagccattctggtagcgattacatgtatgcgtcatctgattcaggcatggttagcaaccaaagatcaaggttttcatatgatgagttatctcaagttaccagtgggttctccgagaagaatcttctcggtgaaggagggtttggctgtgtatacaaaggcgttctttctgacggaagggaagtggcagttaaacagttaaagattggtggaagccaaggggagagagagttcaaagcagaagttgaaatcatttctcgggttcatcaccgccatttggttacactagttggttattgcatctcagagcaacataggttgcttgtatatgattatgtacctaacaacactctccattatcatctacatgctccaggaagaccagttatgacttgggaaactcgggtaagggtcgctgctggtgcagctcgtggaatcgcctacttacatgaagactgtcatccccgcattattcaccgtgacataaaatcttccaacatacttcttgataacagctttgaagccttggttgcggattttggacttgcaaaaattgcacaagaactggatttaaacacacacgtctcaacgcgcgtaatgggaacctttgggtacatggctcctgaatatgcaacaagtggaaagctgtctgaaaaagcagatgtttattcgtatggggtaatactgttggagcttataactggccgtaaaccggtagatacgtctcaaccacttggtgatgagagccttgttgaatgggcaagacccttgctgggtcaagcaatcgagaacgaagaattcgacgagctagtagatccgaggctagggaaaaacttcatcccaggagagatgttcagaatggtagaagctgcggctgcatgtgtccgccactcagctgcaaaaagaccaaagatgagtcaagtggtgagagctttggacacacttgaagaagcaacggacataaccaacggaatgagaccaggacagagccaagtgtttgactcgagacaacaatctgctcagataaggatgtttcaaagaatggcttttgggagtcaagattatagttctgacttctttgatcgctcacagtcacatagtagctggggcagtcgtgaccagtccagatttgtaccttagtagtttttattgcctttgcttctttcttctttccctttaaacatgtcctcgatcttgtatattcttttgcatgatataatgtatttttgaaatatacatacatacacacataaaatttggtagtcttttgaagaaaaagaataacagatgtatttgatagatagtggtccttgctttatctaatgattgctgaaccgggtt

SEQ ID NO: 45477 - protein, 681 aa, Arabidopsis thaliana
  peptide (1)..(681): Ceres Seq. ID no. 14308949
MSLVPPLPILSPPSSNSSTTAPPPLQTQPTTPSAPPPVTPPPSPPQSPPPVVSSSPPPPVVSSPPPSSSPPPSPPVITSPPPTVASSPPPPVVIASPPPSTPATTPPAPPQTVSPPPPPDASPSPPAPTTTNPPPKPSPSPPGETPSPPGETPSPPKPSPSTPTPTTTTSPPPPPATSASPPSSNPTDPSTLAPPPTPLPVVPREKPIAKPTGPASNNGNNTLPSSSPGKSEVGTGGIVAIGVIVGLVFLSLFVMGVWFTRKRKRKDPGTFVGYTMPPSAYSSPQGSDVVLFNSRSSAPPKMRSHSGSDYMYASSDSGMVSNQRSRFSYDELSQVTSGFSEKNLLGEGGFGCVYKGVLSDGREVAVKQLKIGGSQGEREFKAEVEIISRVHHRHLVTLVGYCISEQHRLLVYDYVPNNTLHYHLHAPGRPVMTWETRVRVAAGAARGIAYLHEDCHPRIIHRDIKSSNILLDNSFEALVADFGLAKIAQELDLNTHVSTRVMGTFGYMAPEYATSGKLSEKADVYSYGVILLELITGRKPVDTSQPLGDESLVEWARPLLGQAIENEEFDELVDPRLGKNFIPGEMFRMVEAAAACVRHSAAKRPKMSQVVRALDTLEEATDITNGMRPGQSQVFDSRQQSAQIRMFQRMAFGSQDYSSDFFDRSQSHSSWGSRDQSRFVP

SEQ ID NO: 45478 - protein, 427 aa, Arabidopsis thaliana
  peptide (1)..(427): Ceres Seq. ID no. 14308950
MGVWFTRKRKRKDPGTFVGYTMPPSAYSSPQGSDVVLFNSRSSAPPKMRSHSGSDYMYASSDSGMVSNQRSRFSYDELSQVTSGFSEKNLLGEGGFGCVYKGVLSDGREVAVKQLKIGGSQGEREFKAEVEIISRVHHRHLVTLVGYCISEQHRLLVYDYVPNNTLHYHLHAPGRPVMTWETRVRVAAGAARGIAYLHEDCHPRIIHRDIKSSNILLDNSFEALVADFGLAKIAQELDLNTHVSTRVMGTFGYMAPEYATSGKLSEKADVYSYGVILLELITGRKPVDTSQPLGDESLVEWARPLLGQAIENEEFDELVDPRLGKNFIPGEMFRMVEAAAACVRHSAAKRPKMSQVVRALDTLEEATDITNGMRPGQSQVFDSRQQSAQIRMFQRMAFGSQDYSSDFFDRSQSHSSWGSRDQSRFVP

SEQ ID NO: 45479 - protein, 406 aa, Arabidopsis thaliana
  peptide (1)..(406): Ceres Seq. ID no. 14308951
MPPSAYSSPQGSDVVLFNSRSSAPPKMRSHSGSDYMYASSDSGMVSNQRSRFSYDELSQVTSGFSEKNLLGEGGFGCVYKGVLSDGREVAVKQLKIGGSQGEREFKAEVEIISRVHHRHLVTLVGYCISEQHRLLVYDYVPNNTLHYHLHAPGRPVMTWETRVRVAAGAARGIAYLHEDCHPRIIHRDIKSSNILLDNSFEALVADFGLAKIAQELDLNTHVSTRVMGTFGYMAPEYATSGKLSEKADVYSYGVILLELITGRKPVDTSQPLGDESLVEWARPLLGQAIENEEFDELVDPRLGKNFIPGEMFRMVEAAAACVRHSAAKRPKMSQVVRALDTLEEATDITNGMRPGQSQVFDSRQQSAQIRMFQRMAFGSQDYSSDFFDRSQSHSSWGSRDQSRFVP

SEQ ID NO: 45480 - DNA, 2375 bp, Arabidopsis thaliana
  misc_feature (1)..(2375): Ceres Seq. ID no. 13576307
  misc_feature (1)..(2375): Ortholog of  Ceres SEQ ID NO 13532807 as cited in SEQ ID NO 53012
  misc_feature (1)..(2375): Ortholog of  Ceres SEQ ID NO 13663060 as cited in SEQ ID NO 60964
  misc_feature (1)..(2375): Ortholog of  Ceres SEQ ID NO 13500573 as cited in SEQ ID NO 67431
  misc_feature (1)..(2375): Ortholog of  Ceres SEQ ID NO 13656501 as cited in SEQ ID NO 69206
tctctctctctcctttcattttcactacttcttcgtctctctctctctctctctgtatcccttgagtgatcggagatcagatctcgagccgacgaacacgtgcgtgtaaagcaatgctgttcgcactctgctatcttcaattcctcgatttatcttgaactgcgattgtttgttgttgtttcgatttcgttgggggtaattgggtgaattagagaggtgaatgagaaattcgcctgcgattctgtctctgtcggtgatcgattgccggagcagaaccaggtcggattctagcttcgccatttggagtagtggtcgatggggccaatgcggctgatctgaatttctatttccctccccccaattcagatcgaattctagggttcttctaattcctgggtttttagtctgtgtttcaattgagtcacgatgcagcaagataatcgcaaaaagaataatctggagatggagttcttttctgactatggcgatgccaatagatttaaagttcaagaagttattggaaaaggcagttatggagttgtttgctcagctatagacactcttacgggtgagaaagtcgcgataaagaaaattcatgatatttttgagcatatttctgatgctgcgaggattctacgtgagattaaacttcttagactcctaaggcatccagatatagttgaaattaagcacattatgcttcctccttcacgaagagaattcaaagatatttatgttgtctttgagctcatggaatcggatcttcatcaagttattaaagccaatgatgatttgactagagagcattaccagtttttcctgtatcagttattgcgtgcactgaagtacattcacacagctaatgtctaccaccgagacctgaaaccaaagaacatattggcaaatgcaaactgtaaacttaagatttgtgattttggattggcaagggttgcattcaatgatacccccacaacaatcttctggactgactatgttgctaccagatggtatagagctccagagctttgtggatctttttactctaagtatacacccgcaattgacatctggagtataggctgcatttttgcggaggtgttgatgggtaaaccacttttccctggaaagaatgtggttcaccagctggatcttatgactgatctgctagggacaccttccctggacaccatctcacgggtgaggaatgagaaggcaaggaggtacttaacaagcatgaggaaaaagccacccattccgtttgcacagaaattcccaaatgcagatcctttgtctctgaagttgttggagaggcttcttgcttttgatccaaaagaccggccaactgctgaagaggcacttgctgatccatattttaagggattggcaaaagtggaaagggagccttcatgtcaacccatcacgaagatggaatttgagttcgagagaagaaaggtcactaaagaggatataagagagctaatttctagggagatacttgagtaccaccctcagctgcttaaagatcatatgaacggggctgataaagccagttttctctacccaagtgctgttgatcaatttagaagacaatttgcgcatcttgaagaaaacagtggtaaaaccggccctgtggcacctctagaaaggaaacatgcctctcttcccagatcaacggtcatacactcaaccgcagtagcacgaggaggacaaccaaaacttatgaataacacaaacacattgaaccctgaaactactcaaaacattccttttaatcatgcaacaatacaagcacaacaaagaaacctctcagcagccaaaccaagcacattcatgggcccggttgcacctttcgacaatggcagaatcagcagagatgcatatgacccgagatcattcatccggagcactaatctccccttttcacaacaatctgctgcaacagtcgccatgggaaagcagcaagagagaagaacaactatggagcctgagaagcaggcaagacaaatatctcagtataatagatatgcaccagatgtagccatcaacatagacaacaacccgtttatcatggctagaacgggaatgaacaaagccgaaaacatcagtgaccggatcataatcgacacaaatctgttacaggcaactgccggaataggagtcgcagcggcagctgcagcagctgctcctggtggttctgctcaccggaaagttggagctgttcggtacggtatgtcaaagatgtactagttctccacctaagctgggctttcatcacacagaacattgtatgtttccatcttcatgtcataaaagaaaattgtctatgacacaaaaccatatgagcaaaaaatattttttttattaattgtgatcca

SEQ ID NO: 45481 - protein, 606 aa, Arabidopsis thaliana
  peptide (1)..(606): Ceres Seq. ID no. 13576308
MQQDNRKKNNLEMEFFSDYGDANRFKVQEVIGKGSYGVVCSAIDTLTGEKVAIKKIHDIFEHISDAARILREIKLLRLLRHPDIVEIKHIMLPPSRREFKDIYVVFELMESDLHQVIKANDDLTREHYQFFLYQLLRALKYIHTANVYHRDLKPKNILANANCKLKICDFGLARVAFNDTPTTIFWTDYVATRWYRAPELCGSFYSKYTPAIDIWSIGCIFAEVLMGKPLFPGKNVVHQLDLMTDLLGTPSLDTISRVRNEKARRYLTSMRKKPPIPFAQKFPNADPLSLKLLERLLAFDPKDRPTAEEALADPYFKGLAKVEREPSCQPITKMEFEFERRKVTKEDIRELISREILEYHPQLLKDHMNGADKASFLYPSAVDQFRRQFAHLEENSGKTGPVAPLERKHASLPRSTVIHSTAVARGGQPKLMNNTNTLNPETTQNIPFNHATIQAQQRNLSAAKPSTFMGPVAPFDNGRISRDAYDPRSFIRSTNLPFSQQSAATVAMGKQQERRTTMEPEKQARQISQYNRYAPDVAINIDNNPFIMARTGMNKAENISDRIIIDTNLLQATAGIGVAAAAAAAAPGGSAHRKVGAVRYGMSKMY

SEQ ID NO: 45482 - protein, 594 aa, Arabidopsis thaliana
  peptide (1)..(594): Ceres Seq. ID no. 13576309
MEFFSDYGDANRFKVQEVIGKGSYGVVCSAIDTLTGEKVAIKKIHDIFEHISDAARILREIKLLRLLRHPDIVEIKHIMLPPSRREFKDIYVVFELMESDLHQVIKANDDLTREHYQFFLYQLLRALKYIHTANVYHRDLKPKNILANANCKLKICDFGLARVAFNDTPTTIFWTDYVATRWYRAPELCGSFYSKYTPAIDIWSIGCIFAEVLMGKPLFPGKNVVHQLDLMTDLLGTPSLDTISRVRNEKARRYLTSMRKKPPIPFAQKFPNADPLSLKLLERLLAFDPKDRPTAEEALADPYFKGLAKVEREPSCQPITKMEFEFERRKVTKEDIRELISREILEYHPQLLKDHMNGADKASFLYPSAVDQFRRQFAHLEENSGKTGPVAPLERKHASLPRSTVIHSTAVARGGQPKLMNNTNTLNPETTQNIPFNHATIQAQQRNLSAAKPSTFMGPVAPFDNGRISRDAYDPRSFIRSTNLPFSQQSAATVAMGKQQERRTTMEPEKQARQISQYNRYAPDVAINIDNNPFIMARTGMNKAENISDRIIIDTNLLQATAGIGVAAAAAAAAPGGSAHRKVGAVRYGMSKMY

SEQ ID NO: 45483 - protein, 516 aa, Arabidopsis thaliana
  peptide (1)..(516): Ceres Seq. ID no. 13576310
MLPPSRREFKDIYVVFELMESDLHQVIKANDDLTREHYQFFLYQLLRALKYIHTANVYHRDLKPKNILANANCKLKICDFGLARVAFNDTPTTIFWTDYVATRWYRAPELCGSFYSKYTPAIDIWSIGCIFAEVLMGKPLFPGKNVVHQLDLMTDLLGTPSLDTISRVRNEKARRYLTSMRKKPPIPFAQKFPNADPLSLKLLERLLAFDPKDRPTAEEALADPYFKGLAKVEREPSCQPITKMEFEFERRKVTKEDIRELISREILEYHPQLLKDHMNGADKASFLYPSAVDQFRRQFAHLEENSGKTGPVAPLERKHASLPRSTVIHSTAVARGGQPKLMNNTNTLNPETTQNIPFNHATIQAQQRNLSAAKPSTFMGPVAPFDNGRISRDAYDPRSFIRSTNLPFSQQSAATVAMGKQQERRTTMEPEKQARQISQYNRYAPDVAINIDNNPFIMARTGMNKAENISDRIIIDTNLLQATAGIGVAAAAAAAAPGGSAHRKVGAVRYGMSKMY

SEQ ID NO: 45484 - DNA, 2164 bp, Arabidopsis thaliana
  misc_feature (1)..(2164): Ceres Seq. ID no. 15178449
  misc_feature (1)..(2164): Ortholog of  Ceres SEQ ID NO 14302836 as cited in SEQ ID NO 65013
tcactagtccccccccccccccgataaagcttccatggctaatcttgtttaagcttctcttcttcttctctctcctgtgtctcgttcactagttttttttcgggggagagtgatggagtgtgtttgttgaatagttttgacgatcacatggctgagatttgttacgagaacgagactatgatgattgaaacgacggcgacggtggtgaagaaggcaacgacgacaacgaggagacgagaacggagctcgtctcaagcagcgagaagaaggagaatggagatccggaggtttaagtttgtttccggcgaacaagaacctgtcttcgtcgacggtgacttacagaggcggaggagaagagaatccaccgtcgcagcctccacctccaccgtgttttacgaaacggcgaaggaagttgtcgtcctatgcgagtctcttagttcaacggttgtggcattgcctgatcctgaagcttatcctaaatacggcgtcgcttcagtctgtggaagaagacgtgaaatggaagacgccgtcgctgtgcatccgtttttttcccgtcatcagacggaatattcatccaccggatttcactattgcggcgtttacgatggccatggctgttcccatgtagcgatgaaatgtagagaaagactacacgagctagtacgtgaagagtttgaagctgatgctgactgggaaaagtcaatggcgcgtagcttcacgcgcatggacatggaggttgttgcgttgaacgccgatggtgcggcaaaatgccggtgcgagcttcagaggccggactgcgacgcggtgggatctaccgcagttgtgtctgtcctcacgccggagaaaatcatcgtggcgaattgcggtgactcacgtgccgttctctgtcgtaacggcaaagccattgctttatcctccgatcataaggttttgttcgttttttgataatctctcttgtttcgtttattcatcgttaaatgtttatccgttagatctacggttatggtttactcactgtaatggaaacgagaatttcgttacgtgttgcgttcgaaacttacctatcaatattgtttaatgcatttttaattattatttcatttattggaaattagaatcttctttaatgtgcatgcaacacctggacgacgaatcgacgattaagaatgtttaatgactttttactttttagatagaggatctgataaagtttatgagtttttagattctttaatccttcgtgtcactgttatcaatgactatattattctctctctctctcttgtttaaatttgttgtaacagccagaccgtccggacgagctagaccggattcaagcagcgggtggtcgtgttatctactgggatggcccacgtgtccttggagtacttgcaatgtcacgagccattggtcagttaattgattacacttgacgaaaacactctgtccctatcctaatgtttgtacaaagtttttccgtactttcaataatgatgattattaactctcgtttcgccgcggatttttttcgttttttttttcaggagataattacttgaagccgtatgtaatcagcagaccggaggtaaccgtgacggaccgggccaacggagacgatttcctcattctcgcaagtgacggtctttgggacgttatttcaaacgaaactgcatgtagcgtcgttcgaatgtgtttgagaggaaaagtcaatggtcaagtatcatcatcaccggaaagggaaatgacaggtgtcggcgccgggaatgtggtggttggaggaggagatttgccagataaagcgtgtgaggaggcgtcgctgttgctgacgaggcttgcgttggctagacaaagttcggacaacgtaagtgttgtggtggttgatctaagacgagacacgtaattgtatttgtctctctcgtaatgtttgttgttttttgtcctgagtcatcgacttttgggctttttcttttaacctttttttgctcttcggtgtaagacaacgaagggtttttaatttagcttgactatgggttatgtcagtcactgtgttgaatcgcggtttagatctacaaagattttcaccagtagtgaaaatggtaaaaagccgtgaaaggtgaaagacttgagttcaatttaattttaaatttaagagaatcagttgatc

SEQ ID NO: 45485 - protein, 265 aa, Arabidopsis thaliana
  peptide (1)..(265): Ceres Seq. ID no. 15178450
MAEICYENETMMIETTATVVKKATTTTRRRERSSSQAARRRRMEIRRFKFVSGEQEPVFVDGDLQRRRRRESTVAASTSTVFYETAKEVVVLCESLSSTVVALPDPEAYPKYGVASVCGRRREMEDAVAVHPFFSRHQTEYSSTGFHYCGVYDGHGCSHVAMKCRERLHELVREEFEADADWEKSMARSFTRMDMEVVALNADGAAKCRCELQRPDCDAVGSTAVVSVLTPEKIIVANCGDSRAVLCRNGKAIALSSDHKVLFVF

SEQ ID NO: 45486 - protein, 255 aa, Arabidopsis thaliana
  peptide (1)..(255): Ceres Seq. ID no. 15178451
MMIETTATVVKKATTTTRRRERSSSQAARRRRMEIRRFKFVSGEQEPVFVDGDLQRRRRRESTVAASTSTVFYETAKEVVVLCESLSSTVVALPDPEAYPKYGVASVCGRRREMEDAVAVHPFFSRHQTEYSSTGFHYCGVYDGHGCSHVAMKCRERLHELVREEFEADADWEKSMARSFTRMDMEVVALNADGAAKCRCELQRPDCDAVGSTAVVSVLTPEKIIVANCGDSRAVLCRNGKAIALSSDHKVLFVF

SEQ ID NO: 45487 - protein, 254 aa, Arabidopsis thaliana
  peptide (1)..(254): Ceres Seq. ID no. 15178452
MIETTATVVKKATTTTRRRERSSSQAARRRRMEIRRFKFVSGEQEPVFVDGDLQRRRRRESTVAASTSTVFYETAKEVVVLCESLSSTVVALPDPEAYPKYGVASVCGRRREMEDAVAVHPFFSRHQTEYSSTGFHYCGVYDGHGCSHVAMKCRERLHELVREEFEADADWEKSMARSFTRMDMEVVALNADGAAKCRCELQRPDCDAVGSTAVVSVLTPEKIIVANCGDSRAVLCRNGKAIALSSDHKVLFVF

SEQ ID NO: 45488 - DNA, 2118 bp, Arabidopsis thaliana
  misc_feature (1)..(2118): Ceres Seq. ID no. 13646450
  misc_feature (1)..(2118): Ortholog of  Ceres SEQ ID NO 13654989 as cited in SEQ ID NO 63117
  misc_feature (1)..(2118): Ortholog of  Ceres SEQ ID NO 13584744 as cited in SEQ ID NO 69137
aaaatctctcactttcctaaacagagagaccccttatgagttttctcctcctcctcctcctcttccttcctcatcccagaaatttccgatttaactttcacatctccctctctcttacaactctctatccgtagtttcagtttcgtcctagaatttcttttcttgtctgttccagatgaaattgtgagttctccgagttatatgcatccgttagaatcaaagcggtaatcaaaagcagaatttagaggattgaaaaagatggttttggggtgtttccctttgaaaagcaagaagaaacgtggctctgtttctatgaagcggttggatcttgaagaaagcaagccaactgctttacctgagccaccaaagattccaagtcgtaatttacaatcagctcctccgagtttcagaactcgtgtgaagccaattcaatctaacaacggtggaaccggagagatgagtagccgagcaagagtcatgtctgctccgtcaagcatccacggtgcagcggaacgggatttgcttgctggtgtttaccacgacgagcaagatgaacaaccaagagatccacgtacttctactaaagaatctagccctcaaccacttccgttaccgtcaccaagaactggttcttcattgaagaattggggaagctttaagtcgtttaacggaagcagcggtcggttatcatcatccgcagctgtatctggacctttacctttgccacctagcgggtcagttaggagcttttcatatgatgaagtaatggctgcgtgtaacgctttttcttcagaccgatgtgtcatggaaggtctttcatctgttatgtacatggcttcctttggtgatgaggcttcgacctcaggtttaaagaaggttgacgcaactgttgtacgacttcacgtaattactcagagtattagggagttcattaatgaagtcaacacattggcgtcgctgcaacaccagaacctttgtaagctggtaggctatcatgctcgtgacggttctgacacaagaatgttggtgtacgagaggcttgctctgggcagcttggaccgtttactgcatgggagatcagatgggcctcctcttgattggaacactagaatgaagattgcactatgcgcagctcagggtctaaccttcttgcacgaagaaggcccttttcaggcaatgtacaatgaattttcgacggcaaatatccaagtcgataaagatttcagcgccaagctatcaggatacggttgtgcaggccatgcgcctgagacagagacatctaatagttcggcacttgctaatctctctgtcgagactctagagagagggcttttgaccccgaagagcaatgtgtggagctatggaatagttcttcttgagatgttaacgggtcggaaaaatatggacgggtcttacccgaaagaagagaggaacttagtgaaatggagcagagcttttctagcagatgattgcaggctctcgcttataatggatcctcagcttaaaggtcggtttccggcaaaagcggctaggagcatagcagatatagcacagaaatgtctgcaggtggagccttcagagcgtccaaccatgagaaacatcgtggatcaactcaagatcatacaggacatgaagtactcgtgtaggttcccattgagagaacccgcaccggtcgtggcaaggaaacatatgggaagatcaagcagtctcaacacgattatttggaccccggcatcagtgccaccaaggtcgagtttttcaccgtcacctccaccacgacgaccgtctgtctcacccacaaggggacggacgctcgtgtttcccccagtgtttccgccgcgagcgtgttcatctttggaggaaatggctcgggaagaggttcgaagatcgtcttcagccagtggtaggagaactagcctcgaagggttttgatttgttcatatctctcttctttcttctttttcctatttgtttttaatttttggcgttgatttgttttttggattccaaatataaaaaattgtttttttctttttcttttgttgtttatgaatccggacgtcgatagagagggtttgtgatgttttgtacataataatcaacatttcttctttcaca

SEQ ID NO: 45489 - protein, 557 aa, Arabidopsis thaliana
  peptide (1)..(557): Ceres Seq. ID no. 13646451
MVLGCFPLKSKKKRGSVSMKRLDLEESKPTALPEPPKIPSRNLQSAPPSFRTRVKPIQSNNGGTGEMSSRARVMSAPSSIHGAAERDLLAGVYHDEQDEQPRDPRTSTKESSPQPLPLPSPRTGSSLKNWGSFKSFNGSSGRLSSSAAVSGPLPLPPSGSVRSFSYDEVMAACNAFSSDRCVMEGLSSVMYMASFGDEASTSGLKKVDATVVRLHVITQSIREFINEVNTLASLQHQNLCKLVGYHARDGSDTRMLVYERLALGSLDRLLHGRSDGPPLDWNTRMKIALCAAQGLTFLHEEGPFQAMYNEFSTANIQVDKDFSAKLSGYGCAGHAPETETSNSSALANLSVETLERGLLTPKSNVWSYGIVLLEMLTGRKNMDGSYPKEERNLVKWSRAFLADDCRLSLIMDPQLKGRFPAKAARSIADIAQKCLQVEPSERPTMRNIVDQLKIIQDMKYSCRFPLREPAPVVARKHMGRSSSLNTIIWTPASVPPRSSFSPSPPPRRPSVSPTRGRTLVFPPVFPPRACSSLEEMAREEVRRSSSASGRRTSLEGF

SEQ ID NO: 45490 - protein, 539 aa, Arabidopsis thaliana
  peptide (1)..(539): Ceres Seq. ID no. 13646452
MKRLDLEESKPTALPEPPKIPSRNLQSAPPSFRTRVKPIQSNNGGTGEMSSRARVMSAPSSIHGAAERDLLAGVYHDEQDEQPRDPRTSTKESSPQPLPLPSPRTGSSLKNWGSFKSFNGSSGRLSSSAAVSGPLPLPPSGSVRSFSYDEVMAACNAFSSDRCVMEGLSSVMYMASFGDEASTSGLKKVDATVVRLHVITQSIREFINEVNTLASLQHQNLCKLVGYHARDGSDTRMLVYERLALGSLDRLLHGRSDGPPLDWNTRMKIALCAAQGLTFLHEEGPFQAMYNEFSTANIQVDKDFSAKLSGYGCAGHAPETETSNSSALANLSVETLERGLLTPKSNVWSYGIVLLEMLTGRKNMDGSYPKEERNLVKWSRAFLADDCRLSLIMDPQLKGRFPAKAARSIADIAQKCLQVEPSERPTMRNIVDQLKIIQDMKYSCRFPLREPAPVVARKHMGRSSSLNTIIWTPASVPPRSSFSPSPPPRRPSVSPTRGRTLVFPPVFPPRACSSLEEMAREEVRRSSSASGRRTSLEGF

SEQ ID NO: 45491 - protein, 491 aa, Arabidopsis thaliana
  peptide (1)..(491): Ceres Seq. ID no. 13646453
MSSRARVMSAPSSIHGAAERDLLAGVYHDEQDEQPRDPRTSTKESSPQPLPLPSPRTGSSLKNWGSFKSFNGSSGRLSSSAAVSGPLPLPPSGSVRSFSYDEVMAACNAFSSDRCVMEGLSSVMYMASFGDEASTSGLKKVDATVVRLHVITQSIREFINEVNTLASLQHQNLCKLVGYHARDGSDTRMLVYERLALGSLDRLLHGRSDGPPLDWNTRMKIALCAAQGLTFLHEEGPFQAMYNEFSTANIQVDKDFSAKLSGYGCAGHAPETETSNSSALANLSVETLERGLLTPKSNVWSYGIVLLEMLTGRKNMDGSYPKEERNLVKWSRAFLADDCRLSLIMDPQLKGRFPAKAARSIADIAQKCLQVEPSERPTMRNIVDQLKIIQDMKYSCRFPLREPAPVVARKHMGRSSSLNTIIWTPASVPPRSSFSPSPPPRRPSVSPTRGRTLVFPPVFPPRACSSLEEMAREEVRRSSSASGRRTSLEGF

SEQ ID NO: 45492 - DNA, 1359 bp, Arabidopsis thaliana
  misc_feature (1)..(1359): Ceres Seq. ID no. 13646643
  misc_feature (1)..(1359): Ortholog of  Ceres SEQ ID NO 13639476 as cited in SEQ ID NO 58353
cccccgaacagaatctgaagatcgaaggacagtgaaatcgaagaattgaagcacaagcttctccatctctgcaatctctctatccatctctcgtcatcgcatgtttcgcttcccaattcggaagaaagagagacgacgcgtctgaagcatatctccgtaatcggggtgaagaaaaacgcggcgagaagaagaggcagattttcgttttgggagggtagacaaatctggcgaaagtggagggcctaagggcgaggccgtggcttaagccaggagcttgtataaatggagatcaatatgactacgacggttcggaagacgaccattccaggccttggtggcgccgtcgtctcagatccttgtatatggcagccatgtcctttactccgtccacttttcgaatcgctatctcgttgctccttcttgttgctatcgtctccgccgtcatttttctcccggtcgaacagaaattgaaggacttcttgttatggattaaggaagatcttggaccttttggtccacttgcattggctttggcttatattcctctcacaattgtggcggttcctgcttctgtactcacgctaggtggtggttacctttttggcctgccagtaggatttgtagccgactctcttggagctacattaggtgcaacagcggcatttctgcttggtagaacgattggtaaatcttatgtcacttcaaaaataaagcattacccaaagtttcaagctgtttccgttgcaattcaaaaatctggcttcaagatagtcttgctgctacgcgttgtccccatactgcccttcaatatgttgaattacctcctatctgtaactcctgttcgcttaggggaatacatgctggccacttggttgggaatgatgcccattacatttgcgctagtatatgttggaactactctgaaagatctttctgatattacacatggatggcatgaggtgtcagtatttcgttgggtaattatgatggttggcgtagctctagctgtaattctgataatatgcataacaagagtggcgaaatcatccttggacaaagcattggctgagaatggtactgaattagatgggaagaagaatgacgacgcttccgtactcccgatcgcagagccaccaccggatctacaagagcctctcgttatcagaatcgacccatccaatacttgaataatatagacaagaagaaacctcttgagtttgtaaatttcgcgaaattttcttaccgagtgagttattagaaacgttttgtatagcatcataataccatacttcacagtttaattcgtttgttctttagttaaaaaaaaaaaaaaaaaaaactcgagggggggcccggtac

SEQ ID NO: 45493 - protein, 274 aa, Arabidopsis thaliana
  peptide (1)..(274): Ceres Seq. ID no. 13646644
MAAMSFTPSTFRIAISLLLLVAIVSAVIFLPVEQKLKDFLLWIKEDLGPFGPLALALAYIPLTIVAVPASVLTLGGGYLFGLPVGFVADSLGATLGATAAFLLGRTIGKSYVTSKIKHYPKFQAVSVAIQKSGFKIVLLLRVVPILPFNMLNYLLSVTPVRLGEYMLATWLGMMPITFALVYVGTTLKDLSDITHGWHEVSVFRWVIMMVGVALAVILIICITRVAKSSLDKALAENGTELDGKKNDDASVLPIAEPPPDLQEPLVIRIDPSNT

SEQ ID NO: 45494 - protein, 271 aa, Arabidopsis thaliana
  peptide (1)..(271): Ceres Seq. ID no. 13646645
MSFTPSTFRIAISLLLLVAIVSAVIFLPVEQKLKDFLLWIKEDLGPFGPLALALAYIPLTIVAVPASVLTLGGGYLFGLPVGFVADSLGATLGATAAFLLGRTIGKSYVTSKIKHYPKFQAVSVAIQKSGFKIVLLLRVVPILPFNMLNYLLSVTPVRLGEYMLATWLGMMPITFALVYVGTTLKDLSDITHGWHEVSVFRWVIMMVGVALAVILIICITRVAKSSLDKALAENGTELDGKKNDDASVLPIAEPPPDLQEPLVIRIDPSNT

SEQ ID NO: 45495 - DNA, 1873 bp, Arabidopsis thaliana
  misc_feature (1)..(1873): Ceres Seq. ID no. 13591649
  misc_feature (1)..(1873): Ortholog of  Ceres SEQ ID NO 13639636 as cited in SEQ ID NO 60184
tctctctctctctctcggttctcttcttcactgagctcaaagcgattacctcccatgggaaaaatctctgaagtgattatttagcactactttttctttgtctccttctgaatccattttttatggatcttggagttcgtgtttctggtcatgaaaccgtttcttctccgggtcaaactgaactcggatctggtttcagtaacaagcaagaaagatccggtttcgatggtgaagattgctggagaagttcaaagctctcacgaacatcaactgatggattctcttcttcccctgcctctgctaaaacgctgtcgtttcatcaaggcatccctttactgagatctaccactattaatgatcctcgtaaaggacaagaacacatgcttagcttctcttctgcttcaggcaaatcagatgtctcaccttatcttcagtactgtagaaactcaggatatggtttaggaggaatgatgaacacaagcaacatgcatggaaacttgttgacaggagtaaaaggacctttttcattgactcagtgggcagagctagagcaacaggcgttgatctataagtatatcacagccaatgtccctgttccatctagtttacttctctctctcaagaaatcttttttcccttatggttccttgcctcctaattcttttggatggggctcttttcatctgggcttttccggtggtaacatggatcccgagccagggagatgtcgccggacagatggaaagaaatggcggtgctcgagggacgctgttcccgatcaaaagtactgtgaacgacatattaacagaggccgccatcgttcaagaaagcctgtggaaggccaaaatggccacaatactaatgctgccgccgctgcttctgctgctgccgcttctaccgctgctgctgtgtccaaagcggcagcggggacttcagctgttgcgatgcgtggatcagataataacaatagccttgccgctgctgttggaacacaacatcataccaataatcaatctacagattctttggctaacagagttcaaaattctcgaggggcttcggtttttcctgccacgatgaacttacagtcgaaggaaactcatccgaaacaaagcaataatccctttgaattcggactcatctcttctgattcgttacttaatccgtcgcataaacaagcctcgtatgcaacctcttccaaaggctttggatcgtatcttgacttcggcaaccaagccaagcacgcggggaatcacaacaatgtcgattcttggcccgaagagctgaaatcggattggactcagctctcaatgtcaatccctatggctccatcttcccctgttcaagataaacttgcactctcacctttaaggttatcgcgtgagtttgaccccgcgatccacatgggattaggcgtcaacaccgagtttcttgaccccgggaaaaagacgaataactggataccaatctcctggggtaataacaactccatgggaggtccactcggcgaggtactaaacagcacgaccaatagtcccaagtttggttcctctccaacaggcgtcttgcaaaagtcgacatttggttctctttctaacagcagctcggcaagcagcaccatcattggcgataacaacaataagaacggtgatggaaaagatccgcttggcccgaccacgctgatgaatacttctgctactgctccttctctgtgaaactgaaaaaaaaaaactaaggacaattgcgaaaacaaaaacactctgtttttctctgtttctggtttttcttacttgatgcattgttgtttctgttgctgttttctttctatataaagcaagaagaaactaaaggagagatgtgtgtttttttcttc

SEQ ID NO: 45496 - protein, 530 aa, Arabidopsis thaliana
  peptide (1)..(530): Ceres Seq. ID no. 13591650
MDLGVRVSGHETVSSPGQTELGSGFSNKQERSGFDGEDCWRSSKLSRTSTDGFSSSPASAKTLSFHQGIPLLRSTTINDPRKGQEHMLSFSSASGKSDVSPYLQYCRNSGYGLGGMMNTSNMHGNLLTGVKGPFSLTQWAELEQQALIYKYITANVPVPSSLLLSLKKSFFPYGSLPPNSFGWGSFHLGFSGGNMDPEPGRCRRTDGKKWRCSRDAVPDQKYCERHINRGRHRSRKPVEGQNGHNTNAAAAASAAAASTAAAVSKAAAGTSAVAMRGSDNNNSLAAAVGTQHHTNNQSTDSLANRVQNSRGASVFPATMNLQSKETHPKQSNNPFEFGLISSDSLLNPSHKQASYATSSKGFGSYLDFGNQAKHAGNHNNVDSWPEELKSDWTQLSMSIPMAPSSPVQDKLALSPLRLSREFDPAIHMGLGVNTEFLDPGKKTNNWIPISWGNNNSMGGPLGEVLNSTTNSPKFGSSPTGVLQKSTFGSLSNSSSASSTIIGDNNNKNGDGKDPLGPTTLMNTSATAPSL

SEQ ID NO: 45497 - protein, 444 aa, Arabidopsis thaliana
  peptide (1)..(444): Ceres Seq. ID no. 13591651
MLSFSSASGKSDVSPYLQYCRNSGYGLGGMMNTSNMHGNLLTGVKGPFSLTQWAELEQQALIYKYITANVPVPSSLLLSLKKSFFPYGSLPPNSFGWGSFHLGFSGGNMDPEPGRCRRTDGKKWRCSRDAVPDQKYCERHINRGRHRSRKPVEGQNGHNTNAAAAASAAAASTAAAVSKAAAGTSAVAMRGSDNNNSLAAAVGTQHHTNNQSTDSLANRVQNSRGASVFPATMNLQSKETHPKQSNNPFEFGLISSDSLLNPSHKQASYATSSKGFGSYLDFGNQAKHAGNHNNVDSWPEELKSDWTQLSMSIPMAPSSPVQDKLALSPLRLSREFDPAIHMGLGVNTEFLDPGKKTNNWIPISWGNNNSMGGPLGEVLNSTTNSPKFGSSPTGVLQKSTFGSLSNSSSASSTIIGDNNNKNGDGKDPLGPTTLMNTSATAPSL

SEQ ID NO: 45498 - protein, 415 aa, Arabidopsis thaliana
  peptide (1)..(415): Ceres Seq. ID no. 13591652
MMNTSNMHGNLLTGVKGPFSLTQWAELEQQALIYKYITANVPVPSSLLLSLKKSFFPYGSLPPNSFGWGSFHLGFSGGNMDPEPGRCRRTDGKKWRCSRDAVPDQKYCERHINRGRHRSRKPVEGQNGHNTNAAAAASAAAASTAAAVSKAAAGTSAVAMRGSDNNNSLAAAVGTQHHTNNQSTDSLANRVQNSRGASVFPATMNLQSKETHPKQSNNPFEFGLISSDSLLNPSHKQASYATSSKGFGSYLDFGNQAKHAGNHNNVDSWPEELKSDWTQLSMSIPMAPSSPVQDKLALSPLRLSREFDPAIHMGLGVNTEFLDPGKKTNNWIPISWGNNNSMGGPLGEVLNSTTNSPKFGSSPTGVLQKSTFGSLSNSSSASSTIIGDNNNKNGDGKDPLGPTTLMNTSATAPSL

SEQ ID NO: 45499 - DNA, 2152 bp, Arabidopsis thaliana
  misc_feature (1)..(2152): Ceres Seq. ID no. 13576317
  misc_feature (1)..(2152): Ortholog of  Ceres SEQ ID NO 14312180 as cited in SEQ ID NO 59480
ggcaaccaagaatataacaaaagggaacaaatcacatatttntgtgaaatcccaaagaaagtttttgctttcaccggccagtcatgggaaactatcggtggccgtcaaagctatcaaagttatcactcagagcaaaacaaacgaatctgtaccgcgtcattctaatcgcgatcctctgcgtcaccttttacttcgtcggagtatggcaacactccggcagaggaatctcacgctcttccatttctaaccacgagctcacgtccgtgccctgcacgtttcctcaccaaaccacaccgattctcaacttcgcctcccgtcacacagcccctgaccttcctccgacgataacggacgcgcgtgttgttcaaatcccgtcgtgcggcgttgaattctcggagtacacgccctgcgagttcgtgaatcggtctttgaatttcccaagagagaggcttatatacagagagagacactgtccggaaaaacacgagatagtcaggtgtcggattccagcgccgtacggttacagtttaccttttcggtggccggagagccgtgacgtggcgtggtttgctaacgtgccgcatacggaactaacggtggagaagaagaatcagaactgggtaaggtatgagaaggataggtttttatttcctggtggtggtacgatgtttccacgtggagctgatgcttacatcgacgagatcggacggttgataaatctcaaagatggatcaattcggacagccattgatactggatgtggggtagcgagctttggggcgtatctaatgtcgaggaacatagtaacgatgtcgtttgcaccaagagacacacacgaagctcaggttcagttcgcacttgagagaggagtccctgccatcataggagtgttagcctctattaggctcccatttccggccagagccttcgacattgctcattgctctcgatgtctcattccttggggccaatacaacgggacgtatctcatagaagtggatagggtactgagaccgggggggtattggattttgtcgggaccgccgattaactggcagagacactggaagggttgggaaagaactagagacgatctcaactcggagcagtctcagatcgagagggtggctaggagcttgtgttggaggaaattggtgcagagagaggatcttgcggtttggcagaaacctaccaaccatgttcactgtaagcgcaatcggatagctttaggacgccctccgttctgccaccggacactacccaaccagggctggtacactaagcttgaaacctgtttgacgccgttgccggaagtaacaggatctgagatcaaagaagtagcgggtggacagttggcgagatggcctgagagattgaatgctcttcctccgaggatcaaaagtggaagcttggaagggatcactgaggatgaatttgtcagcaacacagagaaatggcagagaagagtgtcttactacaagaaatatgaccaacagctagcggagacgggaagatacagaaactttctcgacatgaacgctcatcttggaggtttcgcctcagccttagtcgatgatcctgtatgggtcatgaatgttgtccccgtggaggccagtgttaacacccttggagttatctatgagcgaggattgattggaacgtatcaaaactggtgtgaagcaatgtcaacttacccaaggacatacgatttcatccatgccgattcggtgttcagtctgtacaaagacagatgtgacatggaagatatcttgctagaaatggacaggattctaagaccaaagggaagcgtgatcatcagagacgacattgatgtgctaaccaaagtgaagaagattacagatgcgatgcaatgggaagggaggataggagatcatgaaaacggacctcttgaaagagagaagattttgtttcttgtgaaggagtactggaccgcacctgcgcctgatcagtcatcagatccttgatcaagcttggaataattcataaaatttgtagctccattcttttttcttcaaatgttttgtacacactaatcgactttgggggaaagaagaaacaaacacccgctaaattgtttcaaaccggagattcattgcgactttgtgagaaaatgaactagagagtttactac

SEQ ID NO: 45500 - protein, 633 aa, Arabidopsis thaliana
  peptide (1)..(633): Ceres Seq. ID no. 13576318
MGNYRWPSKLSKLSLRAKQTNLYRVILIAILCVTFYFVGVWQHSGRGISRSSISNHELTSVPCTFPHQTTPILNFASRHTAPDLPPTITDARVVQIPSCGVEFSEYTPCEFVNRSLNFPRERLIYRERHCPEKHEIVRCRIPAPYGYSLPFRWPESRDVAWFANVPHTELTVEKKNQNWVRYEKDRFLFPGGGTMFPRGADAYIDEIGRLINLKDGSIRTAIDTGCGVASFGAYLMSRNIVTMSFAPRDTHEAQVQFALERGVPAIIGVLASIRLPFPARAFDIAHCSRCLIPWGQYNGTYLIEVDRVLRPGGYWILSGPPINWQRHWKGWERTRDDLNSEQSQIERVARSLCWRKLVQREDLAVWQKPTNHVHCKRNRIALGRPPFCHRTLPNQGWYTKLETCLTPLPEVTGSEIKEVAGGQLARWPERLNALPPRIKSGSLEGITEDEFVSNTEKWQRRVSYYKKYDQQLAETGRYRNFLDMNAHLGGFASALVDDPVWVMNVVPVEASVNTLGVIYERGLIGTYQNWCEAMSTYPRTYDFIHADSVFSLYKDRCDMEDILLEMDRILRPKGSVIIRDDIDVLTKVKKITDAMQWEGRIGDHENGPLEREKILFLVKEYWTAPAPDQSSDP

SEQ ID NO: 45501 - protein, 439 aa, Arabidopsis thaliana
  peptide (1)..(439): Ceres Seq. ID no. 13576319
MFPRGADAYIDEIGRLINLKDGSIRTAIDTGCGVASFGAYLMSRNIVTMSFAPRDTHEAQVQFALERGVPAIIGVLASIRLPFPARAFDIAHCSRCLIPWGQYNGTYLIEVDRVLRPGGYWILSGPPINWQRHWKGWERTRDDLNSEQSQIERVARSLCWRKLVQREDLAVWQKPTNHVHCKRNRIALGRPPFCHRTLPNQGWYTKLETCLTPLPEVTGSEIKEVAGGQLARWPERLNALPPRIKSGSLEGITEDEFVSNTEKWQRRVSYYKKYDQQLAETGRYRNFLDMNAHLGGFASALVDDPVWVMNVVPVEASVNTLGVIYERGLIGTYQNWCEAMSTYPRTYDFIHADSVFSLYKDRCDMEDILLEMDRILRPKGSVIIRDDIDVLTKVKKITDAMQWEGRIGDHENGPLEREKILFLVKEYWTAPAPDQSSDP

SEQ ID NO: 45502 - protein, 398 aa, Arabidopsis thaliana
  peptide (1)..(398): Ceres Seq. ID no. 13576320
MSRNIVTMSFAPRDTHEAQVQFALERGVPAIIGVLASIRLPFPARAFDIAHCSRCLIPWGQYNGTYLIEVDRVLRPGGYWILSGPPINWQRHWKGWERTRDDLNSEQSQIERVARSLCWRKLVQREDLAVWQKPTNHVHCKRNRIALGRPPFCHRTLPNQGWYTKLETCLTPLPEVTGSEIKEVAGGQLARWPERLNALPPRIKSGSLEGITEDEFVSNTEKWQRRVSYYKKYDQQLAETGRYRNFLDMNAHLGGFASALVDDPVWVMNVVPVEASVNTLGVIYERGLIGTYQNWCEAMSTYPRTYDFIHADSVFSLYKDRCDMEDILLEMDRILRPKGSVIIRDDIDVLTKVKKITDAMQWEGRIGDHENGPLEREKILFLVKEYWTAPAPDQSSDP

SEQ ID NO: 45503 - DNA, 1669 bp, Arabidopsis thaliana
  misc_feature (1)..(1669): Ceres Seq. ID no. 13591557
  misc_feature (1)..(1669): Ortholog of  Ceres SEQ ID NO 12627133 as cited in SEQ ID NO 68031
gaagacaaaacaatcgccgactttagactctgtcgccggcgacactcaaactcaaacgaacgaacactgtcctgatttgaggaatccggtgaatcgaaactagatgtccctcaatctgtctcgtctttcgcttctctcgtccccacgtatctcgatttcaactcacgctcctcggaaaggatacgtttgttgctctatgaagtcttatagattatctgaacttagttcttcccaagttgatagtttgaagtcacgccctcgcattgacttctcttctattttcgccactgtgaacccgattatcgatgctgttcgtagcaatggggataatgctgtcaaagaatacactgaaagatttgacaaagtccagctgaataaagttgtggaagatatgtctgagctttctgttcctgagctcgattccaatgtcaaagaagcgtttgatgttgcgtatgacaacatatatgcgtttcacttagcccaaaagtcaactgagaaaagcgttgagaatatgaaaggtgtcagatgtaaaagggtgtcaagatctattggctctgtaggtctttatgtgcctggtggaacagctgttttgccatcaacggctttgatgcttgctattcctgctcaaattgctggatgtaaaacagttgttcttgcaactccaccaagtaaggatggaagcatttgtaaggaggttctgtattgcgccaagagggctggtgttactcacatactcaaagctggtggagcgcaggctatagctgccatggcctgggggacagattcttgtccaaaggttgagaagatttttggtcctgggaaccagtatgtcacagctgctaagatgattcttcaaaacagcgaggcaatggtctcaatcgatatgcctgctggtccttcagaagtcctagttattgctgacgaacatgctagtccagtttacattgcagcagacttactttctcaggcggagcatggtccagatagtcaagttgttcttgtagttgtgggcgatagtgtagatctcaacgccatcgaagaagaaattgccaagcagtgcaaaagccttcctagaggagagtttgcttcaaaagcactaagtcacagtttcacagtgtttgctcgagatatgattgaggcaatatctttctcaaatctatatgcacccgaacatttgatcatcaatgtcaaagacgctgagaaatgggagggactgattgagaacgcaggctcggttttcataggaccatggactccagagagtgttggggattatgcgagcgggacaaaccacgttcttccaacatatggatatgcaagaatgtacagtggcgtctctctcgactctttcctaaagttcatgactgtacaatctttgacagaggaaggtctgagaaacctcggcccttatgtagcaactatggctgaaatcgaaggtttagatgcacacaagagagccgttactctcagactcaaggatatcgaagccaaacagcttgcataatccaattgagatttatattcagacaaaagaggcaaaaattctttttgtattgtatgaacatatttggtttcctgagatggaataacaataaaataagagatgttggaaaactcttaccataatcttgtttttcattctttaaatctaaatccttccgtatgtttg

SEQ ID NO: 45504 - protein, 466 aa, Arabidopsis thaliana
  peptide (1)..(466): Ceres Seq. ID no. 13591558
MSLNLSRLSLLSSPRISISTHAPRKGYVCCSMKSYRLSELSSSQVDSLKSRPRIDFSSIFATVNPIIDAVRSNGDNAVKEYTERFDKVQLNKVVEDMSELSVPELDSNVKEAFDVAYDNIYAFHLAQKSTEKSVENMKGVRCKRVSRSIGSVGLYVPGGTAVLPSTALMLAIPAQIAGCKTVVLATPPSKDGSICKEVLYCAKRAGVTHILKAGGAQAIAAMAWGTDSCPKVEKIFGPGNQYVTAAKMILQNSEAMVSIDMPAGPSEVLVIADEHASPVYIAADLLSQAEHGPDSQVVLVVVGDSVDLNAIEEEIAKQCKSLPRGEFASKALSHSFTVFARDMIEAISFSNLYAPEHLIINVKDAEKWEGLIENAGSVFIGPWTPESVGDYASGTNHVLPTYGYARMYSGVSLDSFLKFMTVQSLTEEGLRNLGPYVATMAEIEGLDAHKRAVTLRLKDIEAKQLA

SEQ ID NO: 45505 - protein, 435 aa, Arabidopsis thaliana; identical to SEQ ID NO: 25239
  peptide (1)..(435): Ceres Seq. ID no. 13591559

SEQ ID NO: 45506 - protein, 370 aa, Arabidopsis thaliana; identical to SEQ ID NO: 25240
  peptide (1)..(370): Ceres Seq. ID no. 13591560

SEQ ID NO: 45507 - DNA, 1779 bp, Arabidopsis thaliana; identical to SEQ ID NO: 29030
  misc_feature (1)..(1779): Ceres Seq. ID no. 13600793
  misc_feature (1)..(1779): Ortholog of  Ceres SEQ ID NO 12780298 as cited in SEQ ID NO 65880
  misc_feature (1)..(1779): Ortholog of  Ceres SEQ ID NO 13654539 as cited in SEQ ID NO 68015

SEQ ID NO: 45508 - protein, 464 aa, Arabidopsis thaliana; identical to SEQ ID NO: 29031
  peptide (1)..(464): Ceres Seq. ID no. 15219006

SEQ ID NO: 45509 - protein, 403 aa, Arabidopsis thaliana; identical to SEQ ID NO: 29032
  peptide (1)..(403): Ceres Seq. ID no. 15219007

SEQ ID NO: 45510 - protein, 389 aa, Arabidopsis thaliana; identical to SEQ ID NO: 29033
  peptide (1)..(389): Ceres Seq. ID no. 15219008

SEQ ID NO: 45511 - DNA, 1645 bp, Arabidopsis thaliana; identical to SEQ ID NO: 35802
  misc_feature (1)..(1645): Ceres Seq. ID no. 13593234
  misc_feature (1)..(1645): Ortholog of  Ceres SEQ ID NO 13590307 as cited in SEQ ID NO 67154

SEQ ID NO: 45512 - protein, 443 aa, Arabidopsis thaliana; identical to SEQ ID NO: 25547
  peptide (1)..(443): Ceres Seq. ID no. 13593235

SEQ ID NO: 45513 - protein, 441 aa, Arabidopsis thaliana; identical to SEQ ID NO: 25548
  peptide (1)..(441): Ceres Seq. ID no. 13593236

SEQ ID NO: 45514 - protein, 334 aa, Arabidopsis thaliana; identical to SEQ ID NO: 25549
  peptide (1)..(334): Ceres Seq. ID no. 13593237

SEQ ID NO: 45515 - DNA, 1810 bp, Arabidopsis thaliana
  misc_feature (1)..(1810): Ceres Seq. ID no. 13575681
  misc_feature (1)..(1810): Ortholog of  Ceres SEQ ID NO 13662574 as cited in SEQ ID NO 64794
ggtctcactctctctcccattgatcttcttcctcggctacatctcccgacgcctctctctcgttccgattttggtttaatatttgatgggaacatcatctggttcgaatcatcctcaccaaatgttaccaccacgtcaacaacaacgaagtggaggaggacttgaaacagctctttcactagtctcttcagatcaagagccgcgtcgcgagtctccagcggagagtgcgagttctcaagaaacatggccactaggagacactgttgctgggaagaagtcaatgagtcaaaagacagagcctgattctatggaacaaactgtgaatgtgatgcaccatgtttcgaatgcggacaaggtatcggtacgggatatcgctagggaaagagttgagttagttgcagagagaatgcatcgattaccggatgagtttcttgacgagttaaagaacggtcttaagtctatccttgaagggaatgtagcgcagagtgttgatgagttcatgttcttgcagaaggttgttcagagtagaactgatttgagctctgtaacacttgttagagctcatcgggtgcagcttgagatacttgtagcgataaataccgggattcaggcgtttttgcatccgaatattagtctgtctcagccgtctcttatcgagatttttgtatacaagagatgtagaaacatagcttgccaaaatcaactacctgctgatgattgctactgtgatatatgtactaataggaaagggttttgtaacctttgtatgtgtacgatctgtaacaagtttgatttttcggttaatacttgccgctggatcggatgtgacttgtgttcccactggactcatacggattgtgctattcgggatggacagatcaccactggatcctctgctaagaataatacttcaggtccaggagagatagtgtttaagtgtcgggcttgtaaccgaacgtctgagctgttgggatgggttaaagatgtgtttcagcactgtgcaccgaactgggatcgagaatctttgatgaaggaacttgattttgttagtaggattttccgcggaagcgaagatcaacgaggtaggaaactgttttggaagtgtgaggagcttattgacaagattaaaggtggtttggctgaagcaactgctgccaaattgatattaatgtttttccaagagatcgaatcagactctgcgaagagctttgaaaatggagaaggtggacgtttgatggcacctcaggatgcatgcaaccgaattgctgaagttgtacaagagactttgaggaaaatggagatagtggctgaggagaagatgagaatgttcaagaaggcacgcatggctcttgagacatgcgatagagagctcgaagacaaagccaaggaagtttcagaactgaaagcagagaggcagaagaagaaacttcagatagatgagctagagagaatcgtgaggctgaagcaagcggaggcagacatgttccagcttaaagcaaatgaagcaaagcgggaggctgataggttgcagaggattgtactagcgaaaatggataagtctgaggaggaatacgcaagtaactatctgaaacagaggctgagtgaggccgaggcagagaagcagtatctgtttgagaagattaagctgcaggaaaactcaagggtggcatcacaaagcagtggtgggggaggagacccgtcacaggtgatgatgtactcaaagatccgcgatctgcttcaaggatacaatctctctcccaaggttgatcctcaattaaacgagcgtaatcctttcagatccaatccctaa

SEQ ID NO: 45516 - protein, 574 aa, Arabidopsis thaliana
  peptide (1)..(574): Ceres Seq. ID no. 13575682
MGTSSGSNHPHQMLPPRQQQRSGGGLETALSLVSSDQEPRRESPAESASSQETWPLGDTVAGKKSMSQKTEPDSMEQTVNVMHHVSNADKVSVRDIARERVELVAERMHRLPDEFLDELKNGLKSILEGNVAQSVDEFMFLQKVVQSRTDLSSVTLVRAHRVQLEILVAINTGIQAFLHPNISLSQPSLIEIFVYKRCRNIACQNQLPADDCYCDICTNRKGFCNLCMCTICNKFDFSVNTCRWIGCDLCSHWTHTDCAIRDGQITTGSSAKNNTSGPGEIVFKCRACNRTSELLGWVKDVFQHCAPNWDRESLMKELDFVSRIFRGSEDQRGRKLFWKCEELIDKIKGGLAEATAAKLILMFFQEIESDSAKSFENGEGGRLMAPQDACNRIAEVVQETLRKMEIVAEEKMRMFKKARMALETCDRELEDKAKEVSELKAERQKKKLQIDELERIVRLKQAEADMFQLKANEAKREADRLQRIVLAKMDKSEEEYASNYLKQRLSEAEAEKQYLFEKIKLQENSRVASQSSGGGGDPSQVMMYSKIRDLLQGYNLSPKVDPQLNERNPFRSNP

SEQ ID NO: 45517 - protein, 562 aa, Arabidopsis thaliana
  peptide (1)..(562): Ceres Seq. ID no. 13575683
MLPPRQQQRSGGGLETALSLVSSDQEPRRESPAESASSQETWPLGDTVAGKKSMSQKTEPDSMEQTVNVMHHVSNADKVSVRDIARERVELVAERMHRLPDEFLDELKNGLKSILEGNVAQSVDEFMFLQKVVQSRTDLSSVTLVRAHRVQLEILVAINTGIQAFLHPNISLSQPSLIEIFVYKRCRNIACQNQLPADDCYCDICTNRKGFCNLCMCTICNKFDFSVNTCRWIGCDLCSHWTHTDCAIRDGQITTGSSAKNNTSGPGEIVFKCRACNRTSELLGWVKDVFQHCAPNWDRESLMKELDFVSRIFRGSEDQRGRKLFWKCEELIDKIKGGLAEATAAKLILMFFQEIESDSAKSFENGEGGRLMAPQDACNRIAEVVQETLRKMEIVAEEKMRMFKKARMALETCDRELEDKAKEVSELKAERQKKKLQIDELERIVRLKQAEADMFQLKANEAKREADRLQRIVLAKMDKSEEEYASNYLKQRLSEAEAEKQYLFEKIKLQENSRVASQSSGGGGDPSQVMMYSKIRDLLQGYNLSPKVDPQLNERNPFRSNP

SEQ ID NO: 45518 - protein, 509 aa, Arabidopsis thaliana
  peptide (1)..(509): Ceres Seq. ID no. 13575684
MSQKTEPDSMEQTVNVMHHVSNADKVSVRDIARERVELVAERMHRLPDEFLDELKNGLKSILEGNVAQSVDEFMFLQKVVQSRTDLSSVTLVRAHRVQLEILVAINTGIQAFLHPNISLSQPSLIEIFVYKRCRNIACQNQLPADDCYCDICTNRKGFCNLCMCTICNKFDFSVNTCRWIGCDLCSHWTHTDCAIRDGQITTGSSAKNNTSGPGEIVFKCRACNRTSELLGWVKDVFQHCAPNWDRESLMKELDFVSRIFRGSEDQRGRKLFWKCEELIDKIKGGLAEATAAKLILMFFQEIESDSAKSFENGEGGRLMAPQDACNRIAEVVQETLRKMEIVAEEKMRMFKKARMALETCDRELEDKAKEVSELKAERQKKKLQIDELERIVRLKQAEADMFQLKANEAKREADRLQRIVLAKMDKSEEEYASNYLKQRLSEAEAEKQYLFEKIKLQENSRVASQSSGGGGDPSQVMMYSKIRDLLQGYNLSPKVDPQLNERNPFRSNP

SEQ ID NO: 45519 - DNA, 1729 bp, Arabidopsis thaliana
  misc_feature (1)..(1729): Ceres Seq. ID no. 13576740
  misc_feature (1)..(1729): Ortholog of  Ceres SEQ ID NO 14316239 as cited in SEQ ID NO 54472
  misc_feature (1)..(1729): Ortholog of  Ceres SEQ ID NO 13654809 as cited in SEQ ID NO 62798
gacaagccatgtgcttcgggtgtgatccagtggagatatcgagggaacgcaaaggtaggggccagattctgtagtaccttcttcgcctacctactctctttcccgaatttatttgccggcggtgatcaatcagaacgggattttagcctgagtaatcggtcactgggaagagaatttcgacggtgagagaagatgaagatatttgtgaaaactctcaaggggactcacttcgagatcgaagtaaaacccgaggattcggttgttgatgtgaagaagaacatagagagtgtgcagggcgcagatgtgtatcctgctgcaaaacagatgcttattcaccaaggtaaagtgcttaaagatgagacaactattgaggaaaacaaagttgctgagaacagttttattgtcattatgatgaacaagagtaaacctgcttcagctgcagcatctagtgcatctgctggcacatcgcaggccaagtcgatacctccctcaacatcacagccttcaatttcccctcagactccagcttctgtatcagcaccagtggcacctgcaccaacacgtccaccaccacctgcaccgacaccgacacctgcacctgtagctgcaactgaaactgtgactacccctatacctgaacctgtacctgctactatatcatcaagcactcctgcaccagactcagctcctgtgggaagtcaaggtgatgtttacggacaagcagcatcaaatctagccgctggaagtaatttagagagtaccattcagcagattcttgacatgggtggaggaacctgggatcgtgagactgttgtccttgcacttcgtgctgcatttaacaaccctgaaagagctgtggaatatctttatactgggatccctgagcaagctgaagttccaccagttgcccgtcctccagctagtgccggacagcctgcaaatcctccagcacagactcaacaacctgcagcagcacccgcaagtggtcctaatgcaaatccgttagatctcttcccacagggcttgccaaatgttggaggaaatcctggtgctggaacacttgacttcttgcgcaacagccaacagttccaagctctgcgagcaatggtgcaagcaaaccctcaagttctgcagcccatgcttcaggaactgggaaaacagaacccaaacttgatgcggttgattcaagaccaccaagctgacttcttacgcttaatcaatgaacccgttgaaggagggggagaaagtggcaacctccttggccaaatggcggcgggaatgccacagccacaggcgattcaagtcacacatgaggaacgtgaagccattgaacggcttgaagcgatgggatttgagagagcattggtgttggaagtgttctttgcgtgcaacaagaatgaagagttggctgcaaactatcttctagatcacatgcatgaattcgaggaataagcttcttcagattactttacctactctctatctttcgcattggtccatatgttttagctatatatgtgtgggatgccaaatccatgacctcgtcactttgtccatgttcatggctcagttctcagtttaaaatgaagtttgtcatgtgttctttctttgtattgtcgttagtccttacaaaatatcttgttccagttatttttgttgaattggggacaggtattatttctgtatgtgcctaaatagtaaaattattaaattataaataatttttttt

SEQ ID NO: 45520 - protein, 419 aa, Arabidopsis thaliana
  peptide (1)..(419): Ceres Seq. ID no. 13576741
MKIFVKTLKGTHFEIEVKPEDSVVDVKKNIESVQGADVYPAAKQMLIHQGKVLKDETTIEENKVAENSFIVIMMNKSKPASAAASSASAGTSQAKSIPPSTSQPSISPQTPASVSAPVAPAPTRPPPPAPTPTPAPVAATETVTTPIPEPVPATISSSTPAPDSAPVGSQGDVYGQAASNLAAGSNLESTIQQILDMGGGTWDRETVVLALRAAFNNPERAVEYLYTGIPEQAEVPPVARPPASAGQPANPPAQTQQPAAAPASGPNANPLDLFPQGLPNVGGNPGAGTLDFLRNSQQFQALRAMVQANPQVLQPMLQELGKQNPNLMRLIQDHQADFLRLINEPVEGGGESGNLLGQMAAGMPQPQAIQVTHEEREAIERLEAMGFERALVLEVFFACNKNEELAANYLLDHMHEFEE

SEQ ID NO: 45521 - protein, 375 aa, Arabidopsis thaliana
  peptide (1)..(375): Ceres Seq. ID no. 13576742
MLIHQGKVLKDETTIEENKVAENSFIVIMMNKSKPASAAASSASAGTSQAKSIPPSTSQPSISPQTPASVSAPVAPAPTRPPPPAPTPTPAPVAATETVTTPIPEPVPATISSSTPAPDSAPVGSQGDVYGQAASNLAAGSNLESTIQQILDMGGGTWDRETVVLALRAAFNNPERAVEYLYTGIPEQAEVPPVARPPASAGQPANPPAQTQQPAAAPASGPNANPLDLFPQGLPNVGGNPGAGTLDFLRNSQQFQALRAMVQANPQVLQPMLQELGKQNPNLMRLIQDHQADFLRLINEPVEGGGESGNLLGQMAAGMPQPQAIQVTHEEREAIERLEAMGFERALVLEVFFACNKNEELAANYLLDHMHEFEE

SEQ ID NO: 45522 - protein, 347 aa, Arabidopsis thaliana
  peptide (1)..(347): Ceres Seq. ID no. 13576743
MMNKSKPASAAASSASAGTSQAKSIPPSTSQPSISPQTPASVSAPVAPAPTRPPPPAPTPTPAPVAATETVTTPIPEPVPATISSSTPAPDSAPVGSQGDVYGQAASNLAAGSNLESTIQQILDMGGGTWDRETVVLALRAAFNNPERAVEYLYTGIPEQAEVPPVARPPASAGQPANPPAQTQQPAAAPASGPNANPLDLFPQGLPNVGGNPGAGTLDFLRNSQQFQALRAMVQANPQVLQPMLQELGKQNPNLMRLIQDHQADFLRLINEPVEGGGESGNLLGQMAAGMPQPQAIQVTHEEREAIERLEAMGFERALVLEVFFACNKNEELAANYLLDHMHEFEE

SEQ ID NO: 45523 - DNA, 2532 bp, Arabidopsis thaliana
  misc_feature (1)..(2532): Ceres Seq. ID no. 13647179
  misc_feature (1)..(2532): Ortholog of  Ceres SEQ ID NO 13595870 as cited in SEQ ID NO 62101
  misc_feature (1)..(2532): Ortholog of  Ceres SEQ ID NO 13590241 as cited in SEQ ID NO 63878
  misc_feature (1)..(2532): Ortholog of  Ceres SEQ ID NO 13657939 as cited in SEQ ID NO 66349
gagaaaggactcgagaagtcatggcttctgcttaatctcctcttccttaaaaaccagaagatcctttgttccacgtttctcgtttgtagcttcttctctctcagaattcaattcgaattttgacaagtcttgacgaagaagaagaaacagagctgcttcaatggcttctaactcattactacgttcttcttcaaatttcttcttaggatcccatatcataatctcatctcccacccctaaaaccaccagaaaaccctctttccctttctccttcgtctcccgtgctaaataccaaatcactcgatcgtctcaagacgaaaattcgccaaatggtaaacccaattcgccattctcgtcgcaagtagccttagcagctattctactatcttcaatttcatcttcgccgctagctttagctgtagtggacgaaccagcttctccgtctgtcgttatagaatctcaagctgtgaagccatcgacgccatcgcaattgttcattcagaacgagatacttaaggctcctagtcctaaatcatcggatctcccagaaggatcacagtggcgatacagcgagtttcttaacgctgtgaagaaagggaaagtcgagagagttagattcagcaaagatggttctgttgttcagcttactgccgtcgacaatcgccgtgcttcagtcatcgtccctaacgaccctgaccttattgatatcttggctatgaacggagttgatatatccgtctctgaaggagaatcctcaggcaatgacttgttcactgtcattggaaacttgattttcccgcttttggcctttggtggactcttcttgcttttcaggcgagctcagggaggccctggtggtggtcctggtggcttgggtggtcctatggatttcggacgttctaaatccaagttccaggaagtgcctgagactggtgtgtcatttgcagatgttgctggggctgatcaagctaagttggagttacaggaagttgtggatttcttgaagaatcctgataagtacacagccttgggtgctaagattcctaaagggtgtttgcttgttggaccgcctggtacgggtaagacactcctggctagggcggtggctggggaagctggagtgccgttcttctcttgcgcggcctcggagttcgtagagctttttgtgggtgtgggtgcatcgagagttagggatttgttcgagaaggctaagtctaaagccccttgtattgtattcattgatgagattgacgctgtgggtaggcagagaggagctgggatgggaggaggaaatgatgagagagaacagactattaatcagctgttgacagagatggatggattttctggcaactctggtgtgatagttttggcagctacgaataggccggacgttcttgattcggctttgttgaggcctggaaggtttgatcgacaggtcacggtggataggcctgatgtggctggcagagtcaagattcttcaggttcattctagggggaaggcactcggtaaagatgtggactttgacaaggttgccagaaggacccctggtttcacgggtgctgacttacaaaacctgatgaatgaagcggcgattcttgcggctaggcgtgagcttaaggaaataagcaaggatgaaatctctgatgctcttgagaggatcattgctggacctgagaagaagaatgcagttgtctctgaagagaagaagagacttgttgcataccatgaggctggtcatgctctagtgggtgctcttatgccagaatatgatccggttgcaaagatttctatcattcctcgtggccaagctggtgggctcactttttttgctccaagcgaagaaagacttgagtctggattgtacagtaggagctaccttgagaatcaaatggctgttgcacttggcggaagggttgcagaggaggtgatctttggggatgagaatgtgacgactggagcatcaaatgatttcatgcaggtgtctcgtgtggcacgtcaaatgattgagagatttgggttcagcaaaaagattggacaagttgctgttggtggccctggtggaaatcccttcatgggtcaacaaatgtcatcacagaaagattactcaatggcaactgcggatattgtagatgctgaggtgcgagagttagttgagaaggcatacaagagagcaacggagatcataacaactcatattgatatcctacacaagcttgcacagctcctgatcgagaaagaaactgttgacggtgaagagttcatgagtctctttattgacggccaagctgagttgtatatttcttgattccttaaagttgccattgcttagtgcttacaataccataagctaataagtatattcgtgttcatatgtgtcaccgattcagtactcaccaattcagtatatttgtgtatattccgttgttttagtgaatctaaatatactttgtaatgcaatgcaatgtgtttaaagaaaagtaatttgatcaaaaaaaaaaaaaaaaaaaactcgagggggggcccggt

SEQ ID NO: 45524 - protein, 716 aa, Arabidopsis thaliana
  peptide (1)..(716): Ceres Seq. ID no. 13647180
MASNSLLRSSSNFFLGSHIIISSPTPKTTRKPSFPFSFVSRAKYQITRSSQDENSPNGKPNSPFSSQVALAAILLSSISSSPLALAVVDEPASPSVVIESQAVKPSTPSQLFIQNEILKAPSPKSSDLPEGSQWRYSEFLNAVKKGKVERVRFSKDGSVVQLTAVDNRRASVIVPNDPDLIDILAMNGVDISVSEGESSGNDLFTVIGNLIFPLLAFGGLFLLFRRAQGGPGGGPGGLGGPMDFGRSKSKFQEVPETGVSFADVAGADQAKLELQEVVDFLKNPDKYTALGAKIPKGCLLVGPPGTGKTLLARAVAGEAGVPFFSCAASEFVELFVGVGASRVRDLFEKAKSKAPCIVFIDEIDAVGRQRGAGMGGGNDEREQTINQLLTEMDGFSGNSGVIVLAATNRPDVLDSALLRPGRFDRQVTVDRPDVAGRVKILQVHSRGKALGKDVDFDKVARRTPGFTGADLQNLMNEAAILAARRELKEISKDEISDALERIIAGPEKKNAVVSEEKKRLVAYHEAGHALVGALMPEYDPVAKISIIPRGQAGGLTFFAPSEERLESGLYSRSYLENQMAVALGGRVAEEVIFGDENVTTGASNDFMQVSRVARQMIERFGFSKKIGQVAVGGPGGNPFMGQQMSSQKDYSMATADIVDAEVRELVEKAYKRATEIITTHIDILHKLAQLLIEKETVDGEEFMSLFIDGQAELYIS

SEQ ID NO: 45525 - protein, 531 aa, Arabidopsis thaliana
  peptide (1)..(531): Ceres Seq. ID no. 13647181
MNGVDISVSEGESSGNDLFTVIGNLIFPLLAFGGLFLLFRRAQGGPGGGPGGLGGPMDFGRSKSKFQEVPETGVSFADVAGADQAKLELQEVVDFLKNPDKYTALGAKIPKGCLLVGPPGTGKTLLARAVAGEAGVPFFSCAASEFVELFVGVGASRVRDLFEKAKSKAPCIVFIDEIDAVGRQRGAGMGGGNDEREQTINQLLTEMDGFSGNSGVIVLAATNRPDVLDSALLRPGRFDRQVTVDRPDVAGRVKILQVHSRGKALGKDVDFDKVARRTPGFTGADLQNLMNEAAILAARRELKEISKDEISDALERIIAGPEKKNAVVSEEKKRLVAYHEAGHALVGALMPEYDPVAKISIIPRGQAGGLTFFAPSEERLESGLYSRSYLENQMAVALGGRVAEEVIFGDENVTTGASNDFMQVSRVARQMIERFGFSKKIGQVAVGGPGGNPFMGQQMSSQKDYSMATADIVDAEVRELVEKAYKRATEIITTHIDILHKLAQLLIEKETVDGEEFMSLFIDGQAELYIS

SEQ ID NO: 45526 - protein, 475 aa, Arabidopsis thaliana
  peptide (1)..(475): Ceres Seq. ID no. 13647182
MDFGRSKSKFQEVPETGVSFADVAGADQAKLELQEVVDFLKNPDKYTALGAKIPKGCLLVGPPGTGKTLLARAVAGEAGVPFFSCAASEFVELFVGVGASRVRDLFEKAKSKAPCIVFIDEIDAVGRQRGAGMGGGNDEREQTINQLLTEMDGFSGNSGVIVLAATNRPDVLDSALLRPGRFDRQVTVDRPDVAGRVKILQVHSRGKALGKDVDFDKVARRTPGFTGADLQNLMNEAAILAARRELKEISKDEISDALERIIAGPEKKNAVVSEEKKRLVAYHEAGHALVGALMPEYDPVAKISIIPRGQAGGLTFFAPSEERLESGLYSRSYLENQMAVALGGRVAEEVIFGDENVTTGASNDFMQVSRVARQMIERFGFSKKIGQVAVGGPGGNPFMGQQMSSQKDYSMATADIVDAEVRELVEKAYKRATEIITTHIDILHKLAQLLIEKETVDGEEFMSLFIDGQAELYIS

SEQ ID NO: 45527 - DNA, 3366 bp, Arabidopsis thaliana
  misc_feature (1)..(3366): Ceres Seq. ID no. 13575701
  misc_feature (1)..(3366): Ortholog of  Ceres SEQ ID NO 13584744 as cited in SEQ ID NO 69137
acctccactggctttgaagctgttcctctctcacataaaaaaagcaaacacttaacgaggaagaaacacactcatatctctctcacgttccccaaatttttgatttttattatctttttgggtttggntaaaccatttatgggtctttagatctctcttgatagtaaagataagtaattttagggtctgtttggttctgtttctggaaatttcacttttttcacttttttgggatcacatttagctttttttggttcctttattttgtaacgccatttatgcgttaaacttgtgtgaagtgtttgtttggtctgagctggagatggtgagaatctcactgcttttgttgtgtttactggtttcaacttgtctcttcacttcttcatcagcacaagctccaggttttgtgagcttggattgtggaggtgcagagccattcactgatgaacttggactcaaatggtcacctgataatcatctcatttatggagaaaccgctaatatatcgtccgttaacgaaacaagaactcagtacacgactttaaggcatttccctgctgattcaagaaagtattgctacactctcaatgtcacgagtaggaatagatatctcattagagctactttcttgtatggtaatttcgacaacagcaacaatgtgtatcccaaattcgatatctccctcggggcgactcattgggcgaccattgttatctctgaaacctatataatcgaaactgcagaactggtgtttctggcttcttctcctactgttagtgtttgtttgtcaaatgccacaactggacagccgtttatatctactcttgagctttggcagttgagtggttcgatgtatggttcgatgctatctgaagaccggttttacctgagtgttgcagcacggataaatttcggggctgaaagtgaagcttctgtgaggtacccggatgatccgtatgatagaatatgggaatctgatttgcaaaagaagcctaattatcttgtggatgttgctgctgggactgtgcgagtgtcgactacattgccaatcgaaagcagggtcgatgacagaccgcctcagaaggttatgcagacggctgtggttggaacaaacgggtccttaacttacagaatgaacctagatggcttccctggttttggttgggcattcacatactttgctgaaatcgaggatttggctgaggatgagtcaaggaagtttagattagttctacctgagcagcctgagtatagcaaatcggttgttaacatcaaggaaaatacacagagaccgtatcgcgtttatgcacctggctatcctaacataacacttccatttgtgctaaactttcgatttgccaaaacggctgattcttctaggggacctattctgaatgccatggagatcagcaaatatttgcggaaaagcgatggttcagtagatgcaactgttatggctaatgtggcatcgctatattcttccactgaatgggctcaagaaggcggtgacccttgttcaccctcaccgtggtcatgggtgcaatgcaattcggatccacaaccaagggttgttgctatcaagctgtcgagtatgaacttgacgggaaatataccttctgacctggtgaaattgactggtttggttgagttatggcttgatgggaattcttttacgggtccaataccggatttctctcggtgtccaaacctggagataatacacctcgagaacaaccgactaaccggaaagatcccttcctcgttgacgaaactcccaaacctgaaagaactgtacctgcagaacaatgtgttaacaggaacaataccatcagacctggccaaagatgtgatctcaaacttctctgggaaccttaaccttgaaaaaagtggagataaaggcaagaagctcggtgtcatcatcggtgcatcagttggtgcttttgttctgctaattgcaaccatcatttcttgcatcgtcatgtgcaaaagcaagaagaataacaagttgggaaaaacttcggagttaacgaatcgtcccttaccgattcagagagtttcgtctaccttgagtgaagctcatggagacgctgcacattgcttcacactttatgagatcgaggaagccacaaaaaaattcgaaaagagaattgggtcgggaggttttggaatcgtatactatggtaaaacaagggaggggaaagagattgctgtaaaggttcttgcaaataattcatatcagggaaagagagagtttgcaaacgaggttacattactctcaaggatacatcatcggaaccttgtgcagtttcttggttattgccaagaagagggaaaaaacatgcttgtgtatgagttcatgcacaatgggactttgaaggagcatctttatggcgtggtaccacgtgaccggagaatcagttggattaaaaggcttgagatagctgaagatgcagcccgagggatcgagtatcttcacacagggtgtgttccagcaatcatacatagagatctcaagactagtaacatcctacttgacaaacacatgagggcaaaggtttcagatttcggtttgtcgaaattcgcagttgacgggacctcacatgtctccagcattgtccgtggcacagttggatatcttgaccccgagtactatatatcgcagcagttaacagagaagagtgatgtatatagcttcggagtcattcttcttgagctaatgtctggccaagaagccatatcgaatgaaagctttggtgtcaactgccggaacatagtccaatgggctaagatgcatatagacaacggggacatccgagggatcatcgatccagcgctagcggaagatgattacagtctccaatcaatgtggaagattgcggagaaagcgttgctgtgtgtgaaaccgcacgggaacatgagaccttcgatgtccgaggtgcaaaaagatatccaagacgcgattaggatcgagaaggaagcgttggctgcaagaggcggtatatcagacgagttttccaggagctcggctcattcgtcttcgctcaacatgggaatgcttgacctggctggatcacagagttatgtatccattgatgaatcagtattgcagccaacagctcggtagtagattcggctttgtttgtacagatgcattacttgcttgtgtttttgacctttcacattgtctctggtctttagttattagttttgagcttaacactactttttttttctttcttttggactcgaggttacaagaagtgcttcgagtttgtttgtttttcttttattgttttcagactaactcggtgatttatgtgggattgtgatatattatgttttcttttaactgattttcacattttc

SEQ ID NO: 45528 - protein, 933 aa, Arabidopsis thaliana
  peptide (1)..(933): Ceres Seq. ID no. 13575702
MVRISLLLLCLLVSTCLFTSSSAQAPGFVSLDCGGAEPFTDELGLKWSPDNHLIYGETANISSVNETRTQYTTLRHFPADSRKYCYTLNVTSRNRYLIRATFLYGNFDNSNNVYPKFDISLGATHWATIVISETYIIETAELVFLASSPTVSVCLSNATTGQPFISTLELWQLSGSMYGSMLSEDRFYLSVAARINFGAESEASVRYPDDPYDRIWESDLQKKPNYLVDVAAGTVRVSTTLPIESRVDDRPPQKVMQTAVVGTNGSLTYRMNLDGFPGFGWAFTYFAEIEDLAEDESRKFRLVLPEQPEYSKSVVNIKENTQRPYRVYAPGYPNITLPFVLNFRFAKTADSSRGPILNAMEISKYLRKSDGSVDATVMANVASLYSSTEWAQEGGDPCSPSPWSWVQCNSDPQPRVVAIKLSSMNLTGNIPSDLVKLTGLVELWLDGNSFTGPIPDFSRCPNLEIIHLENNRLTGKIPSSLTKLPNLKELYLQNNVLTGTIPSDLAKDVISNFSGNLNLEKSGDKGKKLGVIIGASVGAFVLLIATIISCIVMCKSKKNNKLGKTSELTNRPLPIQRVSSTLSEAHGDAAHCFTLYEIEEATKKFEKRIGSGGFGIVYYGKTREGKEIAVKVLANNSYQGKREFANEVTLLSRIHHRNLVQFLGYCQEEGKNMLVYEFMHNGTLKEHLYGVVPRDRRISWIKRLEIAEDAARGIEYLHTGCVPAIIHRDLKTSNILLDKHMRAKVSDFGLSKFAVDGTSHVSSIVRGTVGYLDPEYYISQQLTEKSDVYSFGVILLELMSGQEAISNESFGVNCRNIVQWAKMHIDNGDIRGIIDPALAEDDYSLQSMWKIAEKALLCVKPHGNMRPSMSEVQKDIQDAIRIEKEALAARGGISDEFSRSSAHSSSLNMGMLDLAGSQSYVSIDESVLQPTAR

SEQ ID NO: 45529 - protein, 757 aa, Arabidopsis thaliana
  peptide (1)..(757): Ceres Seq. ID no. 13575703
MYGSMLSEDRFYLSVAARINFGAESEASVRYPDDPYDRIWESDLQKKPNYLVDVAAGTVRVSTTLPIESRVDDRPPQKVMQTAVVGTNGSLTYRMNLDGFPGFGWAFTYFAEIEDLAEDESRKFRLVLPEQPEYSKSVVNIKENTQRPYRVYAPGYPNITLPFVLNFRFAKTADSSRGPILNAMEISKYLRKSDGSVDATVMANVASLYSSTEWAQEGGDPCSPSPWSWVQCNSDPQPRVVAIKLSSMNLTGNIPSDLVKLTGLVELWLDGNSFTGPIPDFSRCPNLEIIHLENNRLTGKIPSSLTKLPNLKELYLQNNVLTGTIPSDLAKDVISNFSGNLNLEKSGDKGKKLGVIIGASVGAFVLLIATIISCIVMCKSKKNNKLGKTSELTNRPLPIQRVSSTLSEAHGDAAHCFTLYEIEEATKKFEKRIGSGGFGIVYYGKTREGKEIAVKVLANNSYQGKREFANEVTLLSRIHHRNLVQFLGYCQEEGKNMLVYEFMHNGTLKEHLYGVVPRDRRISWIKRLEIAEDAARGIEYLHTGCVPAIIHRDLKTSNILLDKHMRAKVSDFGLSKFAVDGTSHVSSIVRGTVGYLDPEYYISQQLTEKSDVYSFGVILLELMSGQEAISNESFGVNCRNIVQWAKMHIDNGDIRGIIDPALAEDDYSLQSMWKIAEKALLCVKPHGNMRPSMSEVQKDIQDAIRIEKEALAARGGISDEFSRSSAHSSSLNMGMLDLAGSQSYVSIDESVLQPTAR

SEQ ID NO: 45530 - protein, 753 aa, Arabidopsis thaliana
  peptide (1)..(753): Ceres Seq. ID no. 13575704
MLSEDRFYLSVAARINFGAESEASVRYPDDPYDRIWESDLQKKPNYLVDVAAGTVRVSTTLPIESRVDDRPPQKVMQTAVVGTNGSLTYRMNLDGFPGFGWAFTYFAEIEDLAEDESRKFRLVLPEQPEYSKSVVNIKENTQRPYRVYAPGYPNITLPFVLNFRFAKTADSSRGPILNAMEISKYLRKSDGSVDATVMANVASLYSSTEWAQEGGDPCSPSPWSWVQCNSDPQPRVVAIKLSSMNLTGNIPSDLVKLTGLVELWLDGNSFTGPIPDFSRCPNLEIIHLENNRLTGKIPSSLTKLPNLKELYLQNNVLTGTIPSDLAKDVISNFSGNLNLEKSGDKGKKLGVIIGASVGAFVLLIATIISCIVMCKSKKNNKLGKTSELTNRPLPIQRVSSTLSEAHGDAAHCFTLYEIEEATKKFEKRIGSGGFGIVYYGKTREGKEIAVKVLANNSYQGKREFANEVTLLSRIHHRNLVQFLGYCQEEGKNMLVYEFMHNGTLKEHLYGVVPRDRRISWIKRLEIAEDAARGIEYLHTGCVPAIIHRDLKTSNILLDKHMRAKVSDFGLSKFAVDGTSHVSSIVRGTVGYLDPEYYISQQLTEKSDVYSFGVILLELMSGQEAISNESFGVNCRNIVQWAKMHIDNGDIRGIIDPALAEDDYSLQSMWKIAEKALLCVKPHGNMRPSMSEVQKDIQDAIRIEKEALAARGGISDEFSRSSAHSSSLNMGMLDLAGSQSYVSIDESVLQPTAR

SEQ ID NO: 45531 - DNA, 2237 bp, Arabidopsis thaliana
  misc_feature (1)..(2237): Ceres Seq. ID no. 13646494
  misc_feature (1)..(2237): Ortholog of  Ceres SEQ ID NO 13654989 as cited in SEQ ID NO 63117
  misc_feature (1)..(2237): Ortholog of  Ceres SEQ ID NO 13584744 as cited in SEQ ID NO 69137
tttaacgtgggtccttcaatctttttgaaggaccccgccattgtcaatcacctttcaaagggatctttattctttttggttttaggctttttagattattgaattgattttgaatgataatcatgatgaattgttttccgtgtttcacttcacaaaagagcagaaacgctccatgcacgacgaacgagactaacgatgataacgttgaacacaacgaattcagaccacctgttgttgcgacgacgaaacggactgaagaaagagaacctgcagagcaacaaccaccggtgaaaacattcaatttccgggagttagcgacggcgaccaagaatttccggcaagaatgtcttttaggagaaggtggattcggtagggtttacaaaggaactcttcaatctactggccagttggtagctgtaaagcagctagacaagcatggattacatggtaacaagagtttctagctgaagtcttgtcattggctaaacttgaacacccgaatcttgttaagcttataggatactgtgctgatggagatcaacggcttttagtctttgagtatgtctctggaggttcccttcaagaccatctttacgaacaaaagccaggccagaagccgatggattggataacgaggatgaagattgcgtttggtgcagcgcaaggattggattacttgcacgataaagttactccagcggtgatataccgagatttgaaagcttctaacatcttgttagatgctgagttttaccctaagctttgtgattttggtctgcataatctagagccaggaacaggtgatagcttgtttctttcttcccgggttatggatacttatggttattcagcacctgagtacactcgaggggacgatctcactgtcaagtcagatgtttatagcttcggagttgtgttgctcgaactcatcaccggtagaagagctattgacaccactaagcctaatgatgagcaaaatctagttgcttgggcacaaccgatatttaaagacccgaaaagatatccggatatggcagatcctcttttgaggaagaatttctcagagagagggttaaatcaagcagtggcaataacatcaatgtgtctacaagaggaaccaactgctcgtcctttgataagtgatgtaatggttgctcttagcttcctttcaatgtctacagaagatggtattccagccacggttccaatggaatcgttcagggacaaaagtatgtcgattgctctaagcagacacggttcttgttctgtaactccattttgtatttctcggaaagatgtaggcaacaaatccagttcttcatcagactcggaggatgaagaagaagaaaaggaacaacaagcagaaaaagaagaagaatcaacaagtaagaaaagacaagagcaggaagaaaccgcgacagattcagatgatgagtctgattcaaactccgaaaaggatcaagaagaggaacagtctcagttagagaaagccagggagtctagtagctcatcctctgactctggaagtgagagaatatcaattgatgaaacaaacgcaactgctcagagcttgaagataagttacagtaattatagctctgaggaagaagataacgagaagctaagcagtaaaagcagttgtaaatcaaacgaagaaagcactttttcgcggtatgacagcggtagagatcacgatgattcgtcaagaaacacaagcatgcgaatcaatagtcttgctcatgatgataaggaggaagacgaggaggagaatcatgaaacacggagctatagtgatcacgatgattctccaagaaacactagcatgcgaatcaatagtctttctcatgatgatgatgatgaggaagaggaggaggagaatcatgaaactcggcttgagcacattcatagctcgaaatctgaagaccaaagtgtttattcagatgatgatgccggcgaggaaagtggtgagtcgtctttgcataggatcgaagcaaaggaagaagaacatatttcttctgaccatgattaatcttttgcaacgaggaaaaaaatgtttcaacttttcgttttggaacaaaccatttgtcatataagtctaatatacatatcacatttcttttgagaaaatatgaaacttaaacaaaaaaaaaattatgtatatatctttaataccgtatattaggaagaaaatgtttacaaaaaaaaaaaaaaaaaaaactcgagggggggcccggtac

SEQ ID NO: 45532 - protein, 469 aa, Arabidopsis thaliana
  peptide (1)..(469): Ceres Seq. ID no. 13646495
MDWITRMKIAFGAAQGLDYLHDKVTPAVIYRDLKASNILLDAEFYPKLCDFGLHNLEPGTGDSLFLSSRVMDTYGYSAPEYTRGDDLTVKSDVYSFGVVLLELITGRRAIDTTKPNDEQNLVAWAQPIFKDPKRYPDMADPLLRKNFSERGLNQAVAITSMCLQEEPTARPLISDVMVALSFLSMSTEDGIPATVPMESFRDKSMSIALSRHGSCSVTPFCISRKDVGNKSSSSSDSEDEEEEKEQQAEKEEESTSKKRQEQEETATDSDDESDSNSEKDQEEEQSQLEKARESSSSSSDSGSERISIDETNATAQSLKISYSNYSSEEEDNEKLSSKSSCKSNEESTFSRYDSGRDHDDSSRNTSMRINSLAHDDKEEDEEENHETRSYSDHDDSPRNTSMRINSLSHDDDDEEEEEENHETRLEHIHSSKSEDQSVYSDDDAGEESGESSLHRIEAKEEEHISSDHD

SEQ ID NO: 45533 - protein, 463 aa, Arabidopsis thaliana
  peptide (1)..(463): Ceres Seq. ID no. 13646496
MKIAFGAAQGLDYLHDKVTPAVIYRDLKASNILLDAEFYPKLCDFGLHNLEPGTGDSLFLSSRVMDTYGYSAPEYTRGDDLTVKSDVYSFGVVLLELITGRRAIDTTKPNDEQNLVAWAQPIFKDPKRYPDMADPLLRKNFSERGLNQAVAITSMCLQEEPTARPLISDVMVALSFLSMSTEDGIPATVPMESFRDKSMSIALSRHGSCSVTPFCISRKDVGNKSSSSSDSEDEEEEKEQQAEKEEESTSKKRQEQEETATDSDDESDSNSEKDQEEEQSQLEKARESSSSSSDSGSERISIDETNATAQSLKISYSNYSSEEEDNEKLSSKSSCKSNEESTFSRYDSGRDHDDSSRNTSMRINSLAHDDKEEDEEENHETRSYSDHDDSPRNTSMRINSLSHDDDDEEEEEENHETRLEHIHSSKSEDQSVYSDDDAGEESGESSLHRIEAKEEEHISSDHD

SEQ ID NO: 45534 - protein, 399 aa, Arabidopsis thaliana
  peptide (1)..(399): Ceres Seq. ID no. 13646497
MDTYGYSAPEYTRGDDLTVKSDVYSFGVVLLELITGRRAIDTTKPNDEQNLVAWAQPIFKDPKRYPDMADPLLRKNFSERGLNQAVAITSMCLQEEPTARPLISDVMVALSFLSMSTEDGIPATVPMESFRDKSMSIALSRHGSCSVTPFCISRKDVGNKSSSSSDSEDEEEEKEQQAEKEEESTSKKRQEQEETATDSDDESDSNSEKDQEEEQSQLEKARESSSSSSDSGSERISIDETNATAQSLKISYSNYSSEEEDNEKLSSKSSCKSNEESTFSRYDSGRDHDDSSRNTSMRINSLAHDDKEEDEEENHETRSYSDHDDSPRNTSMRINSLSHDDDDEEEEEENHETRLEHIHSSKSEDQSVYSDDDAGEESGESSLHRIEAKEEEHISSDHD

SEQ ID NO: 45535 - DNA, 1850 bp, Arabidopsis thaliana
  misc_feature (1)..(1850): Ceres Seq. ID no. 13576295
  misc_feature (1)..(1850): Ortholog of  Ceres SEQ ID NO 13648575 as cited in SEQ ID NO 20407
actctgaacactctatgactaaaagaaaaaatcattcacctcgataccagaaagaagaaaagtcatcgcttttgggaaatttgatgaacaaagaccaaatcttaaaactcgaattcttctggttcctaaaaagtggctgtcaagaagagtgagacatgcatcaaactctctcttctcctgccatggcgtcaaacctccggaaaccctatttcctcaggtacttaactattcttccccaatcgatgatggtcgaaagctgaaacctttttctgcaaatcgattaaccgacaagaaaatccaacccaacccacccactttgttttgtttggatgataaaaatgtcggaaaagagtttgctttcttcaaaattcctcttttacacgataactgtttcaacgctactcttcattgtctcttctctcgtcttccttcaacgccacgattcttctttcacttcaagtttagttcgcaagctgattcttccaagaacagacatcaagaacgaagaattcggactaatcgatacgaaatgcgatcgagacagagatgtgttgaaggtgtttatgtacgatctaccctctgagtttcactttgggatattgaattggcacaaaaaaggatctgagatttggccaaatgtcaacaacattagtacaatcccatcttatcctggtgggttaaatcgtcaacacagtgtagagtattggctaacacttgatttattagcttcagagacacctgaaatcaagagaccttgtagtagtgcagctattagagtgaagaactctaatgaagctgatatagttttcgtgcctttctttgcttcgttgagttacaatcggaaatcgaagctccgtggaaacgaaacaagcagtgatgatagattgttgcaagaaagattagttgagttcttgaaaagtcaagatgagtggaaaagatttgatgggaaagatcatttgatagtagctcaccatccaaacagtttgctctatgcaagaaactttcttggatcagcaatgtttgttctttcggatttcggaaggtattcgtctgctatcgccaatcttgagaaagatatcattgcgccttacgtgcacgtcgttaagactatctctaacaacgagtcagcttcgtttgagaagcgtcctgtattggcatatttccaaggagctatctatagaaaagatggtggaactattcgtcaagaactgtataaccttctgaaagatgagaaagatgttcactttgcatttggaactgttagaggaaatgggactaaacaaactggtaaaggaatggcttcctcgaagttttgtctcaatatcgcgggtgacactccttcctctaaccgtcttttcgatgccattgtgagccattgtgttccggttataatcagtgatcagattgagcttccatttgaagatactcttgattattcgggtttctccgtgtttgtgcatgcttctgaagctgtaaagaaagagttcttggtgaatattctcagagggataacagaggatcagtggaagaagaagtgggggagattgaaagaggttgctgggtgttttgagtatcgctttccttcgcaagttggagattctgtgaatatgatttggtcagcggtttcgcataagctttcttcacttcagtttgatgttcatagaaagaatcgctaccgtagatctgaaatgtttgatagaaacggttcgagttaagatcatgtatgtgaaatatactacattctctttatgcttcatgtctgttttcttttcttgagttgaaaaagataacagtcaaatccttcaactcaaggtctaagttaatttgacagtacaagtcaagttttcact

SEQ ID NO: 45536 - protein, 461 aa, Arabidopsis thaliana
  peptide (1)..(461): Ceres Seq. ID no. 13576296
MIKMSEKSLLSSKFLFYTITVSTLLFIVSSLVFLQRHDSSFTSSLVRKLILPRTDIKNEEFGLIDTKCDRDRDVLKVFMYDLPSEFHFGILNWHKKGSEIWPNVNNISTIPSYPGGLNRQHSVEYWLTLDLLASETPEIKRPCSSAAIRVKNSNEADIVFVPFFASLSYNRKSKLRGNETSSDDRLLQERLVEFLKSQDEWKRFDGKDHLIVAHHPNSLLYARNFLGSAMFVLSDFGRYSSAIANLEKDIIAPYVHVVKTISNNESASFEKRPVLAYFQGAIYRKDGGTIRQELYNLLKDEKDVHFAFGTVRGNGTKQTGKGMASSKFCLNIAGDTPSSNRLFDAIVSHCVPVIISDQIELPFEDTLDYSGFSVFVHASEAVKKEFLVNILRGITEDQWKKKWGRLKEVAGCFEYRFPSQVGDSVNMIWSAVSHKLSSLQFDVHRKNRYRRSEMFDRNGSS

SEQ ID NO: 45537 - protein, 458 aa, Arabidopsis thaliana
  peptide (1)..(458): Ceres Seq. ID no. 13576297
MSEKSLLSSKFLFYTITVSTLLFIVSSLVFLQRHDSSFTSSLVRKLILPRTDIKNEEFGLIDTKCDRDRDVLKVFMYDLPSEFHFGILNWHKKGSEIWPNVNNISTIPSYPGGLNRQHSVEYWLTLDLLASETPEIKRPCSSAAIRVKNSNEADIVFVPFFASLSYNRKSKLRGNETSSDDRLLQERLVEFLKSQDEWKRFDGKDHLIVAHHPNSLLYARNFLGSAMFVLSDFGRYSSAIANLEKDIIAPYVHVVKTISNNESASFEKRPVLAYFQGAIYRKDGGTIRQELYNLLKDEKDVHFAFGTVRGNGTKQTGKGMASSKFCLNIAGDTPSSNRLFDAIVSHCVPVIISDQIELPFEDTLDYSGFSVFVHASEAVKKEFLVNILRGITEDQWKKKWGRLKEVAGCFEYRFPSQVGDSVNMIWSAVSHKLSSLQFDVHRKNRYRRSEMFDRNGSS

SEQ ID NO: 45538 - protein, 383 aa, Arabidopsis thaliana
  peptide (1)..(383): Ceres Seq. ID no. 13576298
MYDLPSEFHFGILNWHKKGSEIWPNVNNISTIPSYPGGLNRQHSVEYWLTLDLLASETPEIKRPCSSAAIRVKNSNEADIVFVPFFASLSYNRKSKLRGNETSSDDRLLQERLVEFLKSQDEWKRFDGKDHLIVAHHPNSLLYARNFLGSAMFVLSDFGRYSSAIANLEKDIIAPYVHVVKTISNNESASFEKRPVLAYFQGAIYRKDGGTIRQELYNLLKDEKDVHFAFGTVRGNGTKQTGKGMASSKFCLNIAGDTPSSNRLFDAIVSHCVPVIISDQIELPFEDTLDYSGFSVFVHASEAVKKEFLVNILRGITEDQWKKKWGRLKEVAGCFEYRFPSQVGDSVNMIWSAVSHKLSSLQFDVHRKNRYRRSEMFDRNGSS

SEQ ID NO: 45539 - DNA, 1622 bp, Arabidopsis thaliana
  misc_feature (1)..(1622): Ceres Seq. ID no. 13646614
  misc_feature (1)..(1622): Ortholog of  Ceres SEQ ID NO 14307022 as cited in SEQ ID NO 54437
  misc_feature (1)..(1622): Ortholog of  Ceres SEQ ID NO 14301932 as cited in SEQ ID NO 67747
gagctaccgttttctgttcactctgtacaacacacttgtctccttcttcctctcttctcttctctctctccatttcaaaaagggtgaaacttttcttctctttctagaagaagaaaaccagagatacagagagattctctctctaccaaacccctggaaaaatctccagattcatcttccatagaccaaactaaactctgttcactgtactctctgtcattgtcctgtaagagaaattgaaaaccctaggagattttgaatttcgtaaaaccctaaacacaaaaatgaaaatcccagaaaaacccatcttcttaatcttcgtctctttgatcctagcttcgagcttaaccttcacagcgacagcgaaatcaacaatcgagccttgctcaagcaacgacacttgcaacgctttactcggctacacactctacaccgacctcaaagtctcagaagtcgcatctctcttccaagtagacccaatctctatccttttagctaacgccatcgatatctcttacccagacgtcgaaaaccatatccttccttcgaagctcttcctcaaaatcccaatcacttgctcctgcgtcgacggaatcagaaaatctgtctctacccattacaaaacccgaccttctgacaatctaggatcgattgctgactctgtttacggaggcttggtctctgctgagcagatccaggaagctaactcggtgaatgacccgtcgctgcttgatgttgggactagtcttgttatccccttgccttgtgcttgtttcaatggcaccgacaattctttgccggctgtttatttgtcgtatgttgtgaaggagattgatacattggtcggaatcgcgaggaggtattcgactactattactgatttgatgaatgtgaatgctatgggagctcctgatgttagttctggagatattctcgctgttcctttgtcagcttgtgcttcaaagttccccagatacgcttcggatttcggattgattgttccaaatggtagctatgctctagctgcaggtcactgtgtgcaatgcagctgtgcgcttgggagccgcaatttgtattgtgagcctgcttccctagccgtctcttgctcaagtatgcagtgtagaaacagcaacctcatgctcggtaacatcacggtgcagcagactagcgctggctgtaatgttacaacttgtgattacaacggtatagccaacggcactatcttaaccatgctgaccaggtctcttcaacctcgatgtcccggacctcaacaatttgcgccgcttctagctccaccagatactgttcctagggatgtaatgtatgcaccagcaccttcaccagattttgatggtccaggatccatagcatcttcaccaagatcatctatgcttcctggtggtggtatcttgccaggtaatcccgctaatggtccagccggtagcatctcaaccgcctctgcctcctcagttagctacttctttatcacatttctcatctccattgcttctttttcccttgctttgtcatcttgattcaacaacaattgtttattttccgcgcattaaaaactcctatgtgaaattcttgatgagtagaaccaaaacattgttattgatccc

SEQ ID NO: 45540 - protein, 416 aa, Arabidopsis thaliana
  peptide (1)..(416): Ceres Seq. ID no. 15219074
MKIPEKPIFLIFVSLILASSLTFTATAKSTIEPCSSNDTCNALLGYTLYTDLKVSEVASLFQVDPISILLANAIDISYPDVENHILPSKLFLKIPITCSCVDGIRKSVSTHYKTRPSDNLGSIADSVYGGLVSAEQIQEANSVNDPSLLDVGTSLVIPLPCACFNGTDNSLPAVYLSYVVKEIDTLVGIARRYSTTITDLMNVNAMGAPDVSSGDILAVPLSACASKFPRYASDFGLIVPNGSYALAAGHCVQCSCALGSRNLYCEPASLAVSCSSMQCRNSNLMLGNITVQQTSAGCNVTTCDYNGIANGTILTMLTRSLQPRCPGPQQFAPLLAPPDTVPRDVMYAPAPSPDFDGPGSIASSPRSSMLPGGGILPGNPANGPAGSISTASASSVSYFFITFLISIASFSLALSS

SEQ ID NO: 45541 - protein, 216 aa, Arabidopsis thaliana
  peptide (1)..(216): Ceres Seq. ID no. 15219075
MNVNAMGAPDVSSGDILAVPLSACASKFPRYASDFGLIVPNGSYALAAGHCVQCSCALGSRNLYCEPASLAVSCSSMQCRNSNLMLGNITVQQTSAGCNVTTCDYNGIANGTILTMLTRSLQPRCPGPQQFAPLLAPPDTVPRDVMYAPAPSPDFDGPGSIASSPRSSMLPGGGILPGNPANGPAGSISTASASSVSYFFITFLISIASFSLALSS

SEQ ID NO: 45542 - protein, 211 aa, Arabidopsis thaliana
  peptide (1)..(211): Ceres Seq. ID no. 15219076
MGAPDVSSGDILAVPLSACASKFPRYASDFGLIVPNGSYALAAGHCVQCSCALGSRNLYCEPASLAVSCSSMQCRNSNLMLGNITVQQTSAGCNVTTCDYNGIANGTILTMLTRSLQPRCPGPQQFAPLLAPPDTVPRDVMYAPAPSPDFDGPGSIASSPRSSMLPGGGILPGNPANGPAGSISTASASSVSYFFITFLISIASFSLALSS

SEQ ID NO: 45543 - DNA, 1324 bp, Arabidopsis thaliana; identical to SEQ ID NO: 23955
  misc_feature (1)..(1324): Ceres Seq. ID no. 13591589
  misc_feature (1)..(1324): Ortholog of  Ceres SEQ ID NO 15179641 as cited in SEQ ID NO 56414
  misc_feature (1)..(1324): Ortholog of  Ceres SEQ ID NO 14316049 as cited in SEQ ID NO 67036
  misc_feature (1)..(1324): Ortholog of  Ceres SEQ ID NO 14313252 as cited in SEQ ID NO 67134
  misc_feature (1)..(1324): Ortholog of  Ceres SEQ ID NO 14302220 as cited in SEQ ID NO 69121

SEQ ID NO: 45544 - protein, 364 aa, Arabidopsis thaliana; identical to SEQ ID NO: 23956
  peptide (1)..(364): Ceres Seq. ID no. 13591590

SEQ ID NO: 45545 - protein, 338 aa, Arabidopsis thaliana; identical to SEQ ID NO: 23957
  peptide (1)..(338): Ceres Seq. ID no. 13591591

SEQ ID NO: 45546 - protein, 294 aa, Arabidopsis thaliana; identical to SEQ ID NO: 23958
  peptide (1)..(294): Ceres Seq. ID no. 13591592

SEQ ID NO: 45547 - DNA, 1324 bp, Arabidopsis thaliana; identical to SEQ ID NO: 23955
  misc_feature (1)..(1324): Ceres Seq. ID no. 13591589
  misc_feature (1)..(1324): Ortholog of  Ceres SEQ ID NO 15179641 as cited in SEQ ID NO 56414
  misc_feature (1)..(1324): Ortholog of  Ceres SEQ ID NO 14316049 as cited in SEQ ID NO 67036
  misc_feature (1)..(1324): Ortholog of  Ceres SEQ ID NO 14313252 as cited in SEQ ID NO 67134
  misc_feature (1)..(1324): Ortholog of  Ceres SEQ ID NO 14302220 as cited in SEQ ID NO 69121

SEQ ID NO: 45548 - protein, 364 aa, Arabidopsis thaliana; identical to SEQ ID NO: 23956
  peptide (1)..(364): Ceres Seq. ID no. 13591590

SEQ ID NO: 45549 - protein, 338 aa, Arabidopsis thaliana; identical to SEQ ID NO: 23957
  peptide (1)..(338): Ceres Seq. ID no. 13591591

SEQ ID NO: 45550 - protein, 294 aa, Arabidopsis thaliana; identical to SEQ ID NO: 23958
  peptide (1)..(294): Ceres Seq. ID no. 13591592

SEQ ID NO: 45551 - DNA, 2490 bp, Arabidopsis thaliana
  misc_feature (1)..(2490): Ceres Seq. ID no. 13646671
  misc_feature (1)..(2490): Ortholog of  Ceres SEQ ID NO 14315774 as cited in SEQ ID NO 20630
cccccccccccccgaggaaataattaagagcgtcatttttggtatcccgcgcaactttttcttctcagtttcagtttctctacatcgattcatcgattccactctcttgattgctgtttagatcaatccgtctcgaacccaggggttagtatatagtggatcaaactgatccgacccgacccgacccgaattattaatgtcggaagttaatgagatgagtggtggttctattggcggcgaattgttgagagcgtcgccgaaggttttaacggccggtgatcggaaattactcaaggtggagcttcggccaggggatacgacgtatgtttcgtggaagaagcttatgagggatgctggtaaggtcaatggtttatcggcttcggttcccgacccgcctcctaatgctaaccctaaccttgagtttcgaattgcaccggggcatccagtagagattgaaacgaatgaacaacctcattctaacagtttcaacgctgttattgagaagatagagaggctctataaggggaacgatagaagtgatggggaagagttagacggtgctcctgatgatgatgagtatgacactgaagattcatttatagatgatgctgaactggatgagtatttcgaagttgataattcaacagttaaacatgatggattttatgtaaatagaggcaagttggagcggatggaaccttcaacaacatctaaccagcaacccaaaaaacggcgacgaaaagattcagcaaaaccctgtcgtgatgcagttgacgtatccgataaacacaccaagttgtctataacagctaggaaaaaggatcaatcaactgctcctgggtcctggaaaacacaggagtcacctttgccttctggagcgcaagatgcaaatacttcagtacctctggatgatgtgaagcattctgatagagcaaatcatcagtctaggaatgatacaagtcacaagtcaagggaaactggatcctctagtgcccttcatcagaaatacagcaacaaaagcttacaccaacaatctacgtccctgctaggaaaatctccccccaatgtctttgcagaggtaacagtagtccgtcagaaagaaaacaatggtatgcatcagctggcaaatgtaacgggaagcagacaatctagtcaagcgtctaaaaaagatggttctaatgtgaagtctaaaacctcaatcctcgagaaagccataagggaactggagaaggtggttgtggaatcaaggcctcctgctatcactgaaaatcaagaagctgatacctcatcccaggcagtgaagagaagattgcccagggatgttaaattgaaacttgctaaagttgctaggattgcgcaggcaagccagggaaaacattcaacagagttaatcaaccgtcttatgagcattgttggtcacctaatccagcttaggtctcttaagaggaacttgaaaatcatgattgatatgggagattctgcaacccgagaaaaggatactaggttcaagcaaatcaacaatgaagttcttgatatgataaaggccaaagtttctttgatggaatcacaggcaatcaaaccagaaggtgcaacatcagacgattttcaggactcagtagaaaagccatctttgaagaagtttgtcatggatgcggcattggaggataaattgtgtgacctatatgacatatttatcgacggattggatgaagatcaaggtccacaaacaaaaaagctatatgtcaatttggctgaactctggccaaatagattgatggattatcgtgggatcaaacatgcaattttccgggcaaaggagagacgaaaagcattgtatggaaaccttgcgaaagagatggatcaaacaaagatgaagaagagtatgaagcagttggtaccaagaacagactgtactgctcagcccaacaccgaattagtggttcagagacaacacagtggggaaaaaaaattgattgttgatccaaatgcaaccagcacttccgtggtcactagtcaaactatggttgacagatcaaatcagcagcagcctgagaagctaaagggaatctcaagctcttgcaatcctacagaggaaacaagagtggtcaagagaaagaacgaggctgtaatggctgagaaacaagtcgttcttgccctgaagaagcccgaacatccacagacacgtgtaatcccagctcctcagaatctgaacatcccacgaacaaccccggacctgaacttgccaagttgacatcacgattgacaaaggagctcttagaaacgccggagacaataacctctggcctcttccttccttgtattttgaggtggcacggcattagtcctggcgatgccgatgcttggtttttttagctacaaagcatggtttataaagttgtctgtattccagtttggctcttattaagttagttactctatttacgtgtcctttttcaaaactctaatgtataaagttatgattttacggac

SEQ ID NO: 45552 - protein, 684 aa, Arabidopsis thaliana
  peptide (1)..(684): Ceres Seq. ID no. 13646672
MSEVNEMSGGSIGGELLRASPKVLTAGDRKLLKVELRPGDTTYVSWKKLMRDAGKVNGLSASVPDPPPNANPNLEFRIAPGHPVEIETNEQPHSNSFNAVIEKIERLYKGNDRSDGEELDGAPDDDEYDTEDSFIDDAELDEYFEVDNSTVKHDGFYVNRGKLERMEPSTTSNQQPKKRRRKDSAKPCRDAVDVSDKHTKLSITARKKDQSTAPGSWKTQESPLPSGAQDANTSVPLDDVKHSDRANHQSRNDTSHKSRETGSSSALHQKYSNKSLHQQSTSLLGKSPPNVFAEVTVVRQKENNGMHQLANVTGSRQSSQASKKDGSNVKSKTSILEKAIRELEKVVVESRPPAITENQEADTSSQAVKRRLPRDVKLKLAKVARIAQASQGKHSTELINRLMSIVGHLIQLRSLKRNLKIMIDMGDSATREKDTRFKQINNEVLDMIKAKVSLMESQAIKPEGATSDDFQDSVEKPSLKKFVMDAALEDKLCDLYDIFIDGLDEDQGPQTKKLYVNLAELWPNRLMDYRGIKHAIFRAKERRKALYGNLAKEMDQTKMKKSMKQLVPRTDCTAQPNTELVVQRQHSGEKKLIVDPNATSTSVVTSQTMVDRSNQQQPEKLKGISSSCNPTEETRVVKRKNEAVMAEKQVVLALKKPEHPQTRVIPAPQNLNIPRTTPDLNLPS

SEQ ID NO: 45553 - protein, 678 aa, Arabidopsis thaliana
  peptide (1)..(678): Ceres Seq. ID no. 13646673
MSGGSIGGELLRASPKVLTAGDRKLLKVELRPGDTTYVSWKKLMRDAGKVNGLSASVPDPPPNANPNLEFRIAPGHPVEIETNEQPHSNSFNAVIEKIERLYKGNDRSDGEELDGAPDDDEYDTEDSFIDDAELDEYFEVDNSTVKHDGFYVNRGKLERMEPSTTSNQQPKKRRRKDSAKPCRDAVDVSDKHTKLSITARKKDQSTAPGSWKTQESPLPSGAQDANTSVPLDDVKHSDRANHQSRNDTSHKSRETGSSSALHQKYSNKSLHQQSTSLLGKSPPNVFAEVTVVRQKENNGMHQLANVTGSRQSSQASKKDGSNVKSKTSILEKAIRELEKVVVESRPPAITENQEADTSSQAVKRRLPRDVKLKLAKVARIAQASQGKHSTELINRLMSIVGHLIQLRSLKRNLKIMIDMGDSATREKDTRFKQINNEVLDMIKAKVSLMESQAIKPEGATSDDFQDSVEKPSLKKFVMDAALEDKLCDLYDIFIDGLDEDQGPQTKKLYVNLAELWPNRLMDYRGIKHAIFRAKERRKALYGNLAKEMDQTKMKKSMKQLVPRTDCTAQPNTELVVQRQHSGEKKLIVDPNATSTSVVTSQTMVDRSNQQQPEKLKGISSSCNPTEETRVVKRKNEAVMAEKQVVLALKKPEHPQTRVIPAPQNLNIPRTTPDLNLPS

SEQ ID NO: 45554 - protein, 635 aa, Arabidopsis thaliana
  peptide (1)..(635): Ceres Seq. ID no. 13646674
MRDAGKVNGLSASVPDPPPNANPNLEFRIAPGHPVEIETNEQPHSNSFNAVIEKIERLYKGNDRSDGEELDGAPDDDEYDTEDSFIDDAELDEYFEVDNSTVKHDGFYVNRGKLERMEPSTTSNQQPKKRRRKDSAKPCRDAVDVSDKHTKLSITARKKDQSTAPGSWKTQESPLPSGAQDANTSVPLDDVKHSDRANHQSRNDTSHKSRETGSSSALHQKYSNKSLHQQSTSLLGKSPPNVFAEVTVVRQKENNGMHQLANVTGSRQSSQASKKDGSNVKSKTSILEKAIRELEKVVVESRPPAITENQEADTSSQAVKRRLPRDVKLKLAKVARIAQASQGKHSTELINRLMSIVGHLIQLRSLKRNLKIMIDMGDSATREKDTRFKQINNEVLDMIKAKVSLMESQAIKPEGATSDDFQDSVEKPSLKKFVMDAALEDKLCDLYDIFIDGLDEDQGPQTKKLYVNLAELWPNRLMDYRGIKHAIFRAKERRKALYGNLAKEMDQTKMKKSMKQLVPRTDCTAQPNTELVVQRQHSGEKKLIVDPNATSTSVVTSQTMVDRSNQQQPEKLKGISSSCNPTEETRVVKRKNEAVMAEKQVVLALKKPEHPQTRVIPAPQNLNIPRTTPDLNLPS

SEQ ID NO: 45555 - DNA, 1969 bp, Arabidopsis thaliana
  misc_feature (1)..(1969): Ceres Seq. ID no. 13646675
  misc_feature (1)..(1969): Ortholog of  Ceres SEQ ID NO 13660790 as cited in SEQ ID NO 67460
ggcgaaaccaaacctaacagcatttttctccaattccttcttcttcttcttcttcttctgtaacctcgtcttcttcagcttatactcatagctataccaaagaaaacctcttaaaacccttcttctctcgatccatcgatcagcaacaattcacttctaatcgatcaagagctttccgatatcgtcgatcccaattaacatggcttccaacggcgcttctccgagaattgttgatgctactgagaacagcttggataagatcaagcgacaattggcatctggctctggtcggaacttgctacaaggacctcttttcaagcgatctgaaactctgagaaaatggaacgaacgatgggtgatacttgatccaacaacagggaaaatggagtataagacgaggcgaaatgagccaactatcaagggaacaattttgtttgacgaaaatagcacaatctccatctctcctgtcaacttccaggggcttccaaaatataatggttgctgtatttatattggtaccccacagaagaaagattactttttgtgtgcagagactcctggtgcagctaaagcttgggtcacaaccttacatgcgacacagctagttctaaaggcccataaggaggctgtcgaatctctaagtggaagtggttctgcaacacttggtaccgttgcaaccgttgttgccgctgccaattcaacagcattggaatgttccagagaaattcaagcagcaatgcagatctctttgaggaatgcattgaaaataacgccaaataaaccgattgatggaccactagatgatttgacaataatgaaggaaactctgcgtgtcaaagatgaagaattacataatttagccagggaacttcgttctcgtgactcaatgataaaggaaatagcagataagctatctgagactgctgaagcagctgtagctgcagcatctgctgctcatacaatggatgaacaaaggaaaatcgtttgtgtggaatttgagcgcttgactacagactcacagagacagcaagaagccacaaaattaaagctcaaggaattggaagagaagacctttactttgagtaaggaaaaagatcaattggttaaggaaagagacgctgctctccaagaggcacatatgtggcggtctgagcttgggaaagccagagagcgtgttgtcatacttgaaggagctgttgtgagggccgaagagaaagtgagggttgcagaagcaagcggtgaagcaaaatcaaaagaggcttctcagagagaagcaactgcttggacagagaagcaagagcttttagcatatgtgaatatgttacaaactcagcttcaaaggcagcaactagagacaaagcaagtgtgtgaggagaagactgagtctactaacggcgaagcttctcttccaatgacaaaggaaacagaaaagaatgtggataaagcatgtctgagcatttcaagaacagcctctataccgggagagaatgtagtccatatgagtgaagagcaggtagtaaacgctcagcctccggtgggagaaaacgaatggaatgatattcaggcaacagaggcaagagtttctgatgtaagagaaatatctgcagagactgaacgggacagaagaaacagcttggatatcccggtagtgtctcctgaacctaacgttccacgcaatgatccgccttccgaatcatttcatcaccagccttgaataaagattggtagatcttcgtacattttaatatactctttgatggtctggtaatgtttggagagttgattcttctaacaacaaaaagaatttgtctttttagttttcttgtacattcaagagttgttatgtatctgccgctcttgaatttgtctgactagggaatgattctttttcccttttatcacaacatgaagaacagagagatatgtgttaaactctgatttaggaaacaaatgagttacaagagagact

SEQ ID NO: 45556 - protein, 504 aa, Arabidopsis thaliana
  peptide (1)..(504): Ceres Seq. ID no. 15219083
MASNGASPRIVDATENSLDKIKRQLASGSGRNLLQGPLFKRSETLRKWNERWVILDPTTGKMEYKTRRNEPTIKGTILFDENSTISISPVNFQGLPKYNGCCIYIGTPQKKDYFLCAETPGAAKAWVTTLHATQLVLKAHKEAVESLSGSGSATLGTVATVVAAANSTALECSREIQAAMQISLRNALKITPNKPIDGPLDDLTIMKETLRVKDEELHNLARELRSRDSMIKEIADKLSETAEAAVAAASAAHTMDEQRKIVCVEFERLTTDSQRQQEATKLKLKELEEKTFTLSKEKDQLVKERDAALQEAHMWRSELGKARERVVILEGAVVRAEEKVRVAEASGEAKSKEASQREATAWTEKQELLAYVNMLQTQLQRQQLETKQVCEEKTESTNGEASLPMTKETEKNVDKACLSISRTASIPGENVVHMSEEQVVNAQPPVGENEWNDIQATEARVSDVREISAETERDRRNSLDIPVVSPEPNVPRNDPPSESFHHQP

SEQ ID NO: 45557 - protein, 443 aa, Arabidopsis thaliana
  peptide (1)..(443): Ceres Seq. ID no. 15219084
MEYKTRRNEPTIKGTILFDENSTISISPVNFQGLPKYNGCCIYIGTPQKKDYFLCAETPGAAKAWVTTLHATQLVLKAHKEAVESLSGSGSATLGTVATVVAAANSTALECSREIQAAMQISLRNALKITPNKPIDGPLDDLTIMKETLRVKDEELHNLARELRSRDSMIKEIADKLSETAEAAVAAASAAHTMDEQRKIVCVEFERLTTDSQRQQEATKLKLKELEEKTFTLSKEKDQLVKERDAALQEAHMWRSELGKARERVVILEGAVVRAEEKVRVAEASGEAKSKEASQREATAWTEKQELLAYVNMLQTQLQRQQLETKQVCEEKTESTNGEASLPMTKETEKNVDKACLSISRTASIPGENVVHMSEEQVVNAQPPVGENEWNDIQATEARVSDVREISAETERDRRNSLDIPVVSPEPNVPRNDPPSESFHHQP

SEQ ID NO: 45558 - protein, 325 aa, Arabidopsis thaliana
  peptide (1)..(325): Ceres Seq. ID no. 15219085
MQISLRNALKITPNKPIDGPLDDLTIMKETLRVKDEELHNLARELRSRDSMIKEIADKLSETAEAAVAAASAAHTMDEQRKIVCVEFERLTTDSQRQQEATKLKLKELEEKTFTLSKEKDQLVKERDAALQEAHMWRSELGKARERVVILEGAVVRAEEKVRVAEASGEAKSKEASQREATAWTEKQELLAYVNMLQTQLQRQQLETKQVCEEKTESTNGEASLPMTKETEKNVDKACLSISRTASIPGENVVHMSEEQVVNAQPPVGENEWNDIQATEARVSDVREISAETERDRRNSLDIPVVSPEPNVPRNDPPSESFHHQP

SEQ ID NO: 45559 - DNA, 865 bp, Arabidopsis thaliana; identical to SEQ ID NO: 35741
  misc_feature (1)..(865): Ceres Seq. ID no. 12559367
  misc_feature (1)..(865): Ortholog of  Ceres SEQ ID NO 14316176 as cited in SEQ ID NO 57814
  misc_feature (1)..(865): Ortholog of  Ceres SEQ ID NO 13660037 as cited in SEQ ID NO 66990

SEQ ID NO: 45560 - protein, 160 aa, Arabidopsis thaliana; identical to SEQ ID NO: 35742
  peptide (1)..(160): Ceres Seq. ID no. 12559368

SEQ ID NO: 45561 - protein, 121 aa, Arabidopsis thaliana; identical to SEQ ID NO: 35743
  peptide (1)..(121): Ceres Seq. ID no. 12559369

SEQ ID NO: 45562 - protein, 98 aa, Arabidopsis thaliana; identical to SEQ ID NO: 35744
  peptide (1)..(98): Ceres Seq. ID no. 12559370

SEQ ID NO: 45563 - DNA, 1541 bp, Arabidopsis thaliana; identical to SEQ ID NO: 40725
  misc_feature (1)..(1541): Ceres Seq. ID no. 12600340
  misc_feature (1)..(1541): Ortholog of  Ceres SEQ ID NO 14311870 as cited in SEQ ID NO 51574
  misc_feature (1)..(1541): Ortholog of  Ceres SEQ ID NO 15174583 as cited in SEQ ID NO 53693
  misc_feature (1)..(1541): Ortholog of  Ceres SEQ ID NO 13581563 as cited in SEQ ID NO 58942
  misc_feature (1)..(1541): Ortholog of  Ceres SEQ ID NO 13658707 as cited in SEQ ID NO 66286
  misc_feature (1)..(1541): Ortholog of  Ceres SEQ ID NO 13654528 as cited in SEQ ID NO 68080

SEQ ID NO: 45564 - protein, 444 aa, Arabidopsis thaliana; identical to SEQ ID NO: 40726
  peptide (1)..(444): Ceres Seq. ID no. 12600341

SEQ ID NO: 45565 - protein, 349 aa, Arabidopsis thaliana; identical to SEQ ID NO: 40727
  peptide (1)..(349): Ceres Seq. ID no. 12600342

SEQ ID NO: 45566 - protein, 309 aa, Arabidopsis thaliana; identical to SEQ ID NO: 40728
  peptide (1)..(309): Ceres Seq. ID no. 12600343

SEQ ID NO: 45567 - DNA, 1250 bp, Arabidopsis thaliana
  misc_feature (1)..(1250): Ceres Seq. ID no. 13646676
  misc_feature (1)..(1250): Ortholog of  Ceres SEQ ID NO 14310291 as cited in SEQ ID NO 20682
  misc_feature (1)..(1250): Ortholog of  Ceres SEQ ID NO 14311256 as cited in SEQ ID NO 59050
  misc_feature (1)..(1250): Ortholog of  Ceres SEQ ID NO 13656079 as cited in SEQ ID NO 64220
ccgggaagtttctctgatcgccatttccacgtcgtactaagcttctctttcgccatccgttttaggcaacgaagacgaagatcatgaaagggattacgaggcttctcaattctctttcgcgacatacagcttccgtaacttgttctccatcttcttcttctcttctgatatcacgtcgctctctgtttatctcggcggcgacacactttccggtgaatttctcggagtcgataacaactaatgcttctcgtaactgttcgagatcttcttcatttcccttcaattggatcgagcaaaggaggacaatgtttatccagacacaatcaacaccaaacccttcttctctaatgtttagtcctggtaaaccagttatggagattggaagtgctgatttccctaattctcgttctgctatgagttcacctttagctaaagccattttcgccattgatggtgtagttcgagttttctatgggtcagattttgttactgtaacaaagtcagatgatgtaacatgggatatactcaagcctgatatctttgcagtggtaatggacttttactcttctggtcagcctttgtttctcgactcacaagctacagctgccaaggataccgctattcatgaggatgactctgaaactgtagcaatgattaaggaactcttggagacgcgtatccgaccatcagttcaagatgatggaggggacatcgagtattgtggatttgatacggaaactggtatagttaagcttagaatgcaaggagcttgtagcggctgtccaagctcatctgttactttgaaatccggaattgagaatatgcttatgcattatgtatccgaggtcaaaggtgttgagcaagaattcgatggtgaagaggagggaacatcttctggtccaatggagtagagtaacagaaatgcatcacaaaaaaacttgagatttgttgctgctcttcaatatacagaagaagaataaactagaggtacattagttttgtcttctcctgaacctggcagcctcagaaaactatagactactggaaaacatggagttgtctcatataacccaataattgaaatttttacggttatatacttatatggcttctagtgagcgttcacaagtgtagctgaaagggtaaagatttgttgcacaaagttaagtagaagtttttgctgatttgaagttatataaggtttgtgatcaaaaaaaaaaaaaaaaaaaactcgagggggggcccggtac

SEQ ID NO: 45568 - protein, 275 aa, Arabidopsis thaliana
  peptide (1)..(275): Ceres Seq. ID no. 13646677
MKGITRLLNSLSRHTASVTCSPSSSSLLISRRSLFISAATHFPVNFSESITTNASRNCSRSSSFPFNWIEQRRTMFIQTQSTPNPSSLMFSPGKPVMEIGSADFPNSRSAMSSPLAKAIFAIDGVVRVFYGSDFVTVTKSDDVTWDILKPDIFAVVMDFYSSGQPLFLDSQATAAKDTAIHEDDSETVAMIKELLETRIRPSVQDDGGDIEYCGFDTETGIVKLRMQGACSGCPSSSVTLKSGIENMLMHYVSEVKGVEQEFDGEEEGTSSGPME

SEQ ID NO: 45569 - protein, 201 aa, Arabidopsis thaliana
  peptide (1)..(201): Ceres Seq. ID no. 13646678
MFIQTQSTPNPSSLMFSPGKPVMEIGSADFPNSRSAMSSPLAKAIFAIDGVVRVFYGSDFVTVTKSDDVTWDILKPDIFAVVMDFYSSGQPLFLDSQATAAKDTAIHEDDSETVAMIKELLETRIRPSVQDDGGDIEYCGFDTETGIVKLRMQGACSGCPSSSVTLKSGIENMLMHYVSEVKGVEQEFDGEEEGTSSGPME

SEQ ID NO: 45570 - protein, 187 aa, Arabidopsis thaliana
  peptide (1)..(187): Ceres Seq. ID no. 13646679
MFSPGKPVMEIGSADFPNSRSAMSSPLAKAIFAIDGVVRVFYGSDFVTVTKSDDVTWDILKPDIFAVVMDFYSSGQPLFLDSQATAAKDTAIHEDDSETVAMIKELLETRIRPSVQDDGGDIEYCGFDTETGIVKLRMQGACSGCPSSSVTLKSGIENMLMHYVSEVKGVEQEFDGEEEGTSSGPME

SEQ ID NO: 45571 - DNA, 1050 bp, Arabidopsis thaliana; identical to SEQ ID NO: 24257
  misc_feature (1)..(1050): Ceres Seq. ID no. 13591665
  misc_feature (1)..(1050): Ortholog of  Ceres SEQ ID NO 15176208 as cited in SEQ ID NO 55594
  misc_feature (1)..(1050): Ortholog of  Ceres SEQ ID NO 14312330 as cited in SEQ ID NO 58581

SEQ ID NO: 45572 - protein, 284 aa, Arabidopsis thaliana; identical to SEQ ID NO: 24258
  peptide (1)..(284): Ceres Seq. ID no. 13591666

SEQ ID NO: 45573 - protein, 260 aa, Arabidopsis thaliana; identical to SEQ ID NO: 24259
  peptide (1)..(260): Ceres Seq. ID no. 13591667

SEQ ID NO: 45574 - protein, 172 aa, Arabidopsis thaliana; identical to SEQ ID NO: 24260
  peptide (1)..(172): Ceres Seq. ID no. 13591668

SEQ ID NO: 45575 - DNA, 1663 bp, Arabidopsis thaliana; identical to SEQ ID NO: 30264
  misc_feature (1)..(1663): Ceres Seq. ID no. 13591657
  misc_feature (1)..(1663): Ortholog of  Ceres SEQ ID NO 15179007 as cited in SEQ ID NO 1038
  misc_feature (1)..(1663): Ortholog of  Ceres SEQ ID NO 15226449 as cited in SEQ ID NO 58879
  misc_feature (1)..(1663): Ortholog of  Ceres SEQ ID NO 13597146 as cited in SEQ ID NO 63311

SEQ ID NO: 45576 - protein, 476 aa, Arabidopsis thaliana; identical to SEQ ID NO: 30265
  peptide (1)..(476): Ceres Seq. ID no. 13591658

SEQ ID NO: 45577 - protein, 391 aa, Arabidopsis thaliana; identical to SEQ ID NO: 30266
  peptide (1)..(391): Ceres Seq. ID no. 13591659

SEQ ID NO: 45578 - protein, 327 aa, Arabidopsis thaliana; identical to SEQ ID NO: 30267
  peptide (1)..(327): Ceres Seq. ID no. 13591660

SEQ ID NO: 45579 - DNA, 2110 bp, Arabidopsis thaliana
  misc_feature (1)..(2110): Ceres Seq. ID no. 13646533
  misc_feature (1)..(2110): Ortholog of  Ceres SEQ ID NO 13654290 as cited in SEQ ID NO 62197
  misc_feature (1)..(2110): Ortholog of  Ceres SEQ ID NO 14301924 as cited in SEQ ID NO 67731
gggtctcattttcctctggcctatataaatccactatcctccacttctgtctttcatcatcattccacataaacaaaatatcttcttgctcattattcatcatcaatctactactccgtaaactttgcttcctctgtttgtattagctcagaagagatatgggaagtactccgactgatttacccggtgaggatgtcgccgataacagatccggcgtcggcggtggtatttctgacgtctacggtgaggattccgccaccttggaccagcttgtcaccccttgggttacctctgtcgctagtggctacacattgatgcgtgatccgagatacaacaagggacttgcgtttactgataaagaaagagatgctcattacttaactggtcttcttccccctgtgattttgagtcaggatgttcaggagaggaaggtgatgcacaatctccgtcagtacactgttcctctgcagcgttacatggccctgatggatcttcaggaaaggaacgagaggttgttctacaagcttttgattgataacgttgaggagttgcttccagttgtgtacacaccaacagttggtgaggcttgccagaagtatgggagcattttcaggaagccacagggtctctacatcagtttgaacgagaagggcaagattcttgaagttttgaagaactggccccagagaggaatccaagttattgttgttactgatggtgagcggattctcggtctgggagatcttggttgccagggaatgggaattccagtggggaaactttctctttacaccgctttgggaggaatccgtccatcagcttgtcttccaatcaccattgatgtgggtacaaacaatgagaagttgctaaatgatgaattctacatcggtcttaaacagcgaagagcaactggccaggaatatgctgaattcctgcacgaattcatgtgcgctgtaaagcagaactatggagagaaagtgttggttcagtttgaagattttgcaaaccacaatgcgtttgaccttttgtctaagtacagtgatagccatcttgtcttcaatgacgatatccagggtactgcatccgtggtgcttgctgggcttattgccgctcagaaggtgcttggtaaaaaactggctgaccataccttcctgttcttgggtgccggagaggctggaaccggtatcgctgagctaattgctcttaagatttcgaaagagactggagctcccatcactgagacccggaagaagatttggcttgtggactccaagggactgattgttagctcacgcaaagaatctcttcagcacttcaagcagccatgggcacatgagcacaaacctgtgaaggacctcattggtgctgttaatgcaatcaagccaaccgttctcattggaacatccggtgtgggtcagactttcacaaaagaagttgtcgaggccatggctaccaacaacgagaaaccgttgattcttgctctctcaaaccctacttctcaagctgagtgtactgctgaacaggcttacacatggaccaagggtcgtgcaatctttggaagtggaagcccatttgatcctgttgtgtacgatggcaaaacctacttgcctggccaggcaaacaattgctacattttccctggtctgggtcttggtttgatcatgtctggggcaattcgtgtccgtgatgacatgctcctcgcagcttctgaagcattggccgcacaagtgacagaagagcattacgccaatggtctgatctacccgccattctcaaacatcagagagatctctgctaacattgcagcctgtgtcgccgccaaaacctatgacctcggattggcgtcgaacctgccacgtgcaaaggatcttgtcaagtttgcagagagcagcatgtacagccctgtgtacagaaactaccgttaaaaaagttttgttgaagaaacctgcagattatactattcacaacccttgatagtttcttaaggcttgtatttaagttttttgtttgtttgtttgttgtttgttttctcttctacattatgatgctgtttgtgaactctctctctgtctttgctgataaataataaattgttactaatataatctac

SEQ ID NO: 45580 - protein, 588 aa, Arabidopsis thaliana
  peptide (1)..(588): Ceres Seq. ID no. 13646534
MGSTPTDLPGEDVADNRSGVGGGISDVYGEDSATLDQLVTPWVTSVASGYTLMRDPRYNKGLAFTDKERDAHYLTGLLPPVILSQDVQERKVMHNLRQYTVPLQRYMALMDLQERNERLFYKLLIDNVEELLPVVYTPTVGEACQKYGSIFRKPQGLYISLNEKGKILEVLKNWPQRGIQVIVVTDGERILGLGDLGCQGMGIPVGKLSLYTALGGIRPSACLPITIDVGTNNEKLLNDEFYIGLKQRRATGQEYAEFLHEFMCAVKQNYGEKVLVQFEDFANHNAFDLLSKYSDSHLVFNDDIQGTASVVLAGLIAAQKVLGKKLADHTFLFLGAGEAGTGIAELIALKISKETGAPITETRKKIWLVDSKGLIVSSRKESLQHFKQPWAHEHKPVKDLIGAVNAIKPTVLIGTSGVGQTFTKEVVEAMATNNEKPLILALSNPTSQAECTAEQAYTWTKGRAIFGSGSPFDPVVYDGKTYLPGQANNCYIFPGLGLGLIMSGAIRVRDDMLLAASEALAAQVTEEHYANGLIYPPFSNIREISANIAACVAAKTYDLGLASNLPRAKDLVKFAESSMYSPVYRNYR

SEQ ID NO: 45581 - protein, 536 aa, Arabidopsis thaliana
  peptide (1)..(536): Ceres Seq. ID no. 13646535
MRDPRYNKGLAFTDKERDAHYLTGLLPPVILSQDVQERKVMHNLRQYTVPLQRYMALMDLQERNERLFYKLLIDNVEELLPVVYTPTVGEACQKYGSIFRKPQGLYISLNEKGKILEVLKNWPQRGIQVIVVTDGERILGLGDLGCQGMGIPVGKLSLYTALGGIRPSACLPITIDVGTNNEKLLNDEFYIGLKQRRATGQEYAEFLHEFMCAVKQNYGEKVLVQFEDFANHNAFDLLSKYSDSHLVFNDDIQGTASVVLAGLIAAQKVLGKKLADHTFLFLGAGEAGTGIAELIALKISKETGAPITETRKKIWLVDSKGLIVSSRKESLQHFKQPWAHEHKPVKDLIGAVNAIKPTVLIGTSGVGQTFTKEVVEAMATNNEKPLILALSNPTSQAECTAEQAYTWTKGRAIFGSGSPFDPVVYDGKTYLPGQANNCYIFPGLGLGLIMSGAIRVRDDMLLAASEALAAQVTEEHYANGLIYPPFSNIREISANIAACVAAKTYDLGLASNLPRAKDLVKFAESSMYSPVYRNYR

SEQ ID NO: 45582 - protein, 496 aa, Arabidopsis thaliana
  peptide (1)..(496): Ceres Seq. ID no. 13646536
MHNLRQYTVPLQRYMALMDLQERNERLFYKLLIDNVEELLPVVYTPTVGEACQKYGSIFRKPQGLYISLNEKGKILEVLKNWPQRGIQVIVVTDGERILGLGDLGCQGMGIPVGKLSLYTALGGIRPSACLPITIDVGTNNEKLLNDEFYIGLKQRRATGQEYAEFLHEFMCAVKQNYGEKVLVQFEDFANHNAFDLLSKYSDSHLVFNDDIQGTASVVLAGLIAAQKVLGKKLADHTFLFLGAGEAGTGIAELIALKISKETGAPITETRKKIWLVDSKGLIVSSRKESLQHFKQPWAHEHKPVKDLIGAVNAIKPTVLIGTSGVGQTFTKEVVEAMATNNEKPLILALSNPTSQAECTAEQAYTWTKGRAIFGSGSPFDPVVYDGKTYLPGQANNCYIFPGLGLGLIMSGAIRVRDDMLLAASEALAAQVTEEHYANGLIYPPFSNIREISANIAACVAAKTYDLGLASNLPRAKDLVKFAESSMYSPVYRNYR

SEQ ID NO: 45583 - DNA, 3044 bp, Arabidopsis thaliana
  misc_feature (1)..(3044): Ceres Seq. ID no. 12784587
  misc_feature (1)..(3044): Ortholog of  Ceres SEQ ID NO 14308209 as cited in SEQ ID NO 58800
tcgtcctcagatctcatctcactcacaagagagagatagagagagaaaaaggctctgctttctacattatttacgattatacactttccaacatggcggcctctgtagataatcgccaatacgctcgtctcgagccaggtttgaacggcgtggttcgttcttacaaacctcccgttccaggccggtccgattcccctaaggcgcaccagaaccaaaccaccaaccaaaccgtgttcttgaaaccagccaaggttcatgacgatgacgaagacgtgtcgagcgaagacgagaacgagacacacaacagcaacgccgtgtactacaaggagatgataagaaaatccaacgccgagcttgaaccgtccgttttggacccgagggacgaatacacggctgatagctggatcgagcgtaacccttccatggtacgtctcacagggaaacatcccttcaactccgaggcgcctcttaaccgtttaatgcaccacgggtttatcacccctgtcccgttgcactacgttcgtaaccacggccacgtccctaaagcccaatgggccgaatggacggtcgaggtgaccggattcgtcaaacggcccatgaaattcaccatggaccagctcgtctccgagtttgcttaccgcgagttcgccgcgacgctagtctgcgcggggaaccgccgtaaggaacagaacatggtgaagaagtcaaagggattcaactggggatccgccggagtttccacctccgtgtggcgtggtgtccctctctgcgacgtactgcgtcgctgcgggatctttagccgaaaaggcggcgctctcaacgtctgcttcgaagggtcggaggatcttccgggcggtgccggaactgctggttccaaatacggaacgagcatcaagaaggaatatgccatggatccatcaagagacatcattttggcttatatgcaaaacggagagtatctaacaccagaccacggttttccggttcggatcatcatccccggtttcattggtggccggatggttaaatggttgaaacgaatcattgtcacaactaaagaatccgacaatttctaccatttcaaggacaacagagttttaccttctttggtagacgccgaactcgccgacgaagaaggttggtggtataagccagagtacataatcaacgagctaaacataaactccgtgattacgacgccatgtcacgaggagattcttcccatcaacgctttcacaacccaaagaccttatactttaaagggttacgcatattccggaggtggaaaaaaagtgacccgtgtggaggtcacggtagatggtggagagacatggaacgtatgtgcacttgaccatcaagagaagccaaacaagtatgggaagttctggtgttggtgtttttggtcacttgaggttgaggttttggacttgcttagtgccaaagagattgctgttcgtgcatgggacgagactctcaacacgcagcccgagaaaatgatatggaatctcatggggatgatgaataactgctggtttagagtgaagactaacgtgtgcaagccacacaagggagagattgggattgtgttcgagcatccaacgcttcctggtaatgaatctggtggatggatggcgaaggaacgtcacctcgaaaaatcggctgacgcgcctcctagtctaaagaagtctgtctcgacgccgtttatgaacacaactgcgaagatgtactcgatgtccgaggtcaagaagcataattcggctgactcttgctggatcattgtccatggacatatctatgattgtacacgattccttatggatcacccgggtggttcggattcaatcttgatcaatgctggtacggattgtacggaggagtttgaagccattcactcggataaagccaagaagatgcttgaggattaccgtatcggtgagctcatcaccactggttattcctctgactcttcctcgcctaacaactcggttcacggttcatccgccgtgttctcgctgttggctcccattggagaggcgactccggttaggaacctcgctttggttaatccccgggctaaagtcccggttcaactcgtcgaaaagacttccatttctcatgatgttcgtaaattccggtttgctttaccggttgaggatatggttctaggcttaccggttggtaagcacattttcctttgcgccaccatcaatgacaagctctgcctcagagcttacacaccaagcagcaccgttgatgtggttggctacttcgagctcgtggtcaagatttactttggcggtgtccacccaagattccctaacggcgggctcatgtctcagtacctagactctttgcctatagggtcaactttggagattaaaggaccattgggtcacgttgagtatctcggcaagggtagtttcacggttcacggtaaaccaaagtttgctgataaattggcaatgttggcaggtggaaccggaataactccggtttaccaaattatccaagccattctcaaggatccagaggatgagactgaaatgtacgtcatttatgctaaccggaccgaggaagatattctcctaagggaggaactggatggttgggcagagcaatacccggaccggttaaaggtttggtacgtagtggaatcagctaaggaaggttgggcatacagtaccgggtttatttccgaggcgattatgcgagaacatatccctgatggattagatggctcagcccttgccatggcttgcggaccaccaccgatgattcagtttgcggttcagccgaatttggagaagatgcaatataacatcaaggaggatttcttgatattctagtctaaagccaagatatttcaaagtcaaaacgttaagtcgtcaaaaagcctagtgttatgatagattctaaataagtattgagggatttgtttgtatataatgttggttctttaaagtcttggatttggaaatataatgtgttcgttgtattcacgatcgatattttttttcacaataatatacaaaaagtaatttcag

SEQ ID NO: 45584 - protein, 947 aa, Arabidopsis thaliana
  peptide (1)..(947): Ceres Seq. ID no. 12784588
VLRSHLTHKREIEREKGSAFYIIYDYTLSNMAASVDNRQYARLEPGLNGVVRSYKPPVPGRSDSPKAHQNQTTNQTVFLKPAKVHDDDEDVSSEDENETHNSNAVYYKEMIRKSNAELEPSVLDPRDEYTADSWIERNPSMVRLTGKHPFNSEAPLNRLMHHGFITPVPLHYVRNHGHVPKAQWAEWTVEVTGFVKRPMKFTMDQLVSEFAYREFAATLVCAGNRRKEQNMVKKSKGFNWGSAGVSTSVWRGVPLCDVLRRCGIFSRKGGALNVCFEGSEDLPGGAGTAGSKYGTSIKKEYAMDPSRDIILAYMQNGEYLTPDHGFPVRIIIPGFIGGRMVKWLKRIIVTTKESDNFYHFKDNRVLPSLVDAELADEEGWWYKPEYIINELNINSVITTPCHEEILPINAFTTQRPYTLKGYAYSGGGKKVTRVEVTVDGGETWNVCALDHQEKPNKYGKFWCWCFWSLEVEVLDLLSAKEIAVRAWDETLNTQPEKMIWNLMGMMNNCWFRVKTNVCKPHKGEIGIVFEHPTLPGNESGGWMAKERHLEKSADAPPSLKKSVSTPFMNTTAKMYSMSEVKKHNSADSCWIIVHGHIYDCTRFLMDHPGGSDSILINAGTDCTEEFEAIHSDKAKKMLEDYRIGELITTGYSSDSSSPNNSVHGSSAVFSLLAPIGEATPVRNLALVNPRAKVPVQLVEKTSISHDVRKFRFALPVEDMVLGLPVGKHIFLCATINDKLCLRAYTPSSTVDVVGYFELVVKIYFGGVHPRFPNGGLMSQYLDSLPIGSTLEIKGPLGHVEYLGKGSFTVHGKPKFADKLAMLAGGTGITPVYQIIQAILKDPEDETEMYVIYANRTEEDILLREELDGWAEQYPDRLKVWYVVESAKEGWAYSTGFISEAIMREHIPDGLDGSALAMACGPPPMIQFAVQPNLEKMQYNIKEDFLIF

SEQ ID NO: 45585 - protein, 917 aa, Arabidopsis thaliana; identical to SEQ ID NO: 45155
  peptide (1)..(917): Ceres Seq. ID no. 12784589

SEQ ID NO: 45586 - protein, 838 aa, Arabidopsis thaliana; identical to SEQ ID NO: 45156
  peptide (1)..(838): Ceres Seq. ID no. 12784590

SEQ ID NO: 45587 - DNA, 2205 bp, Arabidopsis thaliana
  misc_feature (1)..(2205): Ceres Seq. ID no. 13646842
  misc_feature (1)..(2205): Ortholog of  Ceres SEQ ID NO 13599965 as cited in SEQ ID NO 0
  misc_feature (1)..(2205): Ortholog of  Ceres SEQ ID NO 15180230 as cited in SEQ ID NO 0
ctagtcccccccccccccgatcttccttctcgataaacccttttcttttaacctactcagtttttctgtttgcgtcgctctcatcccagggcgagaaagatggtgaaacggagtaaaaagagtaagagtaagagggtgaccttgaagcagaagcataaggtcctgaaaaaggtgaaggagcaccacaagaagaaggcaaaggatgctaaaaagcttggccttcaccgtaagccaagagtagagaaagacccaggtatacccaatgactggcctttcaaggaacaagagcttaaagcccttgaagttcgacgtgcccgtgctcttgaggagattgaacagaagaaagaagctcgcaaagaaagggccaaaaagaggaaacttggtttggttgatgatgaggataccaagacagaaggagagaccatagaagacttacctaaagttgtcaatgttcgagataactcggagagggctttctacaaggagctagttaaagtcattgaattgtctgatgtcattttggaggttcttgatgcccgtgatcctcttggcactcgttgtactgacatggagaggatggtgatgcaagccggtcccaataagcatcttgtgttgctgctgaacaagattgatcttgttccccgagaggctgctgagaaatggcttatgtaccttagggaagaatttccagctgttgccttcaagtgtagcacccaggaacagagatcaaacttgggttggaaatcatctaaggcatcaaaaccaagcaatatgttgcagacgagtgattgtcttggagcagacactcttatcaaattgttgaagaactactcaagaagtcatgagttaaaaaaatctatcacagttggtattattggactgcctaatgtcggcaagagtagtcttattaacagtctgaagagagcgcatgttgtcaatgttggtgccactcctggactgactagatctctgcaagaggttcacttggacaaaaacgtgaagttgctggattgtcctggagttgtgatgttgaaatcatcaggaaatgatgcttccatagctctccgaaattgtaaaagaatcgagaagttggatgacccagttagtccagtgaaggaaattctcaagctttgtcctgaagatatgctggtgactctctacaaaatcccgagcttcgaggcagttgatgatttcctttacaaagtcgccactgtaaggggtaaacttaaaaagggtggtcttgtggatattgatgctgctgccagaattgttttgcatgactggaatgaaggtaaaatcccatactatacaatgccgccaaagagggaccagggtggacatgcagagtcaaagattgtgactgagctggccaaggatttcaacatcgatgaggtttacagtggtgaatcctctttcattgggagcttgaagacggttaacgaattcaaccctgttattattccttcaaatggtcctctcaatttcgatgaaactatgatcgaggatgagtctaagacgcagacggaagaggaggctgagcatgagagtgatgatgatgagtcaatgggaggggaggaggaggaagaggcaggaaagacgaaggagaaatcagagacggggaggcagaacgtgaagctatacgcagcggaaagcatgttgaatacaaagaaacagaaagcagagaagaagaagaggaagaaagcaaagaaagcaggagctgatgaggaggatctgatggacggagattatgatttcaaagtggattataggaagaacaaagatggagaagacgaagaattccagattgatgctaaaatcccaatggctggacttttgcctgaagaatgagtgattggaaaccacaacgttttttttttttttttttttttgtatttggcgtttatgagtcggtcggttaaactttccgatatatgtgcttcatgaactagtagtaatactgaagcgattttgatttctttaattaacgtttcttctattccaaaaaaaaaaaaaaaaaaaaaaaaaaaaaaaaaaaaaaaaaaaaaaaaaaaaaaaaaaaaaaaaaaaaaaaaaaaacaaaaaaaaaaaaaaaaaaaaaattcactgaccaaaaaaaaaaaaaaaaaaaaaaaaggccccggggggggggggggcccccaattccccctaaaaagggggggattaaaaacagtgggggggtttttt

SEQ ID NO: 45588 - protein, 582 aa, Arabidopsis thaliana
  peptide (1)..(582): Ceres Seq. ID no. 13646843
MVKRSKKSKSKRVTLKQKHKVLKKVKEHHKKKAKDAKKLGLHRKPRVEKDPGIPNDWPFKEQELKALEVRRARALEEIEQKKEARKERAKKRKLGLVDDEDTKTEGETIEDLPKVVNVRDNSERAFYKELVKVIELSDVILEVLDARDPLGTRCTDMERMVMQAGPNKHLVLLLNKIDLVPREAAEKWLMYLREEFPAVAFKCSTQEQRSNLGWKSSKASKPSNMLQTSDCLGADTLIKLLKNYSRSHELKKSITVGIIGLPNVGKSSLINSLKRAHVVNVGATPGLTRSLQEVHLDKNVKLLDCPGVVMLKSSGNDASIALRNCKRIEKLDDPVSPVKEILKLCPEDMLVTLYKIPSFEAVDDFLYKVATVRGKLKKGGLVDIDAAARIVLHDWNEGKIPYYTMPPKRDQGGHAESKIVTELAKDFNIDEVYSGESSFIGSLKTVNEFNPVIIPSNGPLNFDETMIEDESKTQTEEEAEHESDDDESMGGEEEEEAGKTKEKSETGRQNVKLYAAESMLNTKKQKAEKKKRKKAKKAGADEEDLMDGDYDFKVDYRKNKDGEDEEFQIDAKIPMAGLLPEE

SEQ ID NO: 45589 - protein, 426 aa, Arabidopsis thaliana
  peptide (1)..(426): Ceres Seq. ID no. 13646844
MERMVMQAGPNKHLVLLLNKIDLVPREAAEKWLMYLREEFPAVAFKCSTQEQRSNLGWKSSKASKPSNMLQTSDCLGADTLIKLLKNYSRSHELKKSITVGIIGLPNVGKSSLINSLKRAHVVNVGATPGLTRSLQEVHLDKNVKLLDCPGVVMLKSSGNDASIALRNCKRIEKLDDPVSPVKEILKLCPEDMLVTLYKIPSFEAVDDFLYKVATVRGKLKKGGLVDIDAAARIVLHDWNEGKIPYYTMPPKRDQGGHAESKIVTELAKDFNIDEVYSGESSFIGSLKTVNEFNPVIIPSNGPLNFDETMIEDESKTQTEEEAEHESDDDESMGGEEEEEAGKTKEKSETGRQNVKLYAAESMLNTKKQKAEKKKRKKAKKAGADEEDLMDGDYDFKVDYRKNKDGEDEEFQIDAKIPMAGLLPEE

SEQ ID NO: 45590 - protein, 423 aa, Arabidopsis thaliana
  peptide (1)..(423): Ceres Seq. ID no. 13646845
MVMQAGPNKHLVLLLNKIDLVPREAAEKWLMYLREEFPAVAFKCSTQEQRSNLGWKSSKASKPSNMLQTSDCLGADTLIKLLKNYSRSHELKKSITVGIIGLPNVGKSSLINSLKRAHVVNVGATPGLTRSLQEVHLDKNVKLLDCPGVVMLKSSGNDASIALRNCKRIEKLDDPVSPVKEILKLCPEDMLVTLYKIPSFEAVDDFLYKVATVRGKLKKGGLVDIDAAARIVLHDWNEGKIPYYTMPPKRDQGGHAESKIVTELAKDFNIDEVYSGESSFIGSLKTVNEFNPVIIPSNGPLNFDETMIEDESKTQTEEEAEHESDDDESMGGEEEEEAGKTKEKSETGRQNVKLYAAESMLNTKKQKAEKKKRKKAKKAGADEEDLMDGDYDFKVDYRKNKDGEDEEFQIDAKIPMAGLLPEE

SEQ ID NO: 45591 - DNA, 1623 bp, Arabidopsis thaliana
  misc_feature (1)..(1623): Ceres Seq. ID no. 13646667
  misc_feature (1)..(1623): Ortholog of  Ceres SEQ ID NO 15170209 as cited in SEQ ID NO 58562
  misc_feature (1)..(1623): Ortholog of  Ceres SEQ ID NO 12616332 as cited in SEQ ID NO 63449
  misc_feature (1)..(1623): Ortholog of  Ceres SEQ ID NO 13597498 as cited in SEQ ID NO 64648
ataattcgaacaaggaaacaaatccaaagcttcattatcatcatctgttacttcttagatttgcttatccttcttcactttctcaattttgaatctgagaattcgtgcctccgatctctctccctctcgccgtggatagagatggagagcttaccaacgacggtctcagggaaatcagaccggcgaggtaggttttccaagtctcagaacacctccaagccctctcttatcttggccttcttctcttgtcttgcttggctctacgtcgctggccggttatggcaagatgcgcagtacagagcagcactcaatactgtgcttaagaggaattatgatcagaggcctaaggttcttacggtggaggacaaacttgtggtccttggatgcaaagatcttgagaggagaattgttgaaactgaaatggagttggcacaggcaaagagtcaaggctatcttaaaaaacagaaaagtgtctcttcttcagggaagaaaatgctagctgttattggagtttacacaggctttggaagtcacttgaagcgcaataaatttagaggctcttggatgccacgagatgatgctcttaaaaaacttgaggaaagaggagttgtcatacgctttgtgattggtcggagtgcaaccgaggtgatagcctagatagaaaaattgacgaagaaaatcgtgcaactaaagactttttgattcttgagaatcacgaggaagcccaagaagagttaccgaagaaagtgaagttcttctacagtgctgctgttcagaattgggacgcagagttttatgtcaaagttgatgacaacgttgacttggatcttgaggggatgattgcgcttcttgaaagtcgtcgtagtcaagatggtgcttacattgggtgcatgaaatctggagatgtgattactgaagagggaagtcaatggtatgagcctgagtggtggaaatttggggacgacaaatcgtatttccgtcatgcaactggttcgctggtaatactctcaaagaatctggctcagtatgtcaatataaacagtggattgttgaagacatatgcgtttgatgataccaccattggatcatggatgattggcgtccaggcaacatatatagacgacaatcgcctttgctgcagcagcacaagacaagaaaaagtgtgttccatggcatgatcactgcatagatgatcctcttgtcccagagcaaagacggcggtttctcatcgcattcatggcgctccgatactcttttggggcagattcttggaccggatactgaacttatcattagttttgttagaatgggagtatgattaggccattcattacagtttatgattagaggcatgcgtatcccttgagctttggagtaagaaaatggggaaatggtatagatgtgaatgaagtataatttttcctttggtatcatatcaccatcatttgtccgtccattctagcccaatctctggcaggcgtttaatgttcgaaccttaagtttgcatttttggttgctggtttttaaaaatgtgttagttaagacttaagaggacaaaagaaaatcgtctgctttaagctcataaacacttcggaccaatacgtggttaaaaatacttcattg

SEQ ID NO: 45592 - protein, 218 aa, Arabidopsis thaliana
  peptide (1)..(218): Ceres Seq. ID no. 13646668
IIRTRKQIQSFIIIICYFLDLLILLHFLNFESENSCLRSLSLSPWIEMESLPTTVSGKSDRRGRFSKSQNTSKPSLILAFFSCLAWLYVAGRLWQDAQYRAALNTVLKRNYDQRPKVLTVEDKLVVLGCKDLERRIVETEMELAQAKSQGYLKKQKSVSSSGKKMLAVIGVYTGFGSHLKRNKFRGSWMPRDDALKKLEERGVVIRFVIGRSATEVIA

SEQ ID NO: 45593 - protein, 171 aa, Arabidopsis thaliana
  peptide (1)..(171): Ceres Seq. ID no. 13646669
MESLPTTVSGKSDRRGRFSKSQNTSKPSLILAFFSCLAWLYVAGRLWQDAQYRAALNTVLKRNYDQRPKVLTVEDKLVVLGCKDLERRIVETEMELAQAKSQGYLKKQKSVSSSGKKMLAVIGVYTGFGSHLKRNKFRGSWMPRDDALKKLEERGVVIRFVIGRSATEVIA

SEQ ID NO: 45594 - protein, 113 aa, Arabidopsis thaliana
  peptide (1)..(113): Ceres Seq. ID no. 13646670
MIALLESRRSQDGAYIGCMKSGDVITEEGSQWYEPEWWKFGDDKSYFRHATGSLVILSKNLAQYVNINSGLLKTYAFDDTTIGSWMIGVQATYIDDNRLCCSSTRQEKVCSMA

SEQ ID NO: 45595 - DNA, 1431 bp, Arabidopsis thaliana; identical to SEQ ID NO: 21040
  misc_feature (1)..(1431): Ceres Seq. ID no. 13591669
  misc_feature (1)..(1431): Ortholog of  Ceres SEQ ID NO 15176919 as cited in SEQ ID NO 54698
  misc_feature (1)..(1431): Ortholog of  Ceres SEQ ID NO 15179344 as cited in SEQ ID NO 0

SEQ ID NO: 45596 - protein, 406 aa, Arabidopsis thaliana; identical to SEQ ID NO: 21041
  peptide (1)..(406): Ceres Seq. ID no. 15221056

SEQ ID NO: 45597 - protein, 284 aa, Arabidopsis thaliana; identical to SEQ ID NO: 21042
  peptide (1)..(284): Ceres Seq. ID no. 15221057

SEQ ID NO: 45598 - DNA, 2809 bp, Arabidopsis thaliana; identical to SEQ ID NO: 44960
  misc_feature (1)..(2809): Ceres Seq. ID no. 12559536
  misc_feature (1)..(2809): Ortholog of  Ceres SEQ ID NO 15176051 as cited in SEQ ID NO 53434
  misc_feature (1)..(2809): Ortholog of  Ceres SEQ ID NO 15170306 as cited in SEQ ID NO 58219
  misc_feature (1)..(2809): Ortholog of  Ceres SEQ ID NO 12465091 as cited in SEQ ID NO 65947

SEQ ID NO: 45599 - protein, 904 aa, Arabidopsis thaliana; identical to SEQ ID NO: 44961
  peptide (1)..(904): Ceres Seq. ID no. 12559537

SEQ ID NO: 45600 - protein, 896 aa, Arabidopsis thaliana; identical to SEQ ID NO: 44962
  peptide (1)..(896): Ceres Seq. ID no. 12559538

SEQ ID NO: 45601 - protein, 754 aa, Arabidopsis thaliana; identical to SEQ ID NO: 44963
  peptide (1)..(754): Ceres Seq. ID no. 12559539

SEQ ID NO: 45602 - DNA, 1511 bp, Arabidopsis thaliana
  misc_feature (1)..(1511): Ceres Seq. ID no. 13646397
  misc_feature (1)..(1511): Ortholog of  Ceres SEQ ID NO 14303596 as cited in SEQ ID NO 65356
aaacttttgtctctttttaactctcttaactttcgtttcttctcctaccttcttttaccaacctttcctttctcttacacacatatatatatatacatatatagagagagagaagaggacaaagagttgaaagatgaagactctcatgtcttcatagaaacaagtgatatgtgcgctaagaaagaagaagaagaagaagaagaagacagttctgaagccatgaacaacatacaaaattaccaaaatgacctcttctttcaccaactcatctctcatcatcaccatcatcatcatgatccttctcaatctgaaactttgggagcatccggtaacgttggatctggtttcactatcttctctcaagattccgtctctccaatatggtctctacctccacctacctcgatccaaccaccatttgatcagtttcctcctccttcttcttctccagcatctttctacggaagtttcttcaacagaagtcgagctcatcatcagggattacagttcgggtacgagggttttggtggagccacgtcagcagcacatcatcatcatgaacaacttcggatcttatcggaagctttaggtccggtagtacaagccgggtccggtccttttgggttacaagctgagttagggaagatgacagcacaagagatcatggacgctaaagctttggctgcttcaaagagtcatagtgaagctgagagaagaagaagagagagaatcaataatcatctcgctaagctccgtagcatattacccaacaccaccaaaacggataaagcgtcgttactagctgaagtgatccaacatgtgaaagagttgaagagagagacttcagtgatctcagagacaaatcttgtcccaacggaaagcgatgagttaacggtagctttcacggaggaggaagaaaccggagatggcagatttgtaattaaagcgtcgctttgctgtgaagacaggtcggatctcttgcctgacatgattaaaacattgaaagctatgcgtctcaaaacgctcaaggcggagataaccaccgttgggggacgagtcaagaacgttttgtttgttaccggagaagagagctccggtgaggaagtggaggaagagtactgtatagggacgattgaggaagcttagaaagcggtgatggagaagagcaatgtagaggaatcatcttcttctggaaatgctaagagacagagaatgagtagtcacaacactatcactatcgtcgaacaacagcaacaatataatcagaggtaatcaattttttacttaaatcgcttttttttttttttactttcggtgtatctactacgtgtgttgtttgctggttatggaaatgaatgttgtacgtcacgttatactatagatatatgtgtgtttgtgtgtatgtataacggaagtatttgtatccgttgtggtcttggacttttggtttggttctaagatacttatttttaaaaaaaaaaaaaaaaaaaactcgagggggggcccggtac

SEQ ID NO: 45603 - protein, 381 aa, Arabidopsis thaliana
  peptide (1)..(381): Ceres Seq. ID no. 13646398
KLLSLFNSLNFRFFSYLLLPTFPFSYTHIYIYIYREREEDKELKDEDSHVFIETSDMCAKKEEEEEEEDSSEAMNNIQNYQNDLFFHQLISHHHHHHHDPSQSETLGASGNVGSGFTIFSQDSVSPIWSLPPPTSIQPPFDQFPPPSSSPASFYGSFFNRSRAHHQGLQFGYEGFGGATSAAHHHHEQLRILSEALGPVVQAGSGPFGLQAELGKMTAQEIMDAKALAASKSHSEAERRRRERINNHLAKLRSILPNTTKTDKASLLAEVIQHVKELKRETSVISETNLVPTESDELTVAFTEEEETGDGRFVIKASLCCEDRSDLLPDMIKTLKAMRLKTLKAEITTVGGRVKNVLFVTGEESSGEEVEEEYCIGTIEEA

SEQ ID NO: 45604 - protein, 325 aa, Arabidopsis thaliana
  peptide (1)..(325): Ceres Seq. ID no. 13646399
MCAKKEEEEEEEDSSEAMNNIQNYQNDLFFHQLISHHHHHHHDPSQSETLGASGNVGSGFTIFSQDSVSPIWSLPPPTSIQPPFDQFPPPSSSPASFYGSFFNRSRAHHQGLQFGYEGFGGATSAAHHHHEQLRILSEALGPVVQAGSGPFGLQAELGKMTAQEIMDAKALAASKSHSEAERRRRERINNHLAKLRSILPNTTKTDKASLLAEVIQHVKELKRETSVISETNLVPTESDELTVAFTEEEETGDGRFVIKASLCCEDRSDLLPDMIKTLKAMRLKTLKAEITTVGGRVKNVLFVTGEESSGEEVEEEYCIGTIEEA

SEQ ID NO: 45605 - protein, 308 aa, Arabidopsis thaliana
  peptide (1)..(308): Ceres Seq. ID no. 13646400
MNNIQNYQNDLFFHQLISHHHHHHHDPSQSETLGASGNVGSGFTIFSQDSVSPIWSLPPPTSIQPPFDQFPPPSSSPASFYGSFFNRSRAHHQGLQFGYEGFGGATSAAHHHHEQLRILSEALGPVVQAGSGPFGLQAELGKMTAQEIMDAKALAASKSHSEAERRRRERINNHLAKLRSILPNTTKTDKASLLAEVIQHVKELKRETSVISETNLVPTESDELTVAFTEEEETGDGRFVIKASLCCEDRSDLLPDMIKTLKAMRLKTLKAEITTVGGRVKNVLFVTGEESSGEEVEEEYCIGTIEEA

SEQ ID NO: 45606 - DNA, 2745 bp, Arabidopsis thaliana
  misc_feature (1)..(2745): Ceres Seq. ID no. 13591675
  misc_feature (1)..(2745): Ortholog of  Ceres SEQ ID NO 13598668 as cited in SEQ ID NO 60784
  misc_feature (1)..(2745): Ortholog of  Ceres SEQ ID NO 13659835 as cited in SEQ ID NO 60791
attcgacccgtcttgaaacacggaccaaggagtctgacatgtgtgcgagtcaacgggtgagtaaacccgtaaggcgcaaggaagctgattggcgggatccctcgcgggtgcaccgccgaccgaccttgatcttctgagaagggttcgagtgtgagcatgcctgtcgggacccgaaagatggtgaactatgcctgagcggggtaaagccagaggaaactctggtggaagcccgcagcgatactgacgtgcaaatcgttcgtctgacttgggtataggggcgaaagactaatcgaaccatctagtagctggttccccccgaagtttccctcaggatagctggagctcggacgcgagttctatcgggtaaagccaatgattagaggcattgggggcgcaacgccctcgacctattctcaaactttaaataggtaggacgtgtcggctgctttgttgagccgtcacacggaatcgagagctccaagtgggccatttttggtaagcagaactggcgatgcgggatgaaccggaagccgggttacggtgcccaactgcgcgctaacctagaacccacaaagggtgttggtcgattaagacagcaggacggtggtcatggaagtcgaaatccgctaaggagtgtgtaacaactcacctgccgaatcaactagccccgaaaatggatggcgcttaagcgcgcgacctatacccggccgtcggggcaagagccaggcctcgatgagtaggagggcgcggcagtcgctgcaaaacctagggcgcgagcccgggcagagcggccgtcggtgcagatcttggtggtagtagcaaatattcaaatgagaactttgaaggccgaagaggggaaaggttccatgtgaacggcacttgcacatgggttattcgatcctaagagtcgggggaaacccgtctgatagcgcttaagcgcgaacttcgaaaggggatttggttaaaattccggaaccgggacgtggcggttgacggcaacgttagggagtccggagacgtcggcgggggcctcgggaagagttatcttttctgtttaacagcctgcccaccctggaaacggctcagccggaggtagggtccagcggctggaagagcaccgcacgtcgcgtggtgtccggtgcgcccccggcggcccttgaaaatccggaggaccgagtgccgctcacgcccggtcgtactcataaccgcatcaggtctccaaggtgaacagcctctggtcgatggaacaatgtaggcaagggaagtcggcaaaatggatccgtaacttcgggaaaaggattggctctgagggctgggctcgggggtcccagttccgaacccgtcggctgtcagcggactgctcgagctgctttcgcggcgagagcgggtcgccgcgtgccggccgggggacggactgggaacggctctctcgggagctttacccgggcgtcgaacagtcagctcagaactggtacggacaaggggaatccgactgtttaattaaaacaaagcattgcgatggtccctgcggatgctaacgcaatgtgatttctgcccagtgctctgaatgtcaaagtgaagaaattcaaccaagcgcgggtaaacggtgggagtaactatgactctcttaaggtagccaaatgcctcgtcatctaattagtgacgcgcatgaatggattaacgagattcccactgtccctgtctactatccagcgaaaccacagccaagggaacgggcttggcagaatcagcggggaaagaagaccctgttgagcttgactctagtccgactttgtgaaatgacttgagaggtgtaggataagtgggagcttcggcgcaagtgaaataccactacttttaacgttattttacttactccgtgaatcggaggcggggtacaacccctgtttttggtcccaaggctcgcttcggcgggtcgatccgggcggaggacattgtcaggtggggagtttggctggggcggcacatctgttaaaagataacgcaggtgtcctaagatgagctcaacgagaacagaaatctcgtgtggaacaaaagggtaaaagcttgtttgattctgattttcagtacgaatacgaaccgtgaaagcgtggcctatcgatcctttagaccttcggaatttgaagctagaggtgtcagaaaagttaccacagggataactggcttgtggcagccaagcgttcatagcgacgttgctttttgatccttcgatgtcggctcttcctatcattgtgaagcagaattcaccaagtgttggattgttcacccaccaatagggaacgtgagctgggtttagaccgtcgtgagacaggttagttttaccctactgatgcccgcgtcgcgatagtaattcaacctagtacgagaggaaccgttgattcgcacaattggtcatcgcgcttggttgaaaagccagtggcgcgaagctaccgtgcgctggattatgactgaacgcctctaagtcagaatccgggctagaagcgacgcatgcgcccgccgcccgattgccgaccctcagtaggagcttaggctcccaaaggcacgtgtcgttggctaagtccgttcggcggaagcgtcgtttggaccgccttgaattataattaccaccgagcggcgggtagaatcctttgcagacgacttaaatacgcgacggggtattgtaagtggcagagtggccttgctgccacgatccactgagattcagccctttgtcgctaagattcg

SEQ ID NO: 45607 - protein, 98 aa, Arabidopsis thaliana
  peptide (1)..(98): Ceres Seq. ID no. 13591676
MEQCRQGKSAKWIRNFGKRIGSEGWARGSQFRTRRLSADCSSCFRGESGSPRAGRGTDWERLSRELYPGVEQSAQNWYGQGESDCLIKTKHCDGPCGC

SEQ ID NO: 45608 - protein, 55 aa, Arabidopsis thaliana
  peptide (1)..(55): Ceres Seq. ID no. 13591677
MPRHLISDAHEWINEIPTVPVYYPAKPQPRERAWQNQRGKKTLLSLTLVRLCEMT

SEQ ID NO: 45609 - DNA, 2211 bp, Arabidopsis thaliana
  misc_feature (1)..(2211): Ceres Seq. ID no. 14302809
  misc_feature (1)..(2211): Ortholog of  Ceres SEQ ID NO 14304811 as cited in SEQ ID NO 53097
  misc_feature (1)..(2211): Ortholog of  Ceres SEQ ID NO 14303959 as cited in SEQ ID NO 53709
  misc_feature (1)..(2211): Ortholog of  Ceres SEQ ID NO 14310556 as cited in SEQ ID NO 54965
aacttaaacggcgtttactgcttcaagataaaatacgctttgcccaaaaaacgttattagttcgtaatccgtttttgctctcccttttgagatcttttaattaaaaaaattccgttttaagtgaatgcgtgtaagcaacagttcgaattcgaagcgagagctaaaatcaaaatctctctgatttgttgttttgttgatgttttatgaagtgatttgcattagattggattgaaatggctacggagcctacaaggagctggttccagatacggcagcagaaaccggataaatcaagccctactaaaaagggacaagagggaaatgtgaagaatcttgggagacctcctatgaatgatgcaccatctaatgctactaaacagaaagttgctgcagcgaagcaatatatcgagaatcattataaaattcagaagaagagtctccaggaaagaaaagagcgtcggagcatcttggaacaaaacctagctgatgctgatgttactgttgaagacaagatggatatattaaagaactttgagaaaaaggaaatggagtatatgcgtctacaaagacagaaaatgggggttgatgactttgaactgcttagcatcattggccggggtgctttcggtgaggtgagaatttgtaaagaaaaatctactggaagcgtatatgcaatgaaaaagttaaagaaatccgagatgcttcgacgagggcaggtggaacatgttaaagctgaaagaaatgtgcttgcagaagtggatagccctttcattgtcaagctttgttactctttccaagatgatgagcatttgtatcttattatggaatacctccctggaggtgatatgatgacactgctgatgcgaaaggataccttacgggaagatgagactcggttttatgttgcgcagacaattctggctattgagtctatccataagcataattacgtccacagggatataaagcctgataatttattgattactcgaaacggccatatcaagctttcagattttggattgagcaagtctctggaaagcaaaaattttccagattttaaggcggagcttgttgacaggagtacaaagcctgcagcagaacatgatagactctccaagcctccttctgcacctaggagaactcagcaggaacagcttttacattggcaacaaaacagaaggaccctggctttttctacagtaggaactcccgattacattgcccctgaggtgctgctgaagaaagggtatggaatggagtgtgattggtggtctcttggagcaatcatgttcgagatgcttgtagggtttccgccattctattccgaagaacctttggcaacatgtagaaagtttatctctgcagattgtaaactggaaaacctgcttgaagttccctgatgaagctaagctctccatcgaggtaaaagatctcatccgaagactgctctgcaatgtcgaacagaggcttgggaccaaaggagttcacgaaatcaaagcacacccttggtttaggggagtcgaatgggaacggctatatgagtcaaatgctccatatataccacaagtgaagcatgagcttgatacccaaaactttgaaaagtttgatgaggtaccatctactagccaaacttcttcaaagtctagcccttggagaaagatgatctcatccaaagatgcaaatttccttggttatacattcaagaatctggagatagttgatgaacaccatatccctggcatggcggaactgaagcggaagagtaagacagcaaataaaccatctctcaaaacactcttcgaaacaccatatcctccttctgagaatcaagccttaaaggatttgcttgattcacctatttactctgaaggctctagagggtcttccggatcaccattttcacgaccgaatcaatcacaggcccggagatgatcaaaagggaaaatctaaaagtgattaagaacaaacaaagtaaaagtaaaaaaaaaggtagtcattgttcttcagttgcaaattttcatcttttcatacatatatactctgtaatgtaaaaaaaaaacagtgaacatccgaaagagaatcaaaaccaaaatgcatataggaaactttataggtatacaaacatattccaatgtttctgtgatccccaattatctaaccttgtaagctcttttatttttatttttgcttataaatatttacatacat

SEQ ID NO: 45610 - protein, 389 aa, Arabidopsis thaliana
  peptide (1)..(389): Ceres Seq. ID no. 14302810
MATEPTRSWFQIRQQKPDKSSPTKKGQEGNVKNLGRPPMNDAPSNATKQKVAAAKQYIENHYKIQKKSLQERKERRSILEQNLADADVTVEDKMDILKNFEKKEMEYMRLQRQKMGVDDFELLSIIGRGAFGEVRICKEKSTGSVYAMKKLKKSEMLRRGQVEHVKAERNVLAEVDSPFIVKLCYSFQDDEHLYLIMEYLPGGDMMTLLMRKDTLREDETRFYVAQTILAIESIHKHNYVHRDIKPDNLLITRNGHIKLSDFGLSKSLESKNFPDFKAELVDRSTKPAAEHDRLSKPPSAPRRTQQEQLLHWQQNRRTLAFSTVGTPDYIAPEVLLKKGYGMECDWWSLGAIMFEMLVGFPPFYSEEPLATCRKFISADCKLENLLEVP

SEQ ID NO: 45611 - protein, 351 aa, Arabidopsis thaliana
  peptide (1)..(351): Ceres Seq. ID no. 14302811
MNDAPSNATKQKVAAAKQYIENHYKIQKKSLQERKERRSILEQNLADADVTVEDKMDILKNFEKKEMEYMRLQRQKMGVDDFELLSIIGRGAFGEVRICKEKSTGSVYAMKKLKKSEMLRRGQVEHVKAERNVLAEVDSPFIVKLCYSFQDDEHLYLIMEYLPGGDMMTLLMRKDTLREDETRFYVAQTILAIESIHKHNYVHRDIKPDNLLITRNGHIKLSDFGLSKSLESKNFPDFKAELVDRSTKPAAEHDRLSKPPSAPRRTQQEQLLHWQQNRRTLAFSTVGTPDYIAPEVLLKKGYGMECDWWSLGAIMFEMLVGFPPFYSEEPLATCRKFISADCKLENLLEVP

SEQ ID NO: 45612 - protein, 296 aa, Arabidopsis thaliana
  peptide (1)..(296): Ceres Seq. ID no. 14302812
MDILKNFEKKEMEYMRLQRQKMGVDDFELLSIIGRGAFGEVRICKEKSTGSVYAMKKLKKSEMLRRGQVEHVKAERNVLAEVDSPFIVKLCYSFQDDEHLYLIMEYLPGGDMMTLLMRKDTLREDETRFYVAQTILAIESIHKHNYVHRDIKPDNLLITRNGHIKLSDFGLSKSLESKNFPDFKAELVDRSTKPAAEHDRLSKPPSAPRRTQQEQLLHWQQNRRTLAFSTVGTPDYIAPEVLLKKGYGMECDWWSLGAIMFEMLVGFPPFYSEEPLATCRKFISADCKLENLLEVP

SEQ ID NO: 45613 - DNA, 2745 bp, Arabidopsis thaliana; identical to SEQ ID NO: 45606
  misc_feature (1)..(2745): Ceres Seq. ID no. 13591675
  misc_feature (1)..(2745): Ortholog of  Ceres SEQ ID NO 13598668 as cited in SEQ ID NO 60784
  misc_feature (1)..(2745): Ortholog of  Ceres SEQ ID NO 13659835 as cited in SEQ ID NO 60791

SEQ ID NO: 45614 - protein, 98 aa, Arabidopsis thaliana; identical to SEQ ID NO: 45607
  peptide (1)..(98): Ceres Seq. ID no. 13591676

SEQ ID NO: 45615 - protein, 55 aa, Arabidopsis thaliana; identical to SEQ ID NO: 45608
  peptide (1)..(55): Ceres Seq. ID no. 13591677

SEQ ID NO: 45616 - DNA, 2045 bp, Arabidopsis thaliana; identical to SEQ ID NO: 45453
  misc_feature (1)..(2045): Ceres Seq. ID no. 13646591
  misc_feature (1)..(2045): Ortholog of  Ceres SEQ ID NO 14310841 as cited in SEQ ID NO 53666
  misc_feature (1)..(2045): Ortholog of  Ceres SEQ ID NO 14308493 as cited in SEQ ID NO 60320

SEQ ID NO: 45617 - protein, 549 aa, Arabidopsis thaliana; identical to SEQ ID NO: 45454
  peptide (1)..(549): Ceres Seq. ID no. 13646592

SEQ ID NO: 45618 - protein, 546 aa, Arabidopsis thaliana; identical to SEQ ID NO: 45455
  peptide (1)..(546): Ceres Seq. ID no. 13646593

SEQ ID NO: 45619 - protein, 544 aa, Arabidopsis thaliana; identical to SEQ ID NO: 45456
  peptide (1)..(544): Ceres Seq. ID no. 13646594

SEQ ID NO: 45620 - DNA, 2811 bp, Arabidopsis thaliana; identical to SEQ ID NO: 39321
  misc_feature (1)..(2811): Ceres Seq. ID no. 13491848
  misc_feature (1)..(2811): Ortholog of  Ceres SEQ ID NO 13590691 as cited in SEQ ID NO 66290

SEQ ID NO: 45621 - protein, 808 aa, Arabidopsis thaliana; identical to SEQ ID NO: 39322
  peptide (1)..(808): Ceres Seq. ID no. 13491849

SEQ ID NO: 45622 - protein, 614 aa, Arabidopsis thaliana; identical to SEQ ID NO: 39323
  peptide (1)..(614): Ceres Seq. ID no. 13491850

SEQ ID NO: 45623 - protein, 563 aa, Arabidopsis thaliana; identical to SEQ ID NO: 39324
  peptide (1)..(563): Ceres Seq. ID no. 13491851

SEQ ID NO: 45624 - DNA, 1727 bp, Arabidopsis thaliana
  misc_feature (1)..(1727): Ceres Seq. ID no. 12559251
  misc_feature (1)..(1727): Ortholog of  Ceres SEQ ID NO 14302216 as cited in SEQ ID NO 66456
agggtcagtctaattactctctcagcgtttctctttttggtcctcaaatcttcaccttcaagatcttcttcgtccctcgatctccgatttcaaatctcgtttctccgttcaagcaacctctctgaattcctagtctcacagcaggaattagtactcggcgaagcgatttctgcttcgatctctacatctgaagttccgatctgacgaaatttagggttcgtctgggtcgaagttaaataggaaaaagatttcgaattggcttgagaatggcggaatctagtggaagttggagagattcttataaaggaatgtcgtctgataacatcaagggtttggttttagcgttgtcttctagtttgttcattggtgctagtttcattgttaagaagaaagggcttaagaaagctgcgagtactggtactagggcaggtgttggtgggtattcttatctctacgagcctctttggtggattggcatgacgacaatgttacttggtgaaattgccaatttcgctgcttatgcatttgcgcctgctatacttgtcactcctctaggtgctgtcagtatcattatcagtgctgtcttagctcatattatattacgggaaaaactacatatctttggaattcttggctgtgccttatgtgttgtgggttccacaacaattgtcttacatgcccctcaagaacgtgaaattgactctgtgattgaagtttggaatcttgcaactgaaccagcattcatgttctatgcgagtctggtaattggggctgctgtatttctcattatccgttttgtgccccaatatgggcaaacaaatgtaatggtttacattggtatttgttcgctcgtgggatcattatcggtaatgagtgtaaaagcacttggaatagcattaaagctgaccttttcaggaacaaatcagttattttatcctcaaacatggatattcaccttggtcgtacttacttgtgtggtaacccaactgaactacttaaacaaggctcttgatacattcaatacagctatagtatctcctatatactacgtgatgttcacatctctaactattttggctagtgtcatcatgtttaaggactgggatcggcaaaacggtactcaaattgttacagaaatatgtggatttgttacaatactttcaggcacttttcttctccacagaacaaaggacatggtcgagggttcgtcggtaatattaccgttgcggataagcaagcatataaatgaagaagaaggcattccactcagacgccaagaatctctccggtcaccttaaaagctttttcgctctgttttctggtccactgcgataactgcaaaccagagaatcaaccttttttccttatctcgacttattatgaacatggaccatggttctgtctaacacttacaaatggttcaagaagatcgaagaaggaaagaggagcagcgaggatgagatcatcttctccaatatcggtaaatatgctgtgagttcaagcacacgccattagcacacacccacgcctaaacccttggtgtgacagttaaaattttataaacaagagatgggttttgcctaaattggtcttacaagcatctataactaaaggtttcaattcaagatttgcattattttttattgaatcttctatttttcttccttagttggtttgaagctttaaaccctttgaaaaacaagaaatggagactttgaaagttgacg

SEQ ID NO: 45625 - protein, 343 aa, Arabidopsis thaliana
  peptide (1)..(343): Ceres Seq. ID no. 12559252
MAESSGSWRDSYKGMSSDNIKGLVLALSSSLFIGASFIVKKKGLKKAASTGTRAGVGGYSYLYEPLWWIGMTTMLLGEIANFAAYAFAPAILVTPLGAVSIIISAVLAHIILREKLHIFGILGCALCVVGSTTIVLHAPQEREIDSVIEVWNLATEPAFMFYASLVIGAAVFLIIRFVPQYGQTNVMVYIGICSLVGSLSVMSVKALGIALKLTFSGTNQLFYPQTWIFTLVVLTCVVTQLNYLNKALDTFNTAIVSPIYYVMFTSLTILASVIMFKDWDRQNGTQIVTEICGFVTILSGTFLLHRTKDMVEGSSVILPLRISKHINEEEGIPLRRQESLRSP

SEQ ID NO: 45626 - protein, 329 aa, Arabidopsis thaliana
  peptide (1)..(329): Ceres Seq. ID no. 12559253
MSSDNIKGLVLALSSSLFIGASFIVKKKGLKKAASTGTRAGVGGYSYLYEPLWWIGMTTMLLGEIANFAAYAFAPAILVTPLGAVSIIISAVLAHIILREKLHIFGILGCALCVVGSTTIVLHAPQEREIDSVIEVWNLATEPAFMFYASLVIGAAVFLIIRFVPQYGQTNVMVYIGICSLVGSLSVMSVKALGIALKLTFSGTNQLFYPQTWIFTLVVLTCVVTQLNYLNKALDTFNTAIVSPIYYVMFTSLTILASVIMFKDWDRQNGTQIVTEICGFVTILSGTFLLHRTKDMVEGSSVILPLRISKHINEEEGIPLRRQESLRSP

SEQ ID NO: 45627 - protein, 273 aa, Arabidopsis thaliana
  peptide (1)..(273): Ceres Seq. ID no. 12559254
MTTMLLGEIANFAAYAFAPAILVTPLGAVSIIISAVLAHIILREKLHIFGILGCALCVVGSTTIVLHAPQEREIDSVIEVWNLATEPAFMFYASLVIGAAVFLIIRFVPQYGQTNVMVYIGICSLVGSLSVMSVKALGIALKLTFSGTNQLFYPQTWIFTLVVLTCVVTQLNYLNKALDTFNTAIVSPIYYVMFTSLTILASVIMFKDWDRQNGTQIVTEICGFVTILSGTFLLHRTKDMVEGSSVILPLRISKHINEEEGIPLRRQESLRSP

SEQ ID NO: 45628 - DNA, 1842 bp, Arabidopsis thaliana
  misc_feature (1)..(1842): Ceres Seq. ID no. 13646461
  misc_feature (1)..(1842): Ortholog of  Ceres SEQ ID NO 13655463 as cited in SEQ ID NO 69035
  misc_feature (1)..(1842): Ortholog of  Ceres SEQ ID NO 15180063 as cited in SEQ ID NO 0
gatgagagatagacagagagggaaaacaactacacaagtcaaattttctgttctaaaaaagtaaaagaagtatggtggaggaaacgagctctggtggtggctcatcggcttctccgatcaaaaccatcgtcgttttggttcaggagaacaggtcgttcgatcacatgttaggttggttcaaggagcttaacccagaaatcgatggagtatccgaatccgaaccaagatccaacccactttctacatctgacccgaactctgctcaaatcttcttcggcaaagaatctcagaacattgatcctgatcccggtcactcttttcaggcgatctacgaacaagtgtttggaaaaccattcagcgacgagagtccgtacccggatccgaaaatgaacgggttcgtacaaaacgcagaggcgataacaaaagggatgtcggagaaagtagtgatgcaaggttttccgccggagaaacttccggtattcaaggaactagttcaagaattcgctgtctgcgatcggtggttctcgtcgttgccctcgtccacgcagcctaaccgactctacgtccacgcggcgacatcaaacggtgcgtttagtaatgacactaacacgcttgttcgtggctttcctcagaggacagtgttcgaatcacttgaagagagtggtttcacatttggaatttattaccaatcctttcctaattgcctcttttacaggaacatgaggaaactgaagtacgtggacaacttccatcaataccacttaagcttcaagaggcattgcaaagaagggaagcttccaaactatgtggttatagaaccaaggtacttcaagattttgtcggctccagctaatgatgaccatcccaaaaacgacgtcgttgaaggccaaaatctagtcaaagaaatctacgaagccttaagagctagtcctcagtggaacgagattctcttcgttgttgtttatgatgaacacggtggttattatgaccacgtccctactccagtcattggtgtcccaaatcctgatggtctagttggacctgagccctataactttaagtttgaccggcttggtgttagggttcctgctttgctaatctcgccttggatcgaacctggaacggtgttacacgagccaaatggaccagagccaacgtcgcagttcgaacattcatcaattccggcaacactgaagaaaatattcaacctcaagagctttcttacaaagcgtgacgaatgggctggaacactcgatgctgtcatcaaccggaccagcccaaggacggactgccccgtcacattaccggaacttcctagggcaagagacatagacattggaacacaagaagaagacgaagatctcactgattttcaaatcgaactgattcaagcagcggctgtactaaaaggagatcatatcaaagacatttacccgtttaagctcgcagataaaatgaaggttttggatgcggctaggtacgtagaagaagctttcactagattccatggtgagtccaagaaggctaaagaagaaggccgtgatgagcatgagatcgttgatctttctaaaggatctactcgtcactcgactcctaagtcttttgttcagaagttattctcgtgtttgatttgtgataattgatcttgagttgaaacagatttgatctctctgagatttggtgtatttctcggattttatgtgaagagcgtttgaaatttgatatttgtttgttttccaaattttatgttttacaaaaaaaaaaaaaaaaaaaactcgagggggggcccggtacccaattcgccctattgttaaacacaataaagttggaactggagggggg

SEQ ID NO: 45629 - protein, 523 aa, Arabidopsis thaliana
  peptide (1)..(523): Ceres Seq. ID no. 13646462
MVEETSSGGGSSASPIKTIVVLVQENRSFDHMLGWFKELNPEIDGVSESEPRSNPLSTSDPNSAQIFFGKESQNIDPDPGHSFQAIYEQVFGKPFSDESPYPDPKMNGFVQNAEAITKGMSEKVVMQGFPPEKLPVFKELVQEFAVCDRWFSSLPSSTQPNRLYVHAATSNGAFSNDTNTLVRGFPQRTVFESLEESGFTFGIYYQSFPNCLFYRNMRKLKYVDNFHQYHLSFKRHCKEGKLPNYVVIEPRYFKILSAPANDDHPKNDVVEGQNLVKEIYEALRASPQWNEILFVVVYDEHGGYYDHVPTPVIGVPNPDGLVGPEPYNFKFDRLGVRVPALLISPWIEPGTVLHEPNGPEPTSQFEHSSIPATLKKIFNLKSFLTKRDEWAGTLDAVINRTSPRTDCPVTLPELPRARDIDIGTQEEDEDLTDFQIELIQAAAVLKGDHIKDIYPFKLADKMKVLDAARYVEEAFTRFHGESKKAKEEGRDEHEIVDLSKGSTRHSTPKSFVQKLFSCLICDN

SEQ ID NO: 45630 - protein, 492 aa, Arabidopsis thaliana
  peptide (1)..(492): Ceres Seq. ID no. 13646463
MLGWFKELNPEIDGVSESEPRSNPLSTSDPNSAQIFFGKESQNIDPDPGHSFQAIYEQVFGKPFSDESPYPDPKMNGFVQNAEAITKGMSEKVVMQGFPPEKLPVFKELVQEFAVCDRWFSSLPSSTQPNRLYVHAATSNGAFSNDTNTLVRGFPQRTVFESLEESGFTFGIYYQSFPNCLFYRNMRKLKYVDNFHQYHLSFKRHCKEGKLPNYVVIEPRYFKILSAPANDDHPKNDVVEGQNLVKEIYEALRASPQWNEILFVVVYDEHGGYYDHVPTPVIGVPNPDGLVGPEPYNFKFDRLGVRVPALLISPWIEPGTVLHEPNGPEPTSQFEHSSIPATLKKIFNLKSFLTKRDEWAGTLDAVINRTSPRTDCPVTLPELPRARDIDIGTQEEDEDLTDFQIELIQAAAVLKGDHIKDIYPFKLADKMKVLDAARYVEEAFTRFHGESKKAKEEGRDEHEIVDLSKGSTRHSTPKSFVQKLFSCLICDN

SEQ ID NO: 45631 - protein, 418 aa, Arabidopsis thaliana
  peptide (1)..(418): Ceres Seq. ID no. 13646464
MNGFVQNAEAITKGMSEKVVMQGFPPEKLPVFKELVQEFAVCDRWFSSLPSSTQPNRLYVHAATSNGAFSNDTNTLVRGFPQRTVFESLEESGFTFGIYYQSFPNCLFYRNMRKLKYVDNFHQYHLSFKRHCKEGKLPNYVVIEPRYFKILSAPANDDHPKNDVVEGQNLVKEIYEALRASPQWNEILFVVVYDEHGGYYDHVPTPVIGVPNPDGLVGPEPYNFKFDRLGVRVPALLISPWIEPGTVLHEPNGPEPTSQFEHSSIPATLKKIFNLKSFLTKRDEWAGTLDAVINRTSPRTDCPVTLPELPRARDIDIGTQEEDEDLTDFQIELIQAAAVLKGDHIKDIYPFKLADKMKVLDAARYVEEAFTRFHGESKKAKEEGRDEHEIVDLSKGSTRHSTPKSFVQKLFSCLICDN

SEQ ID NO: 45632 - DNA, 1292 bp, Arabidopsis thaliana
  misc_feature (1)..(1292): Ceres Seq. ID no. 12559240
  misc_feature (1)..(1292): Ortholog of  Ceres SEQ ID NO 14316277 as cited in SEQ ID NO 57806
  misc_feature (1)..(1292): Ortholog of  Ceres SEQ ID NO 14309252 as cited in SEQ ID NO 0
ttcttcttcttcttcttcttcttcatctggaaatcgatatacgattctcactctctacccgcgaaaaaacactaattgattcatatcctccgtcaaggataaatctgtgtttgattcaccatatctctttcttctccctccgcgctaagctacgacgcctacagatctggctggtaaaaatcacgcagatagagactctggcccgatgctctctttacccattgatccaggctttttctgatttctctttgttcctagaaaccattaagctcctacctctttctagttgatgctcgtgttctcttcactgtctatgactccagttgtgatccctcaaaatctccgtgtctttggccctggtttgaatccctctttcccttactgcattgctaatcacttcccttgattgagttgctccattccaactgaatcatctcaatctgcctctcccataagttcttattctgagtgatattggttgatgatttctacccacaagtagtgttcctgctttagacattcttgtataagattgtaaccaaaattatgtaaatctgagtcactcctagaatctccttgtctagtaagtttcccttaggaaatatcctttgagtctttcatctgtgaattctagtcagttctggtttatctgcaagatgctccaagagcagccggttgcgttgtcctttcggcctaactcatttaggcgccggtccatggaaacgggtgttgacagagatgacagggggtggactcagcttcacatcaaagctcgtgaaggcgatctcaaagctgttaaagagctccttgaccaaggagcagacgtgaacgctctagcttgtggacctaaatcaaaaggaatgactcctcttcaccttgctgccaaaggaggtcacatcgaagttatggacttgcttcttgaacgtggagccaacatggaagctagaacctctggtgcttgtggctggactcctctccatgctgcagctaaagaacggaaaagagaagctgtcaagtttcttgtggggaacggtgctttcttacctgatgatataaccgacagtaggttcaacccgccggttcagtactgtcacggcttggaatgggcttatgaagagaggaagaaactcagtgaagatacttctttatcttgtggagacacttcttgcagttctgcgaattgattcttgtcttttgttatctttcttgcaatggctcataagtcgaagagacacaaaaccaaaggtttgtaatcatgttgtattgaaatatgaaatgatacatttatcacc

SEQ ID NO: 45633 - protein, 175 aa, Arabidopsis thaliana
  peptide (1)..(175): Ceres Seq. ID no. 12559241
MLQEQPVALSFRPNSFRRRSMETGVDRDDRGWTQLHIKAREGDLKAVKELLDQGADVNALACGPKSKGMTPLHLAAKGGHIEVMDLLLERGANMEARTSGACGWTPLHAAAKERKREAVKFLVGNGAFLPDDITDSRFNPPVQYCHGLEWAYEERKKLSEDTSLSCGDTSCSSAN

SEQ ID NO: 45634 - protein, 155 aa, Arabidopsis thaliana
  peptide (1)..(155): Ceres Seq. ID no. 12559242
METGVDRDDRGWTQLHIKAREGDLKAVKELLDQGADVNALACGPKSKGMTPLHLAAKGGHIEVMDLLLERGANMEARTSGACGWTPLHAAAKERKREAVKFLVGNGAFLPDDITDSRFNPPVQYCHGLEWAYEERKKLSEDTSLSCGDTSCSSAN

SEQ ID NO: 45635 - protein, 107 aa, Arabidopsis thaliana
  peptide (1)..(107): Ceres Seq. ID no. 12559243
MTPLHLAAKGGHIEVMDLLLERGANMEARTSGACGWTPLHAAAKERKREAVKFLVGNGAFLPDDITDSRFNPPVQYCHGLEWAYEERKKLSEDTSLSCGDTSCSSAN

SEQ ID NO: 45636 - DNA, 2301 bp, Arabidopsis thaliana
  misc_feature (1)..(2301): Ceres Seq. ID no. 14309775
  misc_feature (1)..(2301): Ortholog of  Ceres SEQ ID NO 14304565 as cited in SEQ ID NO 53297
  misc_feature (1)..(2301): Ortholog of  Ceres SEQ ID NO 13654989 as cited in SEQ ID NO 63117
  misc_feature (1)..(2301): Ortholog of  Ceres SEQ ID NO 13584744 as cited in SEQ ID NO 69137
gggccaaaccatttctcttattcatgtcctctgcagatctcattcttcttcagatcttgaagaaggaacgccacaacagaaacagcaaatggagaagatagctaaagatctctttgtatccttccactgctattgttcccgtaaagagataaattgtcgagacattttgctggaagacgcagacaaagttcgagccattaccgaatatgtttcatcttctgcaattgagaacttagtcgttggatctgcatcacgtaatggcttcatgagaagattcaagacggatttgccaacaacagtgtcaaaatcagctccagatttctgcaatgtttatgtcatttcaaaaggcaaaattgcttcagtacgaaatgcatcacgtcctgctccttaccaaaattcgatgcagcaatgtgaaattgacaatcatcacccacatactcctgacaaagcaccaaagtaccatgaccatcccaattctgcaggtagtacaccatctagaccgcgcaaatcagttgaagcagatagatcgccgttggtgaaaaggaagccatatggggacttctatgattcagatagtgacctttcgtttatcagtccgtcttctcatcgtgactctgacatttccttcatcagctcaggaagaccaagcgttgagcggtcttcctttagccttgattttcctgaatctgcaaggacttcaagaatgtcaacgagctcagagcaaagcattggctcaaatcgtttgggaattaagttcagtgatcctggtttccttaacgaatcctctacattctctgaagagagtggtagaacatcctcctattcatctcagagcttggatgatgttgaagctgaaatgaagaggctgcgtctagagctgaaacaaaccatggatatgtatagcacagcttgtaaagaagctttaagcgctagacaacaggcaacggagctgcaaaagctgagaaccgaagaggagagacggttggaagaagcaaaaagttcagaggaagcagcaatgtcaatagtggaaaaggagagagctaaagccaaagcagcgttggaagctgctgaagctgcaaagagattagcagaagtggaatctaaaagaaggttgactgcagagatgaagacaatgaaggaatcagattcattctctcgcggatttgttcggtataggaaatacacggttgaagaaatcgaagaagctacttcaaattttgcagagtctcaaaaggtaggagaaggaggctatggtcctgtctttagaggctttcttgatcacacaagtgttgctgttaaagttctacgcccagacgcagctcaagggagatcacagtttcagaaagaggttgaagtgttaagctgcataaggcatccaaacatggtgcttcttcttggagcttgtccagaatttgggattcttgtttatgaatacatggccaaaggaagtttagaagaccggcttttcatgcgaggaaacacaccgccgattacctggcagctacgtttcagaatcgctgctgagatcgccacgggactcctcttcctccaccagaccaaacctgaaccaattgtccacagagaccttaaaccaggaaatgttctgctcgattacaactatgtgagcaagatcagtgatgtcgggctagcgagattagtccctgcagtagcggaaaacgttacacagtacagagtcacttcagctgcaggaactttctgttacattgatcctgagtaccaacaaacaggaatgttgggtgtgaagtcagatgtttattctcttggaatcatgcttttgcagatcttaaccgcaaaacagccaatgggtttggcttattacgttgaacaagcgatcgaagaagggactcttaaggatatgcttgatccagcagtaccggactggcctatagaagaagctctatctttagcaaagctttcgcttcaatgcgcggaactaagaagaaaagatagacctgacctcgggaaagagatattgcctgagctcaatcggttaagagagataggtgaagagagtttagagagtgtgttttatgcaggaaatcaaggaaagtctccaaacactagccaagtctcgattccggaatctccagctgcagactctcaatcctagttttgatatgagggaagcaaatgtgctctaacactcaatttgcaggagttataaacaaaagcagagcaagtttctttgctgattagtgtatagcattagaggaatttggtattctgttaaataatcagttatgtaaccgcctttttgttaggcccataacggttttgaac

SEQ ID NO: 45637 - protein, 709 aa, Arabidopsis thaliana
  peptide (1)..(709): Ceres Seq. ID no. 14309776
GQTISLIHVLCRSHSSSDLEEGTPQQKQQMEKIAKDLFVSFHCYCSRKEINCRDILLEDADKVRAITEYVSSSAIENLVVGSASRNGFMRRFKTDLPTTVSKSAPDFCNVYVISKGKIASVRNASRPAPYQNSMQQCEIDNHHPHTPDKAPKYHDHPNSAGSTPSRPRKSVEADRSPLVKRKPYGDFYDSDSDLSFISPSSHRDSDISFISSGRPSVERSSFSLDFPESARTSRMSTSSEQSIGSNRLGIKFSDPGFLNESSTFSEESGRTSSYSSQSLDDVEAEMKRLRLELKQTMDMYSTACKEALSARQQATELQKLRTEEERRLEEAKSSEEAAMSIVEKERAKAKAALEAAEAAKRLAEVESKRRLTAEMKTMKESDSFSRGFVRYRKYTVEEIEEATSNFAESQKVGEGGYGPVFRGFLDHTSVAVKVLRPDAAQGRSQFQKEVEVLSCIRHPNMVLLLGACPEFGILVYEYMAKGSLEDRLFMRGNTPPITWQLRFRIAAEIATGLLFLHQTKPEPIVHRDLKPGNVLLDYNYVSKISDVGLARLVPAVAENVTQYRVTSAAGTFCYIDPEYQQTGMLGVKSDVYSLGIMLLQILTAKQPMGLAYYVEQAIEEGTLKDMLDPAVPDWPIEEALSLAKLSLQCAELRRKDRPDLGKEILPELNRLREIGEESLESVFYAGNQGKSPNTSQVSIPESPAADSQS

SEQ ID NO: 45638 - protein, 680 aa, Arabidopsis thaliana
  peptide (1)..(680): Ceres Seq. ID no. 14309777
MEKIAKDLFVSFHCYCSRKEINCRDILLEDADKVRAITEYVSSSAIENLVVGSASRNGFMRRFKTDLPTTVSKSAPDFCNVYVISKGKIASVRNASRPAPYQNSMQQCEIDNHHPHTPDKAPKYHDHPNSAGSTPSRPRKSVEADRSPLVKRKPYGDFYDSDSDLSFISPSSHRDSDISFISSGRPSVERSSFSLDFPESARTSRMSTSSEQSIGSNRLGIKFSDPGFLNESSTFSEESGRTSSYSSQSLDDVEAEMKRLRLELKQTMDMYSTACKEALSARQQATELQKLRTEEERRLEEAKSSEEAAMSIVEKERAKAKAALEAAEAAKRLAEVESKRRLTAEMKTMKESDSFSRGFVRYRKYTVEEIEEATSNFAESQKVGEGGYGPVFRGFLDHTSVAVKVLRPDAAQGRSQFQKEVEVLSCIRHPNMVLLLGACPEFGILVYEYMAKGSLEDRLFMRGNTPPITWQLRFRIAAEIATGLLFLHQTKPEPIVHRDLKPGNVLLDYNYVSKISDVGLARLVPAVAENVTQYRVTSAAGTFCYIDPEYQQTGMLGVKSDVYSLGIMLLQILTAKQPMGLAYYVEQAIEEGTLKDMLDPAVPDWPIEEALSLAKLSLQCAELRRKDRPDLGKEILPELNRLREIGEESLESVFYAGNQGKSPNTSQVSIPESPAADSQS

SEQ ID NO: 45639 - protein, 621 aa, Arabidopsis thaliana
  peptide (1)..(621): Ceres Seq. ID no. 14309778
MRRFKTDLPTTVSKSAPDFCNVYVISKGKIASVRNASRPAPYQNSMQQCEIDNHHPHTPDKAPKYHDHPNSAGSTPSRPRKSVEADRSPLVKRKPYGDFYDSDSDLSFISPSSHRDSDISFISSGRPSVERSSFSLDFPESARTSRMSTSSEQSIGSNRLGIKFSDPGFLNESSTFSEESGRTSSYSSQSLDDVEAEMKRLRLELKQTMDMYSTACKEALSARQQATELQKLRTEEERRLEEAKSSEEAAMSIVEKERAKAKAALEAAEAAKRLAEVESKRRLTAEMKTMKESDSFSRGFVRYRKYTVEEIEEATSNFAESQKVGEGGYGPVFRGFLDHTSVAVKVLRPDAAQGRSQFQKEVEVLSCIRHPNMVLLLGACPEFGILVYEYMAKGSLEDRLFMRGNTPPITWQLRFRIAAEIATGLLFLHQTKPEPIVHRDLKPGNVLLDYNYVSKISDVGLARLVPAVAENVTQYRVTSAAGTFCYIDPEYQQTGMLGVKSDVYSLGIMLLQILTAKQPMGLAYYVEQAIEEGTLKDMLDPAVPDWPIEEALSLAKLSLQCAELRRKDRPDLGKEILPELNRLREIGEESLESVFYAGNQGKSPNTSQVSIPESPAADSQS

SEQ ID NO: 45640 - DNA, 2581 bp, Arabidopsis thaliana
  misc_feature (1)..(2581): Ceres Seq. ID no. 13646832
  misc_feature (1)..(2581): Ortholog of  Ceres SEQ ID NO 14313268 as cited in SEQ ID NO 66794
gaaagcctctgagacgagtagaaggttctctctggtgaagaaaccaatgcatttcggcgacagcctgaaactgaaaagccatcgatcgaccgagaaagcgaaaagagagagagatgagactcgtcgtctcaagctgtctactagttgcagctccttttctctcctctctgttacgagtctcactcgccactgttgtcctcaattccatctccgcctcttttgccgatctcccagccaaatttgacggctccgtgaccaaaaacggaatctgtggagctctatacgtcgcagatcctctcgacggttgctcaccgcttctccacgccgccgcatccaactggacgcaacacagaactactaagttcgctttgataatcagaggcgaatgttcttttgaggataagctgctcaatgcccagaactcaggttttcaagctgtgattgtctatgacaacattgacaacgaagatctcatcgtcatgaaggtgaaccctcaggacattacagttgatgcagtcttcgtttcaaatgtcgccggtgagattttgagaaagtacgcgagaggccgagatggtgaatgctgccttaatccgccagacagagggagcgcttggactgtgttggccatctccttcttctctctccttcttatagtcactttcctgttgattgccttctttgcacccagacactggacccaatggcgagggaggcacaccaggaccatcaggttagatgcaaagctcgtccacacactcccctgcttcaccttcactgattctgctcaccacaaggccggggaaacatgtgctatatgtctcgaggattacagatttggagaaagcctcagacttctcccctgccaacatgcttttcacttgaattgcatcgactcttggttgacaaaatggggtacatcttgccctgtgtgcaagcatgacataagaaccgagactatgtcttctgaggtacataaacgagagagtccgagaacagatacaagtacgagtagatttgcctttgcccaatccagtcaaagccgttagagttattatcggcttagcagctgaacactcatatcagtgctcggttacctggatcaggtccaggtttgcatcttatattgaatggttaatcatggtgggataagtttaggtaaagggaccggatctgccatactggtcgtgctttgctggattcccagatcaaaaagatatgagttgctttgcctctttttctttgcatgtgtacatttacatacgctctgagtcatgtgtacatttgatcattgtgtgtgtgtgtgtgttatagattgaaaaaatgtgtgtgatagtacagatatgcaaacaaattgatagaaaacaaatgttggtctaatcagattttctctctccgatccaggcaaatctcaatgttatcttgttgataatttctttgcctaaagtttgtataatatgaatattgaatctgattcccttacatgggggaatggaatccattgaacgtggctttgattttgtcttgtctgtagtaataataagaaaagaacacgtcatcctcatctctacctaacgactcatccaatacgatgactcgttcatgggtttgttagttgcgcaattccatcaccaaaactttctattacatactcaacttcttttgattactaaattcagccaacatttccttctcatctctaatcagtgaacacgttttctatgcaggctttggggcctatcttaccatagctgtctaagaagactattatcttatattctttattgtagatttcatttacttgcgtatggaattggaaacaaatttctaattgttgaatcatataccattatttttatattggccatgcatgtgtataagtggaagatagaacaatattaaaacaatattattgtgtttggtcctatttattactctctgctctcttcctgaagcttcttcatctttttgtttgacaagaagaggtagagaagaagatgtctcaatcaatctcctccagcacaaaggcagaagaagttgttagtgtagatgtgagccaagccaagactctcctccagtctgggcatcaatatcttgacgttaggactcaggacgagtttaggagaggccattgtgaggcagctaagatcgtcaacattccctacatgctcaacacacctcaaggtagagtgaagaatcaagagttcttggagcaagtatcttctcttctaaacccagctgatgatatccttgtgggttgtcagagtggagccagatccttaaaagccacaactgaacttgttgctgcaggttacaagaaagtgagaaacgtgggaggtggctacttggcttgggtggatcacagctttcccatcaacacggaggaggaggagccatctgctaattaataatcttaagattctcttcttttcttaatcaaataatataactgcctgtgtgatgtagtaatcattttcaatttaaaattccagtttcttgtaatcaaaactttcgtgtaccaaattcaataaaagctgtgtttctctaaaaaaaaaaaaaaaaaaaactcgagggggggcccggt

SEQ ID NO: 45641 - protein, 310 aa, Arabidopsis thaliana
  peptide (1)..(310): Ceres Seq. ID no. 13646833
MRLVVSSCLLVAAPFLSSLLRVSLATVVLNSISASFADLPAKFDGSVTKNGICGALYVADPLDGCSPLLHAAASNWTQHRTTKFALIIRGECSFEDKLLNAQNSGFQAVIVYDNIDNEDLIVMKVNPQDITVDAVFVSNVAGEILRKYARGRDGECCLNPPDRGSAWTVLAISFFSLLLIVTFLLIAFFAPRHWTQWRGRHTRTIRLDAKLVHTLPCFTFTDSAHHKAGETCAICLEDYRFGESLRLLPCQHAFHLNCIDSWLTKWGTSCPVCKHDIRTETMSSEVHKRESPRTDTSTSRFAFAQSSQSR

SEQ ID NO: 45642 - protein, 188 aa, Arabidopsis thaliana
  peptide (1)..(188): Ceres Seq. ID no. 13646834
MKVNPQDITVDAVFVSNVAGEILRKYARGRDGECCLNPPDRGSAWTVLAISFFSLLLIVTFLLIAFFAPRHWTQWRGRHTRTIRLDAKLVHTLPCFTFTDSAHHKAGETCAICLEDYRFGESLRLLPCQHAFHLNCIDSWLTKWGTSCPVCKHDIRTETMSSEVHKRESPRTDTSTSRFAFAQSSQSR

SEQ ID NO: 45643 - DNA, 2038 bp, Arabidopsis thaliana
  misc_feature (1)..(2038): Ceres Seq. ID no. 13591671
  misc_feature (1)..(2038): Ortholog of  Ceres SEQ ID NO 14314585 as cited in SEQ ID NO 59345
gatctcaagtcgtctctgccatttttggctttttaatcaaaccctagagagattgagagagcgaagagaagccatcatcagccatggcgatgaagaatctactgtccctagctcgccgatctcagaggcgtttattcctcactcaagccacacgatcttcctcttcgttttcagctatcgattcggtgccggcttccgcatctccgacggctctatctccaccgccgccgcatcttatgccatacgaccacgcggctgagattataaaaaataagatcaagaagctcgagaatcctgataagaggttccttaaatacgcatctccacatccgatcctcgcttcccacaatcacatcttgtcagctccggagactcgtgtcactaccttgcccaatggtctacgagtcgctactgagtcaaatctctcggctaagaccgccaccgttggagtctggatcgacgctggatctcggtttgagtccgatgagaccaacggaacggctcattttttggagcatatgatattcaaaggcacggataggcgtacagtgagagcgttggaggaagagatcgaagatattggtggtcacctgaacgcgtatacatcgagggaacagaccacttattatgctaaggttttggattccaatgtgaaccaggctttggatgtcttggctgatatcctacagaattctaagttcgaggaacagagaattaaccgcgaacgagatgtcatcctcagggaaatgcaagaggtggagggacaaaccgatgaagtggttcttgaccatttacatgccactgcattccaatacacaccccttggaagaactattttgggacctgctcagaacgtcaaatcgatcaccagagaggatctacagaactacattaagactcactacactgcttccaggatggtgattgctgctgcaggagctgttaagcatgaggaagttgttgagcaagtgaagaagctatttaccaagttgtcgtctgatccaacaactacttctcaactggttgccaatgaacctgctagttttactggttctgaggtccgaatgattgatgacgacctaccccttgcacaatttgctgttgcctttgagggagcatcttggactgatccagattccgttgctcttatggttatgcaaactatgttgggttcgtggaacaaaaatgttggtggtggaaaacacgtgggttctgacctgacccagagggttgccattaatgaaatagcagaaagcataatggcattcaacactaactacaaggatactggactgttcggcgtttatgcagttgccaaggccgattgcttggatgatttatcatatgccattatgtatgaggtaaccaagctggcctaccgagtttcagacgctgatgtgacacgtgcacgaaatcagctgaaatcatcattgttacttcacatggatggaaccagcccaattgctgaagatattggtcgtcagctgctgacctatgggcgtagaatcccaaccgctgaactctttgctaggatcgatgctgttgatgccagcacggtaaaacgtgttgccaacaaatatatctatgacaaagacattgcaatctcagctattggtccaatccaagatttgccagactacaacaaattcagacgcagaacctactggaaccggtactaaggctctgaaataaaggtcactgaatcgcaaggttcgcccacggggagattccgtaggcggagagagcagaacgaggtgatgatggattcattatttttgagtttttcttactgtatcttcataatttaccatcatcgctggtaaaataagtgtaccatttactctttgtcctctactggaaaaatgctagagatcctctgtgtgtgttttttttgttctcttcataattttcccatacacatactaataagttctttgatgtttggttgaaaacttgaattggatacatttcatttcttcttgtgaaactctatcaattcacttgtgatttgatccagttgacaaatttattaagattc

SEQ ID NO: 45644 - protein, 531 aa, Arabidopsis thaliana
  peptide (1)..(531): Ceres Seq. ID no. 13591672
MAMKNLLSLARRSQRRLFLTQATRSSSSFSAIDSVPASASPTALSPPPPHLMPYDHAAEIIKNKIKKLENPDKRFLKYASPHPILASHNHILSAPETRVTTLPNGLRVATESNLSAKTATVGVWIDAGSRFESDETNGTAHFLEHMIFKGTDRRTVRALEEEIEDIGGHLNAYTSREQTTYYAKVLDSNVNQALDVLADILQNSKFEEQRINRERDVILREMQEVEGQTDEVVLDHLHATAFQYTPLGRTILGPAQNVKSITREDLQNYIKTHYTASRMVIAAAGAVKHEEVVEQVKKLFTKLSSDPTTTSQLVANEPASFTGSEVRMIDDDLPLAQFAVAFEGASWTDPDSVALMVMQTMLGSWNKNVGGGKHVGSDLTQRVAINEIAESIMAFNTNYKDTGLFGVYAVAKADCLDDLSYAIMYEVTKLAYRVSDADVTRARNQLKSSLLLHMDGTSPIAEDIGRQLLTYGRRIPTAELFARIDAVDASTVKRVANKYIYDKDIAISAIGPIQDLPDYNKFRRRTYWNRY

SEQ ID NO: 45645 - protein, 529 aa, Arabidopsis thaliana
  peptide (1)..(529): Ceres Seq. ID no. 13591673
MKNLLSLARRSQRRLFLTQATRSSSSFSAIDSVPASASPTALSPPPPHLMPYDHAAEIIKNKIKKLENPDKRFLKYASPHPILASHNHILSAPETRVTTLPNGLRVATESNLSAKTATVGVWIDAGSRFESDETNGTAHFLEHMIFKGTDRRTVRALEEEIEDIGGHLNAYTSREQTTYYAKVLDSNVNQALDVLADILQNSKFEEQRINRERDVILREMQEVEGQTDEVVLDHLHATAFQYTPLGRTILGPAQNVKSITREDLQNYIKTHYTASRMVIAAAGAVKHEEVVEQVKKLFTKLSSDPTTTSQLVANEPASFTGSEVRMIDDDLPLAQFAVAFEGASWTDPDSVALMVMQTMLGSWNKNVGGGKHVGSDLTQRVAINEIAESIMAFNTNYKDTGLFGVYAVAKADCLDDLSYAIMYEVTKLAYRVSDADVTRARNQLKSSLLLHMDGTSPIAEDIGRQLLTYGRRIPTAELFARIDAVDASTVKRVANKYIYDKDIAISAIGPIQDLPDYNKFRRRTYWNRY

SEQ ID NO: 45646 - protein, 480 aa, Arabidopsis thaliana
  peptide (1)..(480): Ceres Seq. ID no. 13591674
MPYDHAAEIIKNKIKKLENPDKRFLKYASPHPILASHNHILSAPETRVTTLPNGLRVATESNLSAKTATVGVWIDAGSRFESDETNGTAHFLEHMIFKGTDRRTVRALEEEIEDIGGHLNAYTSREQTTYYAKVLDSNVNQALDVLADILQNSKFEEQRINRERDVILREMQEVEGQTDEVVLDHLHATAFQYTPLGRTILGPAQNVKSITREDLQNYIKTHYTASRMVIAAAGAVKHEEVVEQVKKLFTKLSSDPTTTSQLVANEPASFTGSEVRMIDDDLPLAQFAVAFEGASWTDPDSVALMVMQTMLGSWNKNVGGGKHVGSDLTQRVAINEIAESIMAFNTNYKDTGLFGVYAVAKADCLDDLSYAIMYEVTKLAYRVSDADVTRARNQLKSSLLLHMDGTSPIAEDIGRQLLTYGRRIPTAELFARIDAVDASTVKRVANKYIYDKDIAISAIGPIQDLPDYNKFRRRTYWNRY

SEQ ID NO: 45647 - DNA, 2124 bp, Arabidopsis thaliana
  misc_feature (1)..(2124): Ceres Seq. ID no. 13592165
  misc_feature (1)..(2124): Ortholog of  Ceres SEQ ID NO 14307776 as cited in SEQ ID NO 59397
gacgacaagagacgacctttgagactcgagaagctctctccaaaaacaaacgaaaagaagcgacttttgcctcttttggtctctccccttctccggagagatctgctctctctatctatctctcaatctgtaagaagaagattcccacttcagtaaaagccctaactttacttgggaaagttcttcatctatcatccttcaatcgtcatcatccatggctgatcaacaaaccctagattcctctactcctcctcctactcaatccgatgatctatctcactcccactctacttcctctactacttcagcttcttcttcctcagatccatcactcttgaggtctctctccttaagtcgactcaacgccggagctcctgagttcgttcctggtcgaactactcctccgctgcctcaacctccgaggatgattatcccgcctcctccgccgcacggtatgcttcatatgtatcaccaccagcctcctttcaatactccagttcttggtcctgttccaatccagccacacttggttcctgttcaaaatcaccaccctcatcatcgctttcatcagcatcatcatcacaatcgtcatcagaatcagcaatatgtcccggtgaggaatcacggagagtatcagcagcgtggtggtgtcggtggtgagcaggaaccggatttggtttcaaagaagaatgatcggagagatcatagtaagagagaatctaagaacgatcaagtgactgaaactggagcttctgtttctattgattcaaaaactggtttgcctgaagattctatccagaagattgtgaatcaggttgaatactatttcagtgacttgaacttggctactacagatcatctcatgagattcatttgcaaggatcctgaaggatatgtgcctattcatgttgttgcgtcgttcaagaaaattaaagctgtcattaacaataattctcagcttgccgcagtgctacagaactcagctaagctttttgttagtgaagatggaaagaaagtgagacgcataagtccgattactgagtcggctatagaagagcttcagtctcgcattattgttgctgagaatctccctgaggatcattgctaccaaaacctgatgaagattttttcaactgttggaagtgtgaagaacatccgtacctgccagcctcaaaataatggaagcggtgctccacccgcagcgagatcagcagctaaaagcgatggtacgcttttcagtaacaaggtccatgcttttgttgagtatgagattgttgagctagccgagagagcagttaccgagttaagtgaagcgggaaattggaggagcggtcttaaagtccggttgatgctaaagcatcagacgaaggaaccaaaacaaggtcaagggcgaggaagaaaaggacatgatgcagatgtagaacatgaggaagatgatgctacaacatccgagcagcagccgattgagaaacaatctgatgactgttctggggaatgggatacacatatgcaagagcagccaataggagaggatcaagggaatgagaaagcggctgggcagagaaaagggcgtaacagaggtagaggaaagggacgaggacgagggcaaccacaccagaaccaaaaccagaacaacaaccacagccataaccaaaaccacaaccacaatgggcgaggaaatcatcatcatcatcatcatcatcaagtgggaacacaaccttcgaacaatccaatgaacaacatggagcaaccaggcatggggaaacagcaaccacctggaccacgaatgcctgatgggaccagaggattctcaatgggacggggaaagccggttatggttcaggcagagtgatccagagctgttttgaaaaggaggtgatgtggaattgtgaatggtcaaaaagggagataaatagagagagagcaagagagaaagagagagatttatccttcccatggggattggctagttttgcagactttatatttgtcttacttacttcgaaatacttttcaattacgcttctcttacaaggaaacaacaaaaaaactacattttcctcatatagtgtacgtgtaatgaaacagcaatttcagttaatattttgtcctaaaagcttttct

SEQ ID NO: 45648 - protein, 545 aa, Arabidopsis thaliana
  peptide (1)..(545): Ceres Seq. ID no. 13592166
MADQQTLDSSTPPPTQSDDLSHSHSTSSTTSASSSSDPSLLRSLSLSRLNAGAPEFVPGRTTPPLPQPPRMIIPPPPPHGMLHMYHHQPPFNTPVLGPVPIQPHLVPVQNHHPHHRFHQHHHHNRHQNQQYVPVRNHGEYQQRGGVGGEQEPDLVSKKNDRRDHSKRESKNDQVTETGASVSIDSKTGLPEDSIQKIVNQVEYYFSDLNLATTDHLMRFICKDPEGYVPIHVVASFKKIKAVINNNSQLAAVLQNSAKLFVSEDGKKVRRISPITESAIEELQSRIIVAENLPEDHCYQNLMKIFSTVGSVKNIRTCQPQNNGSGAPPAARSAAKSDGTLFSNKVHAFVEYEIVELAERAVTELSEAGNWRSGLKVRLMLKHQTKEPKQGQGRGRKGHDADVEHEEDDATTSEQQPIEKQSDDCSGEWDTHMQEQPIGEDQGNEKAAGQRKGRNRGRGKGRGRGQPHQNQNQNNNHSHNQNHNHNGRGNHHHHHHHQVGTQPSNNPMNNMEQPGMGKQQPPGPRMPDGTRGFSMGRGKPVMVQAE

SEQ ID NO: 45649 - protein, 475 aa, Arabidopsis thaliana
  peptide (1)..(475): Ceres Seq. ID no. 13592167
MIIPPPPPHGMLHMYHHQPPFNTPVLGPVPIQPHLVPVQNHHPHHRFHQHHHHNRHQNQQYVPVRNHGEYQQRGGVGGEQEPDLVSKKNDRRDHSKRESKNDQVTETGASVSIDSKTGLPEDSIQKIVNQVEYYFSDLNLATTDHLMRFICKDPEGYVPIHVVASFKKIKAVINNNSQLAAVLQNSAKLFVSEDGKKVRRISPITESAIEELQSRIIVAENLPEDHCYQNLMKIFSTVGSVKNIRTCQPQNNGSGAPPAARSAAKSDGTLFSNKVHAFVEYEIVELAERAVTELSEAGNWRSGLKVRLMLKHQTKEPKQGQGRGRKGHDADVEHEEDDATTSEQQPIEKQSDDCSGEWDTHMQEQPIGEDQGNEKAAGQRKGRNRGRGKGRGRGQPHQNQNQNNNHSHNQNHNHNGRGNHHHHHHHQVGTQPSNNPMNNMEQPGMGKQQPPGPRMPDGTRGFSMGRGKPVMVQAE

SEQ ID NO: 45650 - protein, 465 aa, Arabidopsis thaliana
  peptide (1)..(465): Ceres Seq. ID no. 13592168
MLHMYHHQPPFNTPVLGPVPIQPHLVPVQNHHPHHRFHQHHHHNRHQNQQYVPVRNHGEYQQRGGVGGEQEPDLVSKKNDRRDHSKRESKNDQVTETGASVSIDSKTGLPEDSIQKIVNQVEYYFSDLNLATTDHLMRFICKDPEGYVPIHVVASFKKIKAVINNNSQLAAVLQNSAKLFVSEDGKKVRRISPITESAIEELQSRIIVAENLPEDHCYQNLMKIFSTVGSVKNIRTCQPQNNGSGAPPAARSAAKSDGTLFSNKVHAFVEYEIVELAERAVTELSEAGNWRSGLKVRLMLKHQTKEPKQGQGRGRKGHDADVEHEEDDATTSEQQPIEKQSDDCSGEWDTHMQEQPIGEDQGNEKAAGQRKGRNRGRGKGRGRGQPHQNQNQNNNHSHNQNHNHNGRGNHHHHHHHQVGTQPSNNPMNNMEQPGMGKQQPPGPRMPDGTRGFSMGRGKPVMVQAE

SEQ ID NO: 45651 - DNA, 1754 bp, Arabidopsis thaliana
  misc_feature (1)..(1754): Ceres Seq. ID no. 13646835
  misc_feature (1)..(1754): Ortholog of  Ceres SEQ ID NO 15176169 as cited in SEQ ID NO 0
ggaggtttcttttccccgcggcttaggacaatatgatccgaatcgttgaagaaactgtctccttgtgtctatgtttcgttttgatcccacattcctaaagctccagaaattgatcaaaatgggagaagctggtcaatccagagacggagaatctgtcacgcctcttgttggcggtggtaatggggacaatgcggttgcaccacaagtgtttaattctttaccagctcttaatgaagctgcttcttatataactcaagcaacgtcttacttagggagctgtttttctgactattcagtagaatatggtggcaaggatactatttcccacccccatgagttgttacgatcaacttccggagttgacgggaattccccagtgagtgtatgcatttcgcctggtgaaaggttttcaacttcttcagaggcatctacatctgatgccaacagcccgtcgagggaatctacagagattctgccacaggcaacaaatgcaatagtgacttcgaatcggttaaatttaaatggaatttcaatgttccaagggctcattgagcgggcacggaggactgttcgtggctcggcagatgacataggatggttacagcgtgccccggagatgcctcctgttgaagatggaactgataggttcaataaaattctggaagacatcgggcatggtgtacacaggcttccaaatacagtggtgtacttattggttccaggtcttttcagcaatcatggacctctatattttgtggatacgaaaacgaaattctcaaagatgggtttggcgtgtcatattgcgaagattcacagcgagtcctcggttgagaaaaatgcgagagagataaaggaatacatagaggaactctgttggggatctaataagcgggttctacttcttgggcatagcaaaggaggcatagatgcagctgctgctttatcactatactggcctgaactaaaggataaggtcgctgggttggtactggcgcagagtccatatggtggaagcccaatagctacagatatcctccgtgaaggacaactaggtgattacgtcaatttgagaaagatgatggagattctaatctccaaagtcataaagggtgacattcaagcattggaagatttaacatacgagagaagaaaagaattcttgaagaatcatccgcttccccgagaactccccacggtttcattccgcacagaagctagcattagcccagcggttctatccactttatcacacgtagcacacgctgaacttcctctgacaaaccaagccgcaaaactgccagtggtaatgccacttggtgctgcaatggctgcttgcgctcagctacttcaagtcagatacggtgaaaagagtgacgggctagtgacttgctgtgacgcagaggttcctggttctgtggttgttagacccaaacgtaaactagaccatgcctggatggtgtactcttccttgaacgaggttcctttagaagctgatgctgctcaagtttgtgaagcgctcttaactttgcttgtccaagttgagcaagagaggcaacaaaaactcgcaacaaaaatcgattgataaaccaaattgttttatttctactttcgtcttgagacttcaaattactgtatttgtttctatctttttgttttatttcttactaatttactatcaggtttgaatcacacgataacaaaaaaattattacaaacggtagattttatatttataagactacttaatttgcttc

SEQ ID NO: 45652 - protein, 503 aa, Arabidopsis thaliana
  peptide (1)..(503): Ceres Seq. ID no. 13646836
MFRFDPTFLKLQKLIKMGEAGQSRDGESVTPLVGGGNGDNAVAPQVFNSLPALNEAASYITQATSYLGSCFSDYSVEYGGKDTISHPHELLRSTSGVDGNSPVSVCISPGERFSTSSEASTSDANSPSRESTEILPQATNAIVTSNRLNLNGISMFQGLIERARRTVRGSADDIGWLQRAPEMPPVEDGTDRFNKILEDIGHGVHRLPNTVVYLLVPGLFSNHGPLYFVDTKTKFSKMGLACHIAKIHSESSVEKNAREIKEYIEELCWGSNKRVLLLGHSKGGIDAAAALSLYWPELKDKVAGLVLAQSPYGGSPIATDILREGQLGDYVNLRKMMEILISKVIKGDIQALEDLTYERRKEFLKNHPLPRELPTVSFRTEASISPAVLSTLSHVAHAELPLTNQAAKLPVVMPLGAAMAACAQLLQVRYGEKSDGLVTCCDAEVPGSVVVRPKRKLDHAWMVYSSLNEVPLEADAAQVCEALLTLLVQVEQERQQKLATKID

SEQ ID NO: 45653 - protein, 487 aa, Arabidopsis thaliana
  peptide (1)..(487): Ceres Seq. ID no. 13646837
MGEAGQSRDGESVTPLVGGGNGDNAVAPQVFNSLPALNEAASYITQATSYLGSCFSDYSVEYGGKDTISHPHELLRSTSGVDGNSPVSVCISPGERFSTSSEASTSDANSPSRESTEILPQATNAIVTSNRLNLNGISMFQGLIERARRTVRGSADDIGWLQRAPEMPPVEDGTDRFNKILEDIGHGVHRLPNTVVYLLVPGLFSNHGPLYFVDTKTKFSKMGLACHIAKIHSESSVEKNAREIKEYIEELCWGSNKRVLLLGHSKGGIDAAAALSLYWPELKDKVAGLVLAQSPYGGSPIATDILREGQLGDYVNLRKMMEILISKVIKGDIQALEDLTYERRKEFLKNHPLPRELPTVSFRTEASISPAVLSTLSHVAHAELPLTNQAAKLPVVMPLGAAMAACAQLLQVRYGEKSDGLVTCCDAEVPGSVVVRPKRKLDHAWMVYSSLNEVPLEADAAQVCEALLTLLVQVEQERQQKLATKID

SEQ ID NO: 45654 - protein, 349 aa, Arabidopsis thaliana
  peptide (1)..(349): Ceres Seq. ID no. 13646838
MFQGLIERARRTVRGSADDIGWLQRAPEMPPVEDGTDRFNKILEDIGHGVHRLPNTVVYLLVPGLFSNHGPLYFVDTKTKFSKMGLACHIAKIHSESSVEKNAREIKEYIEELCWGSNKRVLLLGHSKGGIDAAAALSLYWPELKDKVAGLVLAQSPYGGSPIATDILREGQLGDYVNLRKMMEILISKVIKGDIQALEDLTYERRKEFLKNHPLPRELPTVSFRTEASISPAVLSTLSHVAHAELPLTNQAAKLPVVMPLGAAMAACAQLLQVRYGEKSDGLVTCCDAEVPGSVVVRPKRKLDHAWMVYSSLNEVPLEADAAQVCEALLTLLVQVEQERQQKLATKID

SEQ ID NO: 45655 - DNA, 2456 bp, Arabidopsis thaliana
  misc_feature (1)..(2456): Ceres Seq. ID no. 13592201
  misc_feature (1)..(2456): Ortholog of  Ceres SEQ ID NO 15173102 as cited in SEQ ID NO 61106
gatcccaagaaatcgaaacacaaagcaatgggctcttcttctccattaacaaggagaaacagagcaccaccatcctctgtttcctctgtttatctaatctttctctgtttcttcctctactttttaaatttctcaaacgctcaatcatcgccggttttcgcctgcgacgtagctgcaaacccttctctcgccgcctatggtttctgcaacaccgttttgaagatcgaataccgagtcgctgatctggtcgcgaggctcacgttgcaagaaaagatcgggtttttagtgagtaaagctaacggcgtgactcgtcttgggattccaacgtatgaatggtggtctgaagcacttcacggcgtttcttacatcggacccggcacgcatttttctagccaagttcccggagctacgagtttcccgcaggttatactcaccgccgcttctttcaacgtatctctgtttcaagccattggcaaggtcgtctcaacggaagcgagggcaatgtacaacgtgggattagccggactaacgtattggtcaccgaacgtgaacatattccgagatccaagatggggaagagggcaagagactccaggagaagatccattgctcgctagtaagtatgcttcagggtacgttaagggtcttcaagagactgacggtggcgattctaaccgtctcaaagtcgccgcctgctgcaaacactataccgcttacgatgtcgataattggaaaggcgtagaacgttacagtttcaacgccgtggtgactcaacaagatatggatgatacgtatcaaccaccgttcaagagttgtgtggttgatgggaatgtggcgagtgttatgtgttcttacaatcaagttaacggcaaaccgacatgcgctgatccagatctgctctctggtgttatccgcggtgaatggaaattaaatgggtacattgtttcagattgtgattcagtagatgtcttgtataagaaccaacactatacaaagactccagctgaagctgcagccatatctatattggcaggtttggatttaaactgtggttcattcttgggtcaacatacagaggaagcagttaagtcgggtttggtaaacgaggcagctatcgataaagcgatttcgaacaactttttgacccttatgcgtttaggattctttgatggaaacccaaagaaccaaatctatggcgggttaggtcctaccgacgtttgcacgtctgcgaatcaagagctagcagcagatgcagcaagacaaggcattgttctactcaagaatactggatgcttaccgctttctcctaaatcgatcaaaacactagccgtgattggaccaaacgcgaatgtcaccaaaacaatgattggaaactacgaaggcacgccgtgtaaatacacaacaccactacaaggactagccgggacggtatctacaacatatctaccaggctgctccaatgtagcttgtgctgtagcggatgtagccggcgccacgaaactagcagccactgcagatgtgtctgtgcttgtgatcggtgccgatcaatcaatcgaggcagagagccgagacagagtcgacctgcatcttcctggacagcaacaagagctggtgatccaagtggctaaagcagcaaaaggaccggtcttgctcgtcattatgtccggtggaggtttcgatattacattcgctaagaatgacccaaagatcgccggaattttgtgggttggttatcccggagaagccggtggtatcgccattgctgatatcatctttggccgttataatccaagtgggaaattaccgatgacgtggtatccacagtcgtatgtagagaaagttccgatgacaataatgaacatgagacccgataaagcaagcgggtatccgggtcggacttaccgattctacaccggagaaacagtatacgcattcggagatggactcagctacaccaaattcagtcacactttagtcaaagctccaagtctcgtttctctcggtctcgaagagaatcacgtttgccgatcatcggaatgtcaatcgctagacgcgatcggaccgcactgcgaaaacgctgtctccggcggtggatcggcgtttgaagttcatatcaaggtacgaaacggaggagatagagaagggattcacacggtgtttctattcacgacgccgccggcgattcacggatcgccgaggaagcatttggtaggattcgagaagattcgattggggaagagggaagaagcggtggttaggtttaaggtagagatatgtaaagatctgagtgtggttgatgagattgggaagaggaagattggtttgggaaagcatcttcttcatgtcggagatttaaaacattccttaagcattagaatctgattctatatttttatttgaggaagaaaaaaagaatattaatatgcttaagcttttgcaagttggaaaagaaaagt

SEQ ID NO: 45656 - protein, 793 aa, Arabidopsis thaliana
  peptide (1)..(793): Ceres Seq. ID no. 13592202
DPKKSKHKAMGSSSPLTRRNRAPPSSVSSVYLIFLCFFLYFLNFSNAQSSPVFACDVAANPSLAAYGFCNTVLKIEYRVADLVARLTLQEKIGFLVSKANGVTRLGIPTYEWWSEALHGVSYIGPGTHFSSQVPGATSFPQVILTAASFNVSLFQAIGKVVSTEARAMYNVGLAGLTYWSPNVNIFRDPRWGRGQETPGEDPLLASKYASGYVKGLQETDGGDSNRLKVAACCKHYTAYDVDNWKGVERYSFNAVVTQQDMDDTYQPPFKSCVVDGNVASVMCSYNQVNGKPTCADPDLLSGVIRGEWKLNGYIVSDCDSVDVLYKNQHYTKTPAEAAAISILAGLDLNCGSFLGQHTEEAVKSGLVNEAAIDKAISNNFLTLMRLGFFDGNPKNQIYGGLGPTDVCTSANQELAADAARQGIVLLKNTGCLPLSPKSIKTLAVIGPNANVTKTMIGNYEGTPCKYTTPLQGLAGTVSTTYLPGCSNVACAVADVAGATKLAATADVSVLVIGADQSIEAESRDRVDLHLPGQQQELVIQVAKAAKGPVLLVIMSGGGFDITFAKNDPKIAGILWVGYPGEAGGIAIADIIFGRYNPSGKLPMTWYPQSYVEKVPMTIMNMRPDKASGYPGRTYRFYTGETVYAFGDGLSYTKFSHTLVKAPSLVSLGLEENHVCRSSECQSLDAIGPHCENAVSGGGSAFEVHIKVRNGGDREGIHTVFLFTTPPAIHGSPRKHLVGFEKIRLGKREEAVVRFKVEICKDLSVVDEIGKRKIGLGKHLLHVGDLKHSLSIRI

SEQ ID NO: 45657 - protein, 784 aa, Arabidopsis thaliana
  peptide (1)..(784): Ceres Seq. ID no. 13592203
MGSSSPLTRRNRAPPSSVSSVYLIFLCFFLYFLNFSNAQSSPVFACDVAANPSLAAYGFCNTVLKIEYRVADLVARLTLQEKIGFLVSKANGVTRLGIPTYEWWSEALHGVSYIGPGTHFSSQVPGATSFPQVILTAASFNVSLFQAIGKVVSTEARAMYNVGLAGLTYWSPNVNIFRDPRWGRGQETPGEDPLLASKYASGYVKGLQETDGGDSNRLKVAACCKHYTAYDVDNWKGVERYSFNAVVTQQDMDDTYQPPFKSCVVDGNVASVMCSYNQVNGKPTCADPDLLSGVIRGEWKLNGYIVSDCDSVDVLYKNQHYTKTPAEAAAISILAGLDLNCGSFLGQHTEEAVKSGLVNEAAIDKAISNNFLTLMRLGFFDGNPKNQIYGGLGPTDVCTSANQELAADAARQGIVLLKNTGCLPLSPKSIKTLAVIGPNANVTKTMIGNYEGTPCKYTTPLQGLAGTVSTTYLPGCSNVACAVADVAGATKLAATADVSVLVIGADQSIEAESRDRVDLHLPGQQQELVIQVAKAAKGPVLLVIMSGGGFDITFAKNDPKIAGILWVGYPGEAGGIAIADIIFGRYNPSGKLPMTWYPQSYVEKVPMTIMNMRPDKASGYPGRTYRFYTGETVYAFGDGLSYTKFSHTLVKAPSLVSLGLEENHVCRSSECQSLDAIGPHCENAVSGGGSAFEVHIKVRNGGDREGIHTVFLFTTPPAIHGSPRKHLVGFEKIRLGKREEAVVRFKVEICKDLSVVDEIGKRKIGLGKHLLHVGDLKHSLSIRI

SEQ ID NO: 45658 - protein, 626 aa, Arabidopsis thaliana
  peptide (1)..(626): Ceres Seq. ID no. 13592204
MYNVGLAGLTYWSPNVNIFRDPRWGRGQETPGEDPLLASKYASGYVKGLQETDGGDSNRLKVAACCKHYTAYDVDNWKGVERYSFNAVVTQQDMDDTYQPPFKSCVVDGNVASVMCSYNQVNGKPTCADPDLLSGVIRGEWKLNGYIVSDCDSVDVLYKNQHYTKTPAEAAAISILAGLDLNCGSFLGQHTEEAVKSGLVNEAAIDKAISNNFLTLMRLGFFDGNPKNQIYGGLGPTDVCTSANQELAADAARQGIVLLKNTGCLPLSPKSIKTLAVIGPNANVTKTMIGNYEGTPCKYTTPLQGLAGTVSTTYLPGCSNVACAVADVAGATKLAATADVSVLVIGADQSIEAESRDRVDLHLPGQQQELVIQVAKAAKGPVLLVIMSGGGFDITFAKNDPKIAGILWVGYPGEAGGIAIADIIFGRYNPSGKLPMTWYPQSYVEKVPMTIMNMRPDKASGYPGRTYRFYTGETVYAFGDGLSYTKFSHTLVKAPSLVSLGLEENHVCRSSECQSLDAIGPHCENAVSGGGSAFEVHIKVRNGGDREGIHTVFLFTTPPAIHGSPRKHLVGFEKIRLGKREEAVVRFKVEICKDLSVVDEIGKRKIGLGKHLLHVGDLKHSLSIRI

SEQ ID NO: 45659 - DNA, 1448 bp, Arabidopsis thaliana
  misc_feature (1)..(1448): Ceres Seq. ID no. 13646708
  misc_feature (1)..(1448): Ortholog of  Ceres SEQ ID NO 14310635 as cited in SEQ ID NO 53821
gtactgtatgttgacaaattgaatagtctctgatgatttcgatcaaagagaagccacggggggagcggtagcacttaaaggacgaaagctgtgttagtattctctccactgtaaaggacaagatgtctcagaagcgaaatcttacttcttggatgagttctagggatcccgagattactccgagtaagtctcattgtaagaagcctaaggatgaaggaccaaccgaagagcacaacagtagaaatgccccttccaacaagtcagaacacgccgagccaagttcaaataccactgaattctctaaacttatggaaggcgttgtttttgtactttcgggctttgttaatcctgagaggagtacactgaggtcacaagccttgacaatgggagccacctatcaacctgactggaacgctggctctaccttgttgatttgtgcttttcctaacactccaaagttccgtcaagttgaaacaaatggtggaacaattatctcaaaggagtggataactgagtgttatgcgcagaagaagttggtagatatcgagcaataccttatgcatgctggaaaaccatggaggaaaagcagtagtccccaagatgctaatcgagaaaagagagaacacctgtctaaaaaaccagagaagcaagtagagaaaaaaacagaaacaaggggaacaccatctacctcatccaagaatagatcagcttgcaatcttgtgaaagagccattttctgttacagaggtgaagaaatgggccagggatgacctaagtcaaaccatctcatggcttgagagtcaggaggaaaaaccagaaccaggcgaaatcaagcgaatagctgcggaaggagtcttaacctgcttacaagacgccatagattctcttgaacagaagcaggacattggatcagttacagagctatggagctttgtccctcgtgtagtgaaggagcttggaaagatggaatcgtcttctaaaaaggaaaattcaacagcatcaaaggaagaagtttgcaaacaagcaaagtcgtggaaaaagatctacgaagctgagctagcaaaaccgggcgaagatgaatcgacctctcgggttgcttgtggctatgacagtgatatgaccgttgagatgactgaagaagagatcgaacttgcttataggaacgtttctttagagtgtctttagatcaaacttgtttcattttgcatatgatctcttaaggaattccaagaattcttgttatactcggtttgttcggtttgagtaggatgttattactgataaaaatttgaaattaatccggtctgcttggttcggaaagaatgtttctaattagaatttatttatgctggtttggattcgattgagagatgtaatcggttgcaattaataagtcggtttgatttgatagaaaaaaaaaaaaaaaaaaaactcgagggggggcccggt

SEQ ID NO: 45660 - protein, 353 aa, Arabidopsis thaliana
  peptide (1)..(353): Ceres Seq. ID no. 13646709
MSQKRNLTSWMSSRDPEITPSKSHCKKPKDEGPTEEHNSRNAPSNKSEHAEPSSNTTEFSKLMEGVVFVLSGFVNPERSTLRSQALTMGATYQPDWNAGSTLLICAFPNTPKFRQVETNGGTIISKEWITECYAQKKLVDIEQYLMHAGKPWRKSSSPQDANREKREHLSKKPEKQVEKKTETRGTPSTSSKNRSACNLVKEPFSVTEVKKWARDDLSQTISWLESQEEKPEPGEIKRIAAEGVLTCLQDAIDSLEQKQDIGSVTELWSFVPRVVKELGKMESSSKKENSTASKEEVCKQAKSWKKIYEAELAKPGEDESTSRVACGYDSDMTVEMTEEEIELAYRNVSLECL

SEQ ID NO: 45661 - protein, 343 aa, Arabidopsis thaliana
  peptide (1)..(343): Ceres Seq. ID no. 13646710
MSSRDPEITPSKSHCKKPKDEGPTEEHNSRNAPSNKSEHAEPSSNTTEFSKLMEGVVFVLSGFVNPERSTLRSQALTMGATYQPDWNAGSTLLICAFPNTPKFRQVETNGGTIISKEWITECYAQKKLVDIEQYLMHAGKPWRKSSSPQDANREKREHLSKKPEKQVEKKTETRGTPSTSSKNRSACNLVKEPFSVTEVKKWARDDLSQTISWLESQEEKPEPGEIKRIAAEGVLTCLQDAIDSLEQKQDIGSVTELWSFVPRVVKELGKMESSSKKENSTASKEEVCKQAKSWKKIYEAELAKPGEDESTSRVACGYDSDMTVEMTEEEIELAYRNVSLECL

SEQ ID NO: 45662 - protein, 291 aa, Arabidopsis thaliana
  peptide (1)..(291): Ceres Seq. ID no. 13646711
MEGVVFVLSGFVNPERSTLRSQALTMGATYQPDWNAGSTLLICAFPNTPKFRQVETNGGTIISKEWITECYAQKKLVDIEQYLMHAGKPWRKSSSPQDANREKREHLSKKPEKQVEKKTETRGTPSTSSKNRSACNLVKEPFSVTEVKKWARDDLSQTISWLESQEEKPEPGEIKRIAAEGVLTCLQDAIDSLEQKQDIGSVTELWSFVPRVVKELGKMESSSKKENSTASKEEVCKQAKSWKKIYEAELAKPGEDESTSRVACGYDSDMTVEMTEEEIELAYRNVSLECL

SEQ ID NO: 45663 - DNA, 1646 bp, Arabidopsis thaliana
  misc_feature (1)..(1646): Ceres Seq. ID no. 12604019
  misc_feature (1)..(1646): Ortholog of  Ceres SEQ ID NO 15176403 as cited in SEQ ID NO 52988
tctctctctctctctatcttaactcaactattcagtttcaattttcaaatttcagaaaccattttctctctctatctctcttcttcttctttatctcagtaatggagacttcatcgacgatctcgatcggttcttgtttaaaagagcatcagaagatctacaaggaatggttcaacatcgccgattcagatggagatggtcgtgtttcgggtaacgatgctacaaagttcttcgcgatgtcaaagctttctcgccaggaactcaaacaggtttgggcagttgcggattcaaagcggcaaggatttctcggtttatcggactcgtctcattggcacaagaaggacatgaaattacttcagaccttctcaaaggctcaagtaagtggaaaattacatcttaaactgtttgaatcaagaggttctgatagtgtggaacttccagtgttggaaggactagaaaacgttgtatcaaagcagaaagtgtcaaaaacaaatgtggatgttgaagacaatgtagttaccaagccacaagtcacggcaaaaactccttggttcaaatcaaaatctattattaagccacaagtaaatgtggtgacaattgttgatggcttgaaaagattgtacactgaaaagctaaagcctttggaagtcacatatcggttcaatgattttgcatccccggtactggtgagtaatatccttactgtttcagaaacacttactagtagcgattttgatgccaaaccaatggtaatgcttttgggtcaatattccaccggaaaaacaacatttataaaacacttgctcggatgtgactacccaggagctcatatcggtccagagccaacaacagataggtttgtagttgcaatgagtggaccagatgagcggactatacctggaaataccatggctgttcaagctgacatgccatttaacggactaacaagctttggaggtgctttcctctcaaagttcgagtgttctcaaatgccgcatccggtcttggaccaaattactcttgtagacactcctggagttctttcaggagagaaacaaaggatgcaaaggagctatgacttcactggtgtcatctcatggtttgcatctaaatgcgacatgattctcctgctctttgatccccacaagcttgacatcagtgatgaattcaaacgtgtgataacatctctacgtggtaatgaagacaagatccgtgttgtcttaaacaaagctgaccaagttgatactcaacaaccgctttttctaaagctaatgagagtgtatggagcattgatgtggtcgcttggtaaagtcctgaacacaccagaggtcgtacgtgtctatattgggtccttcaatgacaaacccataaacgaagttgcagttggaccgattgggaaagaactctttgagaaagagcaaaatgatcttctagcagacttaatggacgtacccaagaaagcatgtgacagaaagattaatgagtttgtgaagcgagctcgatctgcaaagataaatgcatacataatgagtcaccttaagaaggaaatgccagcaatgatgggcaaatccaaagctcagcaacgtctcatggacaatctcgaagaagaatttggaaaggtgcgtaaaatatctcatttggtctag

SEQ ID NO: 45664 - protein, 547 aa, Arabidopsis thaliana
  peptide (1)..(547): Ceres Seq. ID no. 12604020
SLSLYLNSTIQFQFSNFRNHFLSLSLFFFFISVMETSSTISIGSCLKEHQKIYKEWFNIADSDGDGRVSGNDATKFFAMSKLSRQELKQVWAVADSKRQGFLGLSDSSHWHKKDMKLLQTFSKAQVSGKLHLKLFESRGSDSVELPVLEGLENVVSKQKVSKTNVDVEDNVVTKPQVTAKTPWFKSKSIIKPQVNVVTIVDGLKRLYTEKLKPLEVTYRFNDFASPVLVSNILTVSETLTSSDFDAKPMVMLLGQYSTGKTTFIKHLLGCDYPGAHIGPEPTTDRFVVAMSGPDERTIPGNTMAVQADMPFNGLTSFGGAFLSKFECSQMPHPVLDQITLVDTPGVLSGEKQRMQRSYDFTGVISWFASKCDMILLLFDPHKLDISDEFKRVITSLRGNEDKIRVVLNKADQVDTQQPLFLKLMRVYGALMWSLGKVLNTPEVVRVYIGSFNDKPINEVAVGPIGKELFEKEQNDLLADLMDVPKKACDRKINEFVKRARSAKINAYIMSHLKKEMPAMMGKSKAQQRLMDNLEEEFGKVRKISHLV

SEQ ID NO: 45665 - protein, 514 aa, Arabidopsis thaliana
  peptide (1)..(514): Ceres Seq. ID no. 12604021
METSSTISIGSCLKEHQKIYKEWFNIADSDGDGRVSGNDATKFFAMSKLSRQELKQVWAVADSKRQGFLGLSDSSHWHKKDMKLLQTFSKAQVSGKLHLKLFESRGSDSVELPVLEGLENVVSKQKVSKTNVDVEDNVVTKPQVTAKTPWFKSKSIIKPQVNVVTIVDGLKRLYTEKLKPLEVTYRFNDFASPVLVSNILTVSETLTSSDFDAKPMVMLLGQYSTGKTTFIKHLLGCDYPGAHIGPEPTTDRFVVAMSGPDERTIPGNTMAVQADMPFNGLTSFGGAFLSKFECSQMPHPVLDQITLVDTPGVLSGEKQRMQRSYDFTGVISWFASKCDMILLLFDPHKLDISDEFKRVITSLRGNEDKIRVVLNKADQVDTQQPLFLKLMRVYGALMWSLGKVLNTPEVVRVYIGSFNDKPINEVAVGPIGKELFEKEQNDLLADLMDVPKKACDRKINEFVKRARSAKINAYIMSHLKKEMPAMMGKSKAQQRLMDNLEEEFGKVRKISHLV

SEQ ID NO: 45666 - protein, 469 aa, Arabidopsis thaliana
  peptide (1)..(469): Ceres Seq. ID no. 12604022
MSKLSRQELKQVWAVADSKRQGFLGLSDSSHWHKKDMKLLQTFSKAQVSGKLHLKLFESRGSDSVELPVLEGLENVVSKQKVSKTNVDVEDNVVTKPQVTAKTPWFKSKSIIKPQVNVVTIVDGLKRLYTEKLKPLEVTYRFNDFASPVLVSNILTVSETLTSSDFDAKPMVMLLGQYSTGKTTFIKHLLGCDYPGAHIGPEPTTDRFVVAMSGPDERTIPGNTMAVQADMPFNGLTSFGGAFLSKFECSQMPHPVLDQITLVDTPGVLSGEKQRMQRSYDFTGVISWFASKCDMILLLFDPHKLDISDEFKRVITSLRGNEDKIRVVLNKADQVDTQQPLFLKLMRVYGALMWSLGKVLNTPEVVRVYIGSFNDKPINEVAVGPIGKELFEKEQNDLLADLMDVPKKACDRKINEFVKRARSAKINAYIMSHLKKEMPAMMGKSKAQQRLMDNLEEEFGKVRKISHLV

SEQ ID NO: 45667 - DNA, 1489 bp, Arabidopsis thaliana
  misc_feature (1)..(1489): Ceres Seq. ID no. 13593099
  misc_feature (1)..(1489): Ortholog of  Ceres SEQ ID NO 14305994 as cited in SEQ ID NO 52280
ccccccccccscgaaaatgaatgttktgtttgtttttgtacggtggagagaagaacgaaaagatgatcaggtaaaaaatgaaacttggaaatcatgcaaagccacacctctcccttcaacacattcttacgtgtcctcttctcttcactccatatctcctttttattaccaaaaatatatatttcaatcccatttatatgtacgttctcttagacttatctctatatacccccttttaatttgtgtgctcttagcctttactctatagttttatatcatatcaatcgacatggcgaatgtggaccgtgatcggcgtgtgcatgtagaccgtactgacaaacgtgttcatcagccaaactacgaagatgatgtcggttttggtggctatggcggttatggtgctggttctgattataagagtcgcggcccctccactaaccaagtatttttgtggtctctttagtttttcttgtgttttcctatgatcacgctctccaaactatttgaagattttctgtaaattcattttaaacagaaagataaataaaatagtgaagaaccataggaatcgtacgttacgttaattatttccttttagttcttaagtcctaattaggattcctttaaaagatgcaacaatctaattgttcacaaaatgagtaaagtttgaaacagatttttatacaccacttgcatatgtttaacatggtgatgcatgcatggatcatatctagagatttatggttggatatatatttaacattttgatattagtttttaaaaaggtctgaataaacaacacttgttagataaactcgatataatcaatacatgcagatcttggcacttatagcaggagttcccattggtggcacactgctaaccctagctggactcactctagccggttcggtgatcggcttgctagtctccatacccctcttcctcctcttcagtccggtgatagtcccggcggctctcactattgggcttgctgtgacgggaatcttggcttctggtttgtttgggttgacgggtctgagctcggtctcgtgggtcctcaactacctccgtgggacgagtgatacagtgccagagcaattggactacgctaaacggcgtatggctgatgcggtaagctatgctggtatgaagggaaaagagatgggtcagtatgtgcaagataaggcgcatgaggctcgtgagactgagttcatgactgagacccatgagccgggtaaggccaggagaggctcataagctaatataaattgcgggagtcagttggaaaggcgataaatgtagttttacttttatgttccagtttctttcctcttttaagaatatctttgtctatatgtgtacgttcgttttgtcttgtccaaataaaaatccttgttagtgaaataagaaatgaaataaatatgttttcctttttgaaaaaaaaaaaaaaaaaaaaaaarctcgagggggggcccggtactcaatt

SEQ ID NO: 45668 - protein, 142 aa, Arabidopsis thaliana
  peptide (1)..(142): Ceres Seq. ID no. 15221199
MQILALIAGVPIGGTLLTLAGLTLAGSVIGLLVSIPLFLLFSPVIVPAALTIGLAVTGILASGLFGLTGLSSVSWVLNYLRGTSDTVPEQLDYAKRRMADAVSYAGMKGKEMGQYVQDKAHEARETEFMTETHEPGKARRGS

SEQ ID NO: 45669 - protein, 88 aa, Arabidopsis thaliana
  peptide (1)..(88): Ceres Seq. ID no. 15221200
  misc_feature (4)..(4): Xaa is any aa, unknown or other
  misc_feature (9)..(9): Xaa is any aa, unknown or other
PPPXKMNVXFVFVRWREERKDDQVKNETWKSCKATPLPSTHSYVSSSLHSISPFYYQKYIFQSHLYVRSLRLISIYPLLICVLLAFTL

SEQ ID NO: 45670 - protein, 83 aa, Arabidopsis thaliana
  peptide (1)..(83): Ceres Seq. ID no. 15221201
  misc_feature (4)..(4): Xaa is any aa, unknown or other
MNVXFVFVRWREERKDDQVKNETWKSCKATPLPSTHSYVSSSLHSISPFYYQKYIFQSHLYVRSLRLISIYPLLICVLLAFTL

SEQ ID NO: 45671 - DNA, 1927 bp, Arabidopsis thaliana
  misc_feature (1)..(1927): Ceres Seq. ID no. 12561230
  misc_feature (1)..(1927): Ortholog of  Ceres SEQ ID NO 13596319 as cited in SEQ ID NO 67933
tcgatcaatcttcaactctcaaattgaagtttccatgggaggccacgaaggtttcagcaaccaacgcctctcctccgccacatggttctctcatttccgtgcttcagctctccgatctaaatcactgccccctccgtcctcgcagactgccgttcgctccacctctggcgactctctggttcgtcgcctcggccttttcgacctcatactgttgggcgtcggcgcttccatcggcgccggtgtcttcgtcgtcaccggaaccgtcgctcgcgatgctggacctggagtcacaatcagcttcttgctagctggagcatcgtgtgtgttgaacgctctctgttatgctgaactttcatctcgtttccctgctgttgttggtggagcttacatgtactcttactcagctttcaatgagatcacagcttttcttgttttcgttcaactcatgcttgactatcatattggcgccgctagtatctcccgtagcttggccagctatgctgttgctcttcttgagctttttccagccctcaagggctctattcctctctggatgggaagcggcaaagagctcttgggagggcttctctctttgaatattttggctcccattttacttgctctcttgacccttgttctatgccaaggtgtgcgagaatcttccgctgtcaactccgttatgactgctactaaggtcgtgatcgttctcgttgtgatttgtgccggtgcttttgaaattgatgtagcaaattggtctccttttgcgcctaatggttttaaagcagttctcactggagctactgttgtcttcttttcatatgttggatttgatgcagttgctaattctgctgaagaatcgaagaaccctcagcgcgatttgccaatcggaattatggggagccttctggtttgtatctcgctgtatattggcgtatgtttggtgctcaccgggatggtcccttttagcctcctcagcgaagatgctcctttagctgaagccttttcatcaaagggtatgaagttcgtctcaatcttaatcagtattggtgctgttgctggactcacaactactctgcttgttggtctttatgttcagtccaggttatatctgggacttggaagggatggtctattgccttcaatcttttccagaatacacccaactcttcatacacctcttcattctcaaatctggtgcggcattgtagctggcgttttagctggcatatttaatgtacatagtctttcccatattctgtctgttggtacattgactgggtattcagttgttgcggcttgtgttgtggcattgagactgaatgataaaaaagatagagagtcgtccaatagatggacatcaagttggcaggaaggcgtcatttgccttgttataattgcatgcagtggttttggtgctggcgtattttaccgtttcagtgcttcagttatatttattctcctctcagttggtgtggcagttgttgcttcagcagttcttcattatcgccaagcttatgctctgcctctaggttctgggtttagctgtcctggtgtacccattgtgccatccgtttgcattttcttcaacatcttcttatttgctcagttgcattatgaagcatggataagatttgttgttgtcagtgtgcttgcaactgccgtttatgccttgtatgggcagtaccacgcagatccgagcatgttggattatcagagggcacctgaaactgaaagcgacgcttagtaatgctacattatagttgtgttacttaaagccatttgtagagttgatagcaagtttctgcgtttcgtgagagacatactgtatgtcacatacatattcaggtcgagtttaaggattggatgggataaggcagttaaacattattgttgtaaagaagttaataaaagtatgcttgtgcatttc

SEQ ID NO: 45672 - protein, 580 aa, Arabidopsis thaliana
  peptide (1)..(580): Ceres Seq. ID no. 12561231
RSIFNSQIEVSMGGHEGFSNQRLSSATWFSHFRASALRSKSLPPPSSQTAVRSTSGDSLVRRLGLFDLILLGVGASIGAGVFVVTGTVARDAGPGVTISFLLAGASCVLNALCYAELSSRFPAVVGGAYMYSYSAFNEITAFLVFVQLMLDYHIGAASISRSLASYAVALLELFPALKGSIPLWMGSGKELLGGLLSLNILAPILLALLTLVLCQGVRESSAVNSVMTATKVVIVLVVICAGAFEIDVANWSPFAPNGFKAVLTGATVVFFSYVGFDAVANSAEESKNPQRDLPIGIMGSLLVCISLYIGVCLVLTGMVPFSLLSEDAPLAEAFSSKGMKFVSILISIGAVAGLTTTLLVGLYVQSRLYLGLGRDGLLPSIFSRIHPTLHTPLHSQIWCGIVAGVLAGIFNVHSLSHILSVGTLTGYSVVAACVVALRLNDKKDRESSNRWTSSWQEGVICLVIIACSGFGAGVFYRFSASVIFILLSVGVAVVASAVLHYRQAYALPLGSGFSCPGVPIVPSVCIFFNIFLFAQLHYEAWIRFVVVSVLATAVYALYGQYHADPSMLDYQRAPETESDA

SEQ ID NO: 45673 - protein, 569 aa, Arabidopsis thaliana
  peptide (1)..(569): Ceres Seq. ID no. 12561232
MGGHEGFSNQRLSSATWFSHFRASALRSKSLPPPSSQTAVRSTSGDSLVRRLGLFDLILLGVGASIGAGVFVVTGTVARDAGPGVTISFLLAGASCVLNALCYAELSSRFPAVVGGAYMYSYSAFNEITAFLVFVQLMLDYHIGAASISRSLASYAVALLELFPALKGSIPLWMGSGKELLGGLLSLNILAPILLALLTLVLCQGVRESSAVNSVMTATKVVIVLVVICAGAFEIDVANWSPFAPNGFKAVLTGATVVFFSYVGFDAVANSAEESKNPQRDLPIGIMGSLLVCISLYIGVCLVLTGMVPFSLLSEDAPLAEAFSSKGMKFVSILISIGAVAGLTTTLLVGLYVQSRLYLGLGRDGLLPSIFSRIHPTLHTPLHSQIWCGIVAGVLAGIFNVHSLSHILSVGTLTGYSVVAACVVALRLNDKKDRESSNRWTSSWQEGVICLVIIACSGFGAGVFYRFSASVIFILLSVGVAVVASAVLHYRQAYALPLGSGFSCPGVPIVPSVCIFFNIFLFAQLHYEAWIRFVVVSVLATAVYALYGQYHADPSMLDYQRAPETESDA

SEQ ID NO: 45674 - protein, 451 aa, Arabidopsis thaliana
  peptide (1)..(451): Ceres Seq. ID no. 12561233
MYSYSAFNEITAFLVFVQLMLDYHIGAASISRSLASYAVALLELFPALKGSIPLWMGSGKELLGGLLSLNILAPILLALLTLVLCQGVRESSAVNSVMTATKVVIVLVVICAGAFEIDVANWSPFAPNGFKAVLTGATVVFFSYVGFDAVANSAEESKNPQRDLPIGIMGSLLVCISLYIGVCLVLTGMVPFSLLSEDAPLAEAFSSKGMKFVSILISIGAVAGLTTTLLVGLYVQSRLYLGLGRDGLLPSIFSRIHPTLHTPLHSQIWCGIVAGVLAGIFNVHSLSHILSVGTLTGYSVVAACVVALRLNDKKDRESSNRWTSSWQEGVICLVIIACSGFGAGVFYRFSASVIFILLSVGVAVVASAVLHYRQAYALPLGSGFSCPGVPIVPSVCIFFNIFLFAQLHYEAWIRFVVVSVLATAVYALYGQYHADPSMLDYQRAPETESDA

SEQ ID NO: 45675 - DNA, 1288 bp, Arabidopsis thaliana
  misc_feature (1)..(1288): Ceres Seq. ID no. 13591723
  misc_feature (1)..(1288): Ortholog of  Ceres SEQ ID NO 14316324 as cited in SEQ ID NO 55612
  misc_feature (1)..(1288): Ortholog of  Ceres SEQ ID NO 14316378 as cited in SEQ ID NO 57746
  misc_feature (1)..(1288): Ortholog of  Ceres SEQ ID NO 13596097 as cited in SEQ ID NO 68421
  misc_feature (1)..(1288): Ortholog of  Ceres SEQ ID NO 13598439 as cited in SEQ ID NO 69016
  misc_feature (1)..(1288): Ortholog of  Ceres SEQ ID NO 13599524 as cited in SEQ ID NO 0
gacagagggtattattgtcagattctccataagcctcttctctctctctcagagtgtggnggtttcatactatttatgtaaaaggaagcaacgggtgagaagaattaaaaagccgcaattttgggatcataagagttctcttcttcatctgtgattcattccgttgttacccgccaggcaccagccaccgtactttttctctctccggcaaaatccgagtctaaaaatgacgagtaaaagcaaaatcctgttcatcggaggaacgggttatatcgggaaatatatagtggaagcgagcgcaagatctggccacccaaccttagttctcgttcgaaattcgacgctcacaagcccttcacgatcctccaccatcgagaatttcaagaacctcggcgttcagtttctcctcggagaccttgacgaccatacgagtctcgtgaattcgataaagcaagcggatgtggtcatctctactgttgggcactccctcttgggacatcaatacaagatcatctccgccattaaagaagccggtaatgttaagagattctttccctccgagtttggaaatgacgtagaccgtgttttcactgtcgaaccggccaagtcagcctatgctacaaaggccaaaatccggcgaacaattgaggccgaaggaatcccatacacttatgtctcatgcaacttcttcgctggctacttcctcccaactctagctcagcctggtgctacttctgctccacgggataaggtcattgttttaggtgatgggaaccccaaagctgtgttcaacaaggaagaagacatcggaacttacacaatcaatgccgtagatgatccaagaactttgaacaagatcttatatattaggccaccaatgaacacttactcattcaatgatcttgtctcgctttgggagaacaagattggcaaaacacttgaaagaatctacgttccagaagaacaactcctcaaacagatcatagaatcatcacccccactcaacgtgatgctatccctttgtcactgcgttttcgtgaaaggaggacacacaagctttgaaatcgaaccttctttcggggtagaagcttctgagctttaccctgatgtcaaatacactactgttgatgaaatcctcaaccaatatgtctaaagctgagtgcttaacgagaatgactctccacaatttgtattttgggttttaaataagtggctattaacctgtctgtttctccggctaatcaaaccgaagtggtggtttattttgaatgtaaggctttagatccgg

SEQ ID NO: 45676 - protein, 308 aa, Arabidopsis thaliana
  peptide (1)..(308): Ceres Seq. ID no. 13591724
MTSKSKILFIGGTGYIGKYIVEASARSGHPTLVLVRNSTLTSPSRSSTIENFKNLGVQFLLGDLDDHTSLVNSIKQADVVISTVGHSLLGHQYKIISAIKEAGNVKRFFPSEFGNDVDRVFTVEPAKSAYATKAKIRRTIEAEGIPYTYVSCNFFAGYFLPTLAQPGATSAPRDKVIVLGDGNPKAVFNKEEDIGTYTINAVDDPRTLNKILYIRPPMNTYSFNDLVSLWENKIGKTLERIYVPEEQLLKQIIESSPPLNVMLSLCHCVFVKGGHTSFEIEPSFGVEASELYPDVKYTTVDEILNQYV

SEQ ID NO: 45677 - DNA, 1528 bp, Arabidopsis thaliana
  misc_feature (1)..(1528): Ceres Seq. ID no. 13646519
  misc_feature (1)..(1528): Ortholog of  Ceres SEQ ID NO 15170151 as cited in SEQ ID NO 53069
  misc_feature (1)..(1528): Ortholog of  Ceres SEQ ID NO 13594209 as cited in SEQ ID NO 59089
  misc_feature (1)..(1528): Ortholog of  Ceres SEQ ID NO 14313084 as cited in SEQ ID NO 59183
  misc_feature (1)..(1528): Ortholog of  Ceres SEQ ID NO 14316039 as cited in SEQ ID NO 62062
  misc_feature (1)..(1528): Ortholog of  Ceres SEQ ID NO 14308041 as cited in SEQ ID NO 62601
  misc_feature (1)..(1528): Ortholog of  Ceres SEQ ID NO 14303546 as cited in SEQ ID NO 64893
  misc_feature (1)..(1528): Ortholog of  Ceres SEQ ID NO 15176783 as cited in SEQ ID NO 65590
  misc_feature (1)..(1528): Ortholog of  Ceres SEQ ID NO 14308007 as cited in SEQ ID NO 65760
  misc_feature (1)..(1528): Ortholog of  Ceres SEQ ID NO 14308019 as cited in SEQ ID NO 65849
  misc_feature (1)..(1528): Ortholog of  Ceres SEQ ID NO 15170163 as cited in SEQ ID NO 66262
  misc_feature (1)..(1528): Ortholog of  Ceres SEQ ID NO 13502874 as cited in SEQ ID NO 66298
  misc_feature (1)..(1528): Ortholog of  Ceres SEQ ID NO 14307944 as cited in SEQ ID NO 66503
  misc_feature (1)..(1528): Ortholog of  Ceres SEQ ID NO 12614124 as cited in SEQ ID NO 68392
ggaggtttcccttcagaaatcagaaatggctcacatttggcttctaccacttatctttctcgtctgtattcttctggccgttttcaaccacaagaaacatccgaaatatcgacagtttccatgtcctcctggcttcccgatcataggaaacttacatcagatcggagaattaccgcatcagactctatggaaactctcaaagaagtatggtccggtgatgcatttgatgcttggaagagtcccaacagtcgtagtttcttcttcggatacagcaagacaagttttgagagttcatgacctccattgttgtactcgtccaagcttgtcagggccaagagagctttcgtacaactatctggacattgctttctctccttatgatgattattggaaagaagttaggaagctctgtgttcaagaacttttcagtactaaacaagttcactcgattcaacctattaaggacgaggaggtcaagaaaatgatcgattcaattgcggaatcagcctctcagaagaatccggttaacttgaacaataagtgtcttgaattaacagtaagtgtagtatgcaggacagcttttggggttagttttgagggaactgtgctcaacagtgacagattcaacaaaatagtccgcgaggcgctcgagatgttgggaagcttttctgccgcggattttattccgtatgtcggatggatcatcgatgtgttgacgggtttgcaaggaaggagagaaagaagcaagagagatctcaatgcattctttgaacaaatgtttgatttgcataaagagggaaagaaagaagggaatgaagattttgtggacttgctcttaaggttggagaaagaagaggcagttcttggaaatgataaacttacaagaaaccatatcaaagcaatcttgctggatgttctacttgcgggaatcgatacttctgcaataacaatgacatgggcaatgacagaacttgcaagaaatccacgagtgatgaagaaagttcaatctgaaataagaactcaaatggggaacagatcaatgataagtttcgaagacatggatcagctagagtatctgaaaatggtgatcaaagaaacatggaggctacatcctacaacacctcttttgcttccaagagaagcaatgtctgaatttgatatcaacggctacactattcctgtcaagacacggcttcatgtgaatgtttgggctattggtcgtgatcctgatacttggaaagaccctgaagtgtttctcccggagaggtttatggataataacattgatgcaaaaggacaacattttgagctgttaccgtttgggggcggtcggagaatctgtcctgcaatatacatggggacaacaatggttgagtttggtctagctaatctcttgtatcattttgactggaagttaccagaaggcgtggaggttaaagatatcgacgtggaagaagctcctggactcactgtaaacaagaaaaacgagctcctacttgtgccagagatgagaagatcgtgtggttga

SEQ ID NO: 45678 - protein, 508 aa, Arabidopsis thaliana
  peptide (1)..(508): Ceres Seq. ID no. 13646520
EVSLQKSEMAHIWLLPLIFLVCILLAVFNHKKHPKYRQFPCPPGFPIIGNLHQIGELPHQTLWKLSKKYGPVMHLMLGRVPTVVVSSSDTARQVLRVHDLHCCTRPSLSGPRELSYNYLDIAFSPYDDYWKEVRKLCVQELFSTKQVHSIQPIKDEEVKKMIDSIAESASQKNPVNLNNKCLELTVSVVCRTAFGVSFEGTVLNSDRFNKIVREALEMLGSFSAADFIPYVGWIIDVLTGLQGRRERSKRDLNAFFEQMFDLHKEGKKEGNEDFVDLLLRLEKEEAVLGNDKLTRNHIKAILLDVLLAGIDTSAITMTWAMTELARNPRVMKKVQSEIRTQMGNRSMISFEDMDQLEYLKMVIKETWRLHPTTPLLLPREAMSEFDINGYTIPVKTRLHVNVWAIGRDPDTWKDPEVFLPERFMDNNIDAKGQHFELLPFGGGRRICPAIYMGTTMVEFGLANLLYHFDWKLPEGVEVKDIDVEEAPGLTVNKKNELLLVPEMRRSCG

SEQ ID NO: 45679 - protein, 500 aa, Arabidopsis thaliana
  peptide (1)..(500): Ceres Seq. ID no. 13646521
MAHIWLLPLIFLVCILLAVFNHKKHPKYRQFPCPPGFPIIGNLHQIGELPHQTLWKLSKKYGPVMHLMLGRVPTVVVSSSDTARQVLRVHDLHCCTRPSLSGPRELSYNYLDIAFSPYDDYWKEVRKLCVQELFSTKQVHSIQPIKDEEVKKMIDSIAESASQKNPVNLNNKCLELTVSVVCRTAFGVSFEGTVLNSDRFNKIVREALEMLGSFSAADFIPYVGWIIDVLTGLQGRRERSKRDLNAFFEQMFDLHKEGKKEGNEDFVDLLLRLEKEEAVLGNDKLTRNHIKAILLDVLLAGIDTSAITMTWAMTELARNPRVMKKVQSEIRTQMGNRSMISFEDMDQLEYLKMVIKETWRLHPTTPLLLPREAMSEFDINGYTIPVKTRLHVNVWAIGRDPDTWKDPEVFLPERFMDNNIDAKGQHFELLPFGGGRRICPAIYMGTTMVEFGLANLLYHFDWKLPEGVEVKDIDVEEAPGLTVNKKNELLLVPEMRRSCG

SEQ ID NO: 45680 - protein, 436 aa, Arabidopsis thaliana
  peptide (1)..(436): Ceres Seq. ID no. 13646522
MHLMLGRVPTVVVSSSDTARQVLRVHDLHCCTRPSLSGPRELSYNYLDIAFSPYDDYWKEVRKLCVQELFSTKQVHSIQPIKDEEVKKMIDSIAESASQKNPVNLNNKCLELTVSVVCRTAFGVSFEGTVLNSDRFNKIVREALEMLGSFSAADFIPYVGWIIDVLTGLQGRRERSKRDLNAFFEQMFDLHKEGKKEGNEDFVDLLLRLEKEEAVLGNDKLTRNHIKAILLDVLLAGIDTSAITMTWAMTELARNPRVMKKVQSEIRTQMGNRSMISFEDMDQLEYLKMVIKETWRLHPTTPLLLPREAMSEFDINGYTIPVKTRLHVNVWAIGRDPDTWKDPEVFLPERFMDNNIDAKGQHFELLPFGGGRRICPAIYMGTTMVEFGLANLLYHFDWKLPEGVEVKDIDVEEAPGLTVNKKNELLLVPEMRRSCG

SEQ ID NO: 45681 - DNA, 1122 bp, Arabidopsis thaliana
  misc_feature (1)..(1122): Ceres Seq. ID no. 13591678
  misc_feature (1)..(1122): Ortholog of  Ceres SEQ ID NO 14306675 as cited in SEQ ID NO 52939
  misc_feature (1)..(1122): Ortholog of  Ceres SEQ ID NO 12608114 as cited in SEQ ID NO 57218
aaaaatcctcttaaaatctcataaagcccttcttatcttcttctcttctcctcaacttgaatacacagaaacaaaactgcttttgtctctcaagtcatttgtcttataaaaaggttctgttcttgaacaagggaaagaaacaaaaggctgataactcctgttttgtagattcctctgatattcagattcttacttctcaggaaaaccctaaagaaaatttctgtttttttttgagaaatatgaagatacaatgtgatgtgtgtgagaaagctccggccacgcttatatgttgtgctgatgaagctgctctctgcgctaaatgtgacgttgaggttcatgctgctaataaactcgctagcaaacaccaacgcctttttcttgactctctctcaactaaattccctccctgcgacatctgccttgagaaggcagctttcatattctgtgtagaggatagggctctgctctgcagagattgcgatgaggcgacccatgcgccaaatactcgctctgctaatcaccagaggttcttagccactggaatccgagttgctcttagttccactagttgcaatcaagaagtggaaaagaatcactttgacccatctaatcagcagagtctctctaaaccgccaactcagcaacccgctgctccatctcctttgtgggctaccgatgaattcttcagctactctgatcttgactgcagtaataaggagaaagagcaactcgatctcggggagctggattggcttgcagagatgggtctgtttggtgaccagcctgatcaagaggctctaccggtagccgaagttcccgagctttccttttcacatttggctcatgctcattcctacaacagacctatgaagtccaatgtacccaacaagaagcagaggcttgagtaccggtatgatgatgaagaagagcacttcctagtccccgacctaggctaaactatggatgaatctactaagctttataatatatagcacttgattcgcatagtcttcggctcttcgccttgctttctccatgatctgatatgtgtatcactgtaagtagcaggctaaaacttggaaaaaccttatcattttattagcaagtgaagccttaaattgc

SEQ ID NO: 45682 - protein, 238 aa, Arabidopsis thaliana
  peptide (1)..(238): Ceres Seq. ID no. 13591679
MKIQCDVCEKAPATLICCADEAALCAKCDVEVHAANKLASKHQRLFLDSLSTKFPPCDICLEKAAFIFCVEDRALLCRDCDEATHAPNTRSANHQRFLATGIRVALSSTSCNQEVEKNHFDPSNQQSLSKPPTQQPAAPSPLWATDEFFSYSDLDCSNKEKEQLDLGELDWLAEMGLFGDQPDQEALPVAEVPELSFSHLAHAHSYNRPMKSNVPNKKQRLEYRYDDEEEHFLVPDLG

SEQ ID NO: 45683 - DNA, 3301 bp, Arabidopsis thaliana
  misc_feature (1)..(3301): Ceres Seq. ID no. 12600421
  misc_feature (1)..(3301): Ortholog of  Ceres SEQ ID NO 15172108 as cited in SEQ ID NO 54876
gttcgcatctctatcttcttccgttgtctactgtttttcgttaaaccctacgattcttctttttttcaacgactgctcggatctttctcagtagagggaaccatgaatccctcactcgtcaccgccattaacgctccaatttcaccttctcctcggtctcctcttctttctcacttcctacctactttacctcaccgtttctccaagtctgagtgtctatctcgccgtcgttatcgagtttcgttccctcgtagctcagctgcttcctccgaccaactatcagtatctacgcaggcgaagaatcccggtatccatgggaataagaaggagctcactggattgcaaccgattgttgagaaaatgacaccgccggtgaggctagcgacttcagctgttgtattagcggcgtctttagctactggttacggccttgggctccgtttagccggctccaggaatattgcctttggtggggctgctgttgctggagccgccggtggagctgtcgtatatgcgttgaactctgctgtaccggaggtagctgctatcagtttgcataattatgttgccgaattcgaagatcctgcctctgtgacgaaagatgatgtagaaaagatcgctgataggtacggtgtcaacaaaggagacgaagcattccaggctgagatttgtgatatttattgccggtatgtaacttccgtgcttccaactgaaggacagtctcttaaaggggatgaagtggcgaagatagtcaagttcaaaaatgctttagggatagacgaacctgatgcagctgccatgcacatggagattggtcgcaggatttttaggcaaaggcttgagactggggagcgtgaaggtgatgcagaacagcgtcgggcatttatgaggcttgtatatgtttcagctcttgtgtttggagatgcttcatccttccttctaccttggaagcgagtattgaaggtcacagatgctcaggttgagattgctattcgtgaaaatgcaaagcagctgtatgccgaacggttaaaattagttggtagagatattaacgtagaaaaccttgtggaccttagaaaatcacaactatcattcaagctctctgatgagcttgctgaagacctgtttagagagcatacgagaaaagtagtcgtagagaacatttcatcggcactcagcatactcaaatcccgcacacgagcagcgaagagtttggcatctgtcgtggaagagcttgaaaaagtactggagtttaacaacctgctagtttccttgaaaagtcattcagaggcagatcaatttgcacgcggggttggccctatttctttgataggtgatgagtctgattttgagaggagaatggatgatttaaagctcctttatagagcatatgttacagatgctttatctggtgggcgcttagaagaaaataagctcgtggcaatgagccaacttagaaacatactcggtctgggaaaacgagaggctgaagctattagtgttgatgttacgtccaagtcttaccgtaaaagacttgctaacgctgtttctagtggtgaccttgaagcacaagacagtaaagcaaaataccttcaaaagctctgcgaagagctgcactttgatgcacagaaggcaggcgcaatccatgaagaaatctatcggcagaagcttcaacagtgtgttactgatggagagctgagcgatgacaatgttgctgctttattaaggttaagagttatgttgtgtattccccagcaaactgttgatacagctcatgcagaaatctgtggaaccatatttgaaaaggttgtcagggatgccatttcttctggagtggatggttatgatgctgaaactcgcaaatcagttagaaaggctgcacatggtcttcggttatccagagagactgccatgtctattgctagcaaagctgtccgtagggttttcacaaactatatcagacgagcaagagcagccgagaaccgtactgattcagcaaaggagctcaagaagatgattgctttcaacacgttggttgtgactgaaatggtggctgatatcaagggagaatcttctgataaggcacctgaggaggaccctgttcaagagaaagaagaagatgatgaagatgaagaatggggatcccttgaatcgctcagaaagacaagacccgacaaggaactcgctgagaaaatgggaaagcctggccagactgagataactctcaaagatgaccttcccgacagggacagaatagatctctacaaaacatacttgctctactgtgtaactggagaggtaacaagaatcccttttggcgcccagatcacaacaaagagagacgattcagagtacttgcttctaaatcagcttggtgggattctcggattgagttcgaaagaaatagtcaacattcacgtaggtttagccgagcaggcttttaggcaacaagctgaagtgattttagctgatgggcaattgacaaaggctagagtagagcagctagacgagttgcaaaaacaagttggtttgcctcagccacaagccgagaaggttatcaagaatataaccaccacaaaaatggcaaacgcgatagagaccgctgttaaccaaggaagactgaacataaagcagatacgggagctcaaggaggcaaatgtcagcctggacagcatgatcgctgtgagtctgagagagaaattattcaagaagacagtgagtgacatcttctcatcaggaactggtgaattcgatgaaaccgaagtctaccagacaatcccatccgatctcagtattgatgtggaaaaagccaaaagagttgtccatgatctcgctcagagtagattatcgaattcgctggtccaagccgtggcattactcaggcagagaaactctaaaggagtggtcttgtcgctgaatgatttgcttgcatgtgacaaagctgtgccggctgagccaatgtcatgggaggtctcagaggaattatctgatctatatgctatttattcaaagagtgatcccaaacccgcaccggaaaaagttttgaggctacaatatctgctgggaatagatgattcaactgcaactgccctccgtgaaatggaagatggagcattatcttctgctgcagaagagggcaatttcgtcttttaaatctttggagaaatcacttgagttattatgtattgtgttacggccgagggtggaaaaatgattttgaatttgaaatttgaccaaagtctgtgaaaattttgtatcagaaccataaacttgatatgattaatttgaaaatctgcaaacg

SEQ ID NO: 45684 - protein, 1050 aa, Arabidopsis thaliana
  peptide (1)..(1050): Ceres Seq. ID no. 12600422
VRISIFFRCLLFFVKPYDSSFFQRLLGSFSVEGTMNPSLVTAINAPISPSPRSPLLSHFLPTLPHRFSKSECLSRRRYRVSFPRSSAASSDQLSVSTQAKNPGIHGNKKELTGLQPIVEKMTPPVRLATSAVVLAASLATGYGLGLRLAGSRNIAFGGAAVAGAAGGAVVYALNSAVPEVAAISLHNYVAEFEDPASVTKDDVEKIADRYGVNKGDEAFQAEICDIYCRYVTSVLPTEGQSLKGDEVAKIVKFKNALGIDEPDAAAMHMEIGRRIFRQRLETGEREGDAEQRRAFMRLVYVSALVFGDASSFLLPWKRVLKVTDAQVEIAIRENAKQLYAERLKLVGRDINVENLVDLRKSQLSFKLSDELAEDLFREHTRKVVVENISSALSILKSRTRAAKSLASVVEELEKVLEFNNLLVSLKSHSEADQFARGVGPISLIGDESDFERRMDDLKLLYRAYVTDALSGGRLEENKLVAMSQLRNILGLGKREAEAISVDVTSKSYRKRLANAVSSGDLEAQDSKAKYLQKLCEELHFDAQKAGAIHEEIYRQKLQQCVTDGELSDDNVAALLRLRVMLCIPQQTVDTAHAEICGTIFEKVVRDAISSGVDGYDAETRKSVRKAAHGLRLSRETAMSIASKAVRRVFTNYIRRARAAENRTDSAKELKKMIAFNTLVVTEMVADIKGESSDKAPEEDPVQEKEEDDEDEEWGSLESLRKTRPDKELAEKMGKPGQTEITLKDDLPDRDRIDLYKTYLLYCVTGEVTRIPFGAQITTKRDDSEYLLLNQLGGILGLSSKEIVNIHVGLAEQAFRQQAEVILADGQLTKARVEQLDELQKQVGLPQPQAEKVIKNITTTKMANAIETAVNQGRLNIKQIRELKEANVSLDSMIAVSLREKLFKKTVSDIFSSGTGEFDETEVYQTIPSDLSIDVEKAKRVVHDLAQSRLSNSLVQAVALLRQRNSKGVVLSLNDLLACDKAVPAEPMSWEVSEELSDLYAIYSKSDPKPAPEKVLRLQYLLGIDDSTATALREMEDGALSSAAEEGNFVF

SEQ ID NO: 45685 - protein, 1016 aa, Arabidopsis thaliana
  peptide (1)..(1016): Ceres Seq. ID no. 12600423
MNPSLVTAINAPISPSPRSPLLSHFLPTLPHRFSKSECLSRRRYRVSFPRSSAASSDQLSVSTQAKNPGIHGNKKELTGLQPIVEKMTPPVRLATSAVVLAASLATGYGLGLRLAGSRNIAFGGAAVAGAAGGAVVYALNSAVPEVAAISLHNYVAEFEDPASVTKDDVEKIADRYGVNKGDEAFQAEICDIYCRYVTSVLPTEGQSLKGDEVAKIVKFKNALGIDEPDAAAMHMEIGRRIFRQRLETGEREGDAEQRRAFMRLVYVSALVFGDASSFLLPWKRVLKVTDAQVEIAIRENAKQLYAERLKLVGRDINVENLVDLRKSQLSFKLSDELAEDLFREHTRKVVVENISSALSILKSRTRAAKSLASVVEELEKVLEFNNLLVSLKSHSEADQFARGVGPISLIGDESDFERRMDDLKLLYRAYVTDALSGGRLEENKLVAMSQLRNILGLGKREAEAISVDVTSKSYRKRLANAVSSGDLEAQDSKAKYLQKLCEELHFDAQKAGAIHEEIYRQKLQQCVTDGELSDDNVAALLRLRVMLCIPQQTVDTAHAEICGTIFEKVVRDAISSGVDGYDAETRKSVRKAAHGLRLSRETAMSIASKAVRRVFTNYIRRARAAENRTDSAKELKKMIAFNTLVVTEMVADIKGESSDKAPEEDPVQEKEEDDEDEEWGSLESLRKTRPDKELAEKMGKPGQTEITLKDDLPDRDRIDLYKTYLLYCVTGEVTRIPFGAQITTKRDDSEYLLLNQLGGILGLSSKEIVNIHVGLAEQAFRQQAEVILADGQLTKARVEQLDELQKQVGLPQPQAEKVIKNITTTKMANAIETAVNQGRLNIKQIRELKEANVSLDSMIAVSLREKLFKKTVSDIFSSGTGEFDETEVYQTIPSDLSIDVEKAKRVVHDLAQSRLSNSLVQAVALLRQRNSKGVVLSLNDLLACDKAVPAEPMSWEVSEELSDLYAIYSKSDPKPAPEKVLRLQYLLGIDDSTATALREMEDGALSSAAEEGNFVF

SEQ ID NO: 45686 - protein, 930 aa, Arabidopsis thaliana
  peptide (1)..(930): Ceres Seq. ID no. 12600424
MTPPVRLATSAVVLAASLATGYGLGLRLAGSRNIAFGGAAVAGAAGGAVVYALNSAVPEVAAISLHNYVAEFEDPASVTKDDVEKIADRYGVNKGDEAFQAEICDIYCRYVTSVLPTEGQSLKGDEVAKIVKFKNALGIDEPDAAAMHMEIGRRIFRQRLETGEREGDAEQRRAFMRLVYVSALVFGDASSFLLPWKRVLKVTDAQVEIAIRENAKQLYAERLKLVGRDINVENLVDLRKSQLSFKLSDELAEDLFREHTRKVVVENISSALSILKSRTRAAKSLASVVEELEKVLEFNNLLVSLKSHSEADQFARGVGPISLIGDESDFERRMDDLKLLYRAYVTDALSGGRLEENKLVAMSQLRNILGLGKREAEAISVDVTSKSYRKRLANAVSSGDLEAQDSKAKYLQKLCEELHFDAQKAGAIHEEIYRQKLQQCVTDGELSDDNVAALLRLRVMLCIPQQTVDTAHAEICGTIFEKVVRDAISSGVDGYDAETRKSVRKAAHGLRLSRETAMSIASKAVRRVFTNYIRRARAAENRTDSAKELKKMIAFNTLVVTEMVADIKGESSDKAPEEDPVQEKEEDDEDEEWGSLESLRKTRPDKELAEKMGKPGQTEITLKDDLPDRDRIDLYKTYLLYCVTGEVTRIPFGAQITTKRDDSEYLLLNQLGGILGLSSKEIVNIHVGLAEQAFRQQAEVILADGQLTKARVEQLDELQKQVGLPQPQAEKVIKNITTTKMANAIETAVNQGRLNIKQIRELKEANVSLDSMIAVSLREKLFKKTVSDIFSSGTGEFDETEVYQTIPSDLSIDVEKAKRVVHDLAQSRLSNSLVQAVALLRQRNSKGVVLSLNDLLACDKAVPAEPMSWEVSEELSDLYAIYSKSDPKPAPEKVLRLQYLLGIDDSTATALREMEDGALSSAAEEGNFVF

SEQ ID NO: 45687 - DNA, 1357 bp, Arabidopsis thaliana
  misc_feature (1)..(1357): Ceres Seq. ID no. 13646545
  misc_feature (1)..(1357): Ortholog of  Ceres SEQ ID NO 14306671 as cited in SEQ ID NO 53809
  misc_feature (1)..(1357): Ortholog of  Ceres SEQ ID NO 15178206 as cited in SEQ ID NO 57238
atttgtgatattttattacacatctcttccagtctctcactctttgtccctctctctttctctattactctgtctcctctgttccggcgatgttccaacacgcgccttcttccatttccctcatcatcatcttcctcttcaccattctatcacccgtttcacctgaaccggtcacagtccagccattccgggtcaaatcatccccacccgcaaccatacccgctttcccggagcaatccgatttctccggctgcccactcgattaaccagaagacctcttccacggcatcaagtcagcttgcagcggcaaaaagctccacaaaggaaaatgttgccccgtactaggcgcgtggctctactctgcttactcaaccactgctctaagccgttcgatttccgccgccgcaagaaactcatcctcctcctccgccgcggtaacgactcctgaagaagatatgcctttgcttcccgatgactcggagacttgcgttgacggattagggaaatctctgaggcagagagggattgagctcactagaccgaacgagacttgcgacgtcgtttactgctactgtggaatcagattgcatccgttgagctgttccgaggcttttagagtgaatgatgaagggagactcgttggagacgagagagttgatagattagagactgattgtttgagtggaagccacaacaatgctgatggattctcacctcttcttggttgcaacaagtgcttgaacagtctctataagctaaatccgaagaaaacttcagggacaagaaacccatcaaaggaagaccgaaacagaacagcaaagatgcacaacaaagactgtgtcctcatgggtctcacttggcttctcgctaagaaccgtactgcttatttccccactgtcacttctgtcctccgagccgtcatgctgaaccacgatggcgtgccacgttcatgtgctctcggcagcgacggcatgcctttagccgtcgattcttccgaattctccaacggctcgccaacttcacttcagtatccgcaccacttggtccacttcttactttacagcgttatcacattagtcctaataaggtcgtggtgacgtggcacaccatggttggatttgattgtgacgtggagcacgtggcattacgtggttggttgagagaagtgaaattcagatagagagaaagagagagggctttggttctgtctttgtaaattagttttttggtgtcgttgttgttttagtagccatgttctttaacattttattacatcaaaaaaatcttgttgtattttgtcaattaaatattgaaaaatcacaatttgaaaatatttcaacaatattttcggtcatat

SEQ ID NO: 45688 - protein, 213 aa, Arabidopsis thaliana
  peptide (1)..(213): Ceres Seq. ID no. 13646546
MPLLPDDSETCVDGLGKSLRQRGIELTRPNETCDVVYCYCGIRLHPLSCSEAFRVNDEGRLVGDERVDRLETDCLSGSHNNADGFSPLLGCNKCLNSLYKLNPKKTSGTRNPSKEDRNRTAKMHNKDCVLMGLTWLLAKNRTAYFPTVTSVLRAVMLNHDGVPRSCALGSDGMPLAVDSSEFSNGSPTSLQYPHHLVHFLLYSVITLVLIRSW

SEQ ID NO: 45689 - protein, 114 aa, Arabidopsis thaliana
  peptide (1)..(114): Ceres Seq. ID no. 13646547
ICDILLHISSSLSLFVPLSFSITLSPLFRRCSNTRLLPFPSSSSSSSPFYHPFHLNRSQSSHSGSNHPHPQPYPLSRSNPISPAAHSINQKTSSTASSQLAAAKSSTKENVAPY

SEQ ID NO: 45690 - DNA, 1710 bp, Arabidopsis thaliana
  misc_feature (1)..(1710): Ceres Seq. ID no. 13576229
  misc_feature (1)..(1710): Ortholog of  Ceres SEQ ID NO 13594213 as cited in SEQ ID NO 57038
  misc_feature (1)..(1710): Ortholog of  Ceres SEQ ID NO 13654989 as cited in SEQ ID NO 63117
  misc_feature (1)..(1710): Ortholog of  Ceres SEQ ID NO 13584744 as cited in SEQ ID NO 69137
ggaagagcactccccagtctcagtggtgcggtgaggagagcttcgttgtcttccccattgcaattagggttttcaaaacgggtaatcgaattcggtggtgctcggctttgaaattgaggatgagatcctttccacttccttctacctgctgacaatgggcaactgcggtactagagacgaggctgccgtcttcactcctcaagctcaagcccaacagctccagaagaagcactcccgatccgtctcagatctgagcgatccatccactcctcgcttccgagacgactctcgcactcctatttcgtatgcccaagtcatcccctttactttgtttgagcttgagaccatcaccaagagcttccgcccagattatatactcggagaaggtggtttcggtaccgtctacaagggttacattgatgacaatctccgcgtcggcctcaagtctctccctgttgccgtcaaggtccttaacaaggagggactccagggtcaccgtgaatggcttacagaggtcaacttcctcggccaactccgtcatcccaacctcgtcaagcttattggttactgctgcgaggacgatcaccgattacttgtttatgagttcatgctgcgaggcagtcttgagaatcacctatttcgaaaaaccacagctccgctatcttggtctagaaggatgatgattgctcttggagctgcgaaaggccttgctttcctccacaatgctgaaagaccggttatttatagggatttcaagacttccaatatactgcttgactccgactacaccgccaagctttcagattttggcttagctaaagctggaccccagggtgatgaaacccatgtatcaactcgagttatgggtacttatggctatgctgccccagaatatgtgatgactggacacttgacggccagaagtgatgtatacagctttggagttgttcttctagagatgttgacaggaagaaaatcagtggataagacaagacctagcaaagagcagaacttggttgattgggctcggccaaagctgaatgataaaagaaaactgctgcagataattgacccaagactggagaaccaatactctgtcagggcagctcagaaggcatgcagcttggcgtattattgtcttagccagaacccgaaagctaggccattgatgagcgatgtggttgagactttggaacctttgcagtgtactggtgatgccctgatcccttgtgcaactactgcagctggagctgcatttgcaatgggaggggtgcctgattacagaatgcaccggaggtttgcaaagaacgttgggccaggtgcaatttgccggtcacccaatccaaattattcaccgggtggacctgcagcatgcagagttcggtgattagtgtcaagtgtatataatccgtttcgctgtgtctccttttccgtaatttctctcagagccaaacatctggttgctaaaaatcgtggatgcacgttgtttttgttgttgttgatgctgctgtttattgccactttactgtgttgatctgtctagagtcttgtatgattatgaatgagtgtggttcttgtttaatccgcactctgatgcagtatgcttgtagtagtcgacacttattcactccaaggtgaattttttttgtgtaagcagatatggttttctaacaaaaaaaaaaaaaaaaaaaactcgagggggggcccggt

SEQ ID NO: 45691 - protein, 410 aa, Arabidopsis thaliana
  peptide (1)..(410): Ceres Seq. ID no. 13576230
MGNCGTRDEAAVFTPQAQAQQLQKKHSRSVSDLSDPSTPRFRDDSRTPISYAQVIPFTLFELETITKSFRPDYILGEGGFGTVYKGYIDDNLRVGLKSLPVAVKVLNKEGLQGHREWLTEVNFLGQLRHPNLVKLIGYCCEDDHRLLVYEFMLRGSLENHLFRKTTAPLSWSRRMMIALGAAKGLAFLHNAERPVIYRDFKTSNILLDSDYTAKLSDFGLAKAGPQGDETHVSTRVMGTYGYAAPEYVMTGHLTARSDVYSFGVVLLEMLTGRKSVDKTRPSKEQNLVDWARPKLNDKRKLLQIIDPRLENQYSVRAAQKACSLAYYCLSQNPKARPLMSDVVETLEPLQCTGDALIPCATTAAGAAFAMGGVPDYRMHRRFAKNVGPGAICRSPNPNYSPGGPAACRVR

SEQ ID NO: 45692 - protein, 259 aa, Arabidopsis thaliana
  peptide (1)..(259): Ceres Seq. ID no. 13576231
MLRGSLENHLFRKTTAPLSWSRRMMIALGAAKGLAFLHNAERPVIYRDFKTSNILLDSDYTAKLSDFGLAKAGPQGDETHVSTRVMGTYGYAAPEYVMTGHLTARSDVYSFGVVLLEMLTGRKSVDKTRPSKEQNLVDWARPKLNDKRKLLQIIDPRLENQYSVRAAQKACSLAYYCLSQNPKARPLMSDVVETLEPLQCTGDALIPCATTAAGAAFAMGGVPDYRMHRRFAKNVGPGAICRSPNPNYSPGGPAACRVR

SEQ ID NO: 45693 - protein, 236 aa, Arabidopsis thaliana
  peptide (1)..(236): Ceres Seq. ID no. 13576232
MMIALGAAKGLAFLHNAERPVIYRDFKTSNILLDSDYTAKLSDFGLAKAGPQGDETHVSTRVMGTYGYAAPEYVMTGHLTARSDVYSFGVVLLEMLTGRKSVDKTRPSKEQNLVDWARPKLNDKRKLLQIIDPRLENQYSVRAAQKACSLAYYCLSQNPKARPLMSDVVETLEPLQCTGDALIPCATTAAGAAFAMGGVPDYRMHRRFAKNVGPGAICRSPNPNYSPGGPAACRVR

SEQ ID NO: 45694 - DNA, 2496 bp, Arabidopsis thaliana; identical to SEQ ID NO: 30796
  misc_feature (1)..(2496): Ceres Seq. ID no. 12561218
  misc_feature (1)..(2496): Ortholog of  Ceres SEQ ID NO 15178931 as cited in SEQ ID NO 1125
  misc_feature (1)..(2496): Ortholog of  Ceres SEQ ID NO 13596648 as cited in SEQ ID NO 63080
  misc_feature (1)..(2496): Ortholog of  Ceres SEQ ID NO 13584744 as cited in SEQ ID NO 69137
  misc_feature (1)..(2496): Ortholog of  Ceres SEQ ID NO 15179672 as cited in SEQ ID NO 0

SEQ ID NO: 45695 - protein, 615 aa, Arabidopsis thaliana; identical to SEQ ID NO: 30797
  peptide (1)..(615): Ceres Seq. ID no. 12561219

SEQ ID NO: 45696 - protein, 610 aa, Arabidopsis thaliana; identical to SEQ ID NO: 30798
  peptide (1)..(610): Ceres Seq. ID no. 12561220

SEQ ID NO: 45697 - protein, 530 aa, Arabidopsis thaliana; identical to SEQ ID NO: 30799
  peptide (1)..(530): Ceres Seq. ID no. 12561221

SEQ ID NO: 45698 - DNA, 1840 bp, Arabidopsis thaliana
  misc_feature (1)..(1840): Ceres Seq. ID no. 15174451
  misc_feature (1)..(1840): Ortholog of  Ceres SEQ ID NO 14307896 as cited in SEQ ID NO 66915
  misc_feature (1)..(1840): Ortholog of  Ceres SEQ ID NO 13657008 as cited in SEQ ID NO 69164
gattcatttcaaaatgatactggaatggaagataatgcaagccattctacaactaatcagactgatgaaagcgaaaatcagtttccaaacgtggattttgcaagcccagcaaaactgaagcggcagattttacgtcaggaaaggagaggtcaacgaactttagagctgatccgacaagaaaaggaaactgatgagcagatgcaagaagcagccattcagaagtcaatgagctttgaaaactcagtcatagggaaatacagtatatggaggagagactatgagagcccaaatgctgatgctatcttgaagcttatgagagaccagatcataatggcaaaagcatatgcaaatattgccaaatcaaaaaatgtaaccaatctgtacgttttcttgatgcagcagtgtggagaaaataaacgtgttataggtaaagcaacctctgatgctgaccttccttcaagcgctcttgatcaagcaaaagccatgggccatgcactctctcttgcaaaagacgagttatatgactgccatgaacttgcaaaaaagttccgggccatccttcagtccactgaacgcaaagtagatggactgaagaaaaagggaaccttcttaattcagctagctgccaaaacatttcccaagccattgcattgcctgagtctgcagctagcggcagactattttattctaggtttcaatgaagaggatgcagtgaaagaggatgtcagtcaaaagaagcttgaagatccttcgctctatcactatgcgatcttttcggataacgttctggctacatcagtggtggtgaactccactgtcttgaatgcaaaggaaccgcagaggcatgtgttccatatagtaactgacaaactgaattttggtgcaatgaagatgtggtttcgcatcaatgctcctgctgatgcgacgattcaagttgaaaacataaatgatttcaagtggctgaactcctcttactgctctgttctacggcagcttgaatctgcaaggctgaaagaatactatttcaaagcaaatcatccttcatcaatctcagctggcgcagataatctaaagtaccgcaacccaaagtatctatcgatgctgaatcatctcagattctaccttcctgaggtttatccgaagctggagaagattctgtttctagacgatgacattgtggtgcagaaggacctggcaccactatgggaaatagacatgcaaggaaaagtgaatggtgcggtggagacgtgcaaggagagcttccacagatttgacaagtacctcaacttctcaaatccaaagatttcagagaattttgacgctggtgcttgtgggtgggcatttgggatgaatatgtttgacctgaaagagtggaggaaacggaacattacagggatatatcactattggcaagacttgaatgaagacagaacactgtggaagctgggatcgttgccaccggggctgataacattttacaacctgacgaatgcaatggagaggagctggcacgtactagggctgggatatgacccagcgctaaaccaaacagcaatagagaatgcagcggtagtgcattacaatgggaactacaagccatggctgggtttagcattcgccaagtacaaaccgtactggtccaagtacgttgagtacgacaacccttatctccgacggtgcgacatcaatgaatgaatgaagagatggtggaggtagtatacatgatgaagcactcaaaggaaactaaataagtaaaaattgttttcagtttaccataatactaggaatcagcagacaatcacacatgacgattaattaaatagaatctcttgtttttctc

SEQ ID NO: 45699 - protein, 564 aa, Arabidopsis thaliana
  peptide (1)..(564): Ceres Seq. ID no. 15174452
DSFQNDTGMEDNASHSTTNQTDESENQFPNVDFASPAKLKRQILRQERRGQRTLELIRQEKETDEQMQEAAIQKSMSFENSVIGKYSIWRRDYESPNADAILKLMRDQIIMAKAYANIAKSKNVTNLYVFLMQQCGENKRVIGKATSDADLPSSALDQAKAMGHALSLAKDELYDCHELAKKFRAILQSTERKVDGLKKKGTFLIQLAAKTFPKPLHCLSLQLAADYFILGFNEEDAVKEDVSQKKLEDPSLYHYAIFSDNVLATSVVVNSTVLNAKEPQRHVFHIVTDKLNFGAMKMWFRINAPADATIQVENINDFKWLNSSYCSVLRQLESARLKEYYFKANHPSSISAGADNLKYRNPKYLSMLNHLRFYLPEVYPKLEKILFLDDDIVVQKDLAPLWEIDMQGKVNGAVETCKESFHRFDKYLNFSNPKISENFDAGACGWAFGMNMFDLKEWRKRNITGIYHYWQDLNEDRTLWKLGSLPPGLITFYNLTNAMERSWHVLGLGYDPALNQTAIENAAVVHYNGNYKPWLGLAFAKYKPYWSKYVEYDNPYLRRCDINE

SEQ ID NO: 45700 - protein, 556 aa, Arabidopsis thaliana
  peptide (1)..(556): Ceres Seq. ID no. 15174453
MEDNASHSTTNQTDESENQFPNVDFASPAKLKRQILRQERRGQRTLELIRQEKETDEQMQEAAIQKSMSFENSVIGKYSIWRRDYESPNADAILKLMRDQIIMAKAYANIAKSKNVTNLYVFLMQQCGENKRVIGKATSDADLPSSALDQAKAMGHALSLAKDELYDCHELAKKFRAILQSTERKVDGLKKKGTFLIQLAAKTFPKPLHCLSLQLAADYFILGFNEEDAVKEDVSQKKLEDPSLYHYAIFSDNVLATSVVVNSTVLNAKEPQRHVFHIVTDKLNFGAMKMWFRINAPADATIQVENINDFKWLNSSYCSVLRQLESARLKEYYFKANHPSSISAGADNLKYRNPKYLSMLNHLRFYLPEVYPKLEKILFLDDDIVVQKDLAPLWEIDMQGKVNGAVETCKESFHRFDKYLNFSNPKISENFDAGACGWAFGMNMFDLKEWRKRNITGIYHYWQDLNEDRTLWKLGSLPPGLITFYNLTNAMERSWHVLGLGYDPALNQTAIENAAVVHYNGNYKPWLGLAFAKYKPYWSKYVEYDNPYLRRCDINE

SEQ ID NO: 45701 - protein, 498 aa, Arabidopsis thaliana
  peptide (1)..(498): Ceres Seq. ID no. 15174454
MQEAAIQKSMSFENSVIGKYSIWRRDYESPNADAILKLMRDQIIMAKAYANIAKSKNVTNLYVFLMQQCGENKRVIGKATSDADLPSSALDQAKAMGHALSLAKDELYDCHELAKKFRAILQSTERKVDGLKKKGTFLIQLAAKTFPKPLHCLSLQLAADYFILGFNEEDAVKEDVSQKKLEDPSLYHYAIFSDNVLATSVVVNSTVLNAKEPQRHVFHIVTDKLNFGAMKMWFRINAPADATIQVENINDFKWLNSSYCSVLRQLESARLKEYYFKANHPSSISAGADNLKYRNPKYLSMLNHLRFYLPEVYPKLEKILFLDDDIVVQKDLAPLWEIDMQGKVNGAVETCKESFHRFDKYLNFSNPKISENFDAGACGWAFGMNMFDLKEWRKRNITGIYHYWQDLNEDRTLWKLGSLPPGLITFYNLTNAMERSWHVLGLGYDPALNQTAIENAAVVHYNGNYKPWLGLAFAKYKPYWSKYVEYDNPYLRRCDINE

SEQ ID NO: 45702 - DNA, 2076 bp, Arabidopsis thaliana
  misc_feature (1)..(2076): Ceres Seq. ID no. 13576225
  misc_feature (1)..(2076): Ortholog of  Ceres SEQ ID NO 15171402 as cited in SEQ ID NO 51174
atggctcagtcgtcgttggtggcggcggcggggagaagcggaagggttatcggcgattatgcggtgggtcgacaaatcgggtcggggtcgttttccgtggtttgggaagggaggcatcttgttcatggcaccgtcgttgctatcaaggagatcgctatggctcggcttaataagaagttgcaagagagtctcatgtcggagattatcatcttaaggaagattaatcatcctaacatcattcgctttatcgacatgatcgaggctcccgggaagataaatttggtgttggagtactgtaaaggtggtgatctgtctatgtatattcacaaacatggaagtgttcctgaagctactgctaagcattttatgctgcagttagcggctggcttacaagttcttcgtgacaataatatcattcaccgcgatttaaagcctcaggttctttcgttcttgaaacagaatcttcttctatccacagatgataatgatgcagctctgaagattgccgattttggatttgcaagatcgttgcagcctaggggtttggcagaaactttatgtggttcaccactgtatatggccccagagattatgcagcttcaaaaatatgatgcaaagttgctccagaacattataagatcaactgaattacattttccagcagactgtagagatttgagtaccgactgtaaagatctatgccagaagctactgcgtcgtaatccagtggaacgtttgacgtttgaagagttttttcatcatcctttcctttcagacaaacaatcatatgatttcacaaggagtagattagattcacgaactatgaacgattttcattcatcaggaagcagtccctcaagaaatatagaagaaatttctcaagaagacgggttgccgttctttttagatgatgattctagtggacctgagggaagcccttcatcttttaaacatacttccccgatgaagtcatcttacggatttagtgttgaaagaagggaggcagcattaagtcctttgaaaaacatggatctttcttccagatatagtagagtcagtcatagagcagaaaccaataatttcaagtttgagggccatagattatcagatagaagccaattcaaaccgtcaagcttacctgattccagatcatttagtacccaaggaagaggggattctccagactcaatggatcaagattatgttctgatatctggaccaccggttgatataccatcatcttcatctggttctccgaagcctttcaattacccattcaaatcacattctcctcctgtagagttcatcaagagaaatgtaactaatttaacggctcctatgccaatagctagtgctactggcaacaaccttagtcgatttggaagcttggagagtcagaattgtatcccgggtacttcccatgggtctctggatcttgtagatgcttttgaacagccatcaactaacagcttgacaagaatccggtctttgcaaaagtgtgcagctgcaatagcagaattggttcatgaaaggggtgaaaatggtaagcatttagaagctttctcgatccaactggtgattcttgcaatttggaatcaagcactacacatctgtcatactcaggcagtctcgggtatagaaggaagcctgctccaagacattaacagagtaggaagaaatatcagccacggaggatcagagaagttattgcctcagattcagaaagaatttgtccaggaagtggagcgtgctgaagaacttgccaagtttgttgaatctgataatgcaaagatgccggatgcaatggagatgatacttcaagcagctcttgctcttggcataagtggaggagtagatgaagtgatgggagacgcagagaacgcaggaaacctctactcaaaagcggtgcgtttgttagtcttccttgcagtggaggcgcagacgctgattctcaatccacctttaacactcacaaactcagtaaggtatcgactcagaacatatattgactcactcataaccagattgaaacatctgcaatcacatagaagaacttcatatcctcagaagcaatga

SEQ ID NO: 45703 - protein, 691 aa, Arabidopsis thaliana
  peptide (1)..(691): Ceres Seq. ID no. 13576226
MAQSSLVAAAGRSGRVIGDYAVGRQIGSGSFSVVWEGRHLVHGTVVAIKEIAMARLNKKLQESLMSEIIILRKINHPNIIRFIDMIEAPGKINLVLEYCKGGDLSMYIHKHGSVPEATAKHFMLQLAAGLQVLRDNNIIHRDLKPQVLSFLKQNLLLSTDDNDAALKIADFGFARSLQPRGLAETLCGSPLYMAPEIMQLQKYDAKLLQNIIRSTELHFPADCRDLSTDCKDLCQKLLRRNPVERLTFEEFFHHPFLSDKQSYDFTRSRLDSRTMNDFHSSGSSPSRNIEEISQEDGLPFFLDDDSSGPEGSPSSFKHTSPMKSSYGFSVERREAALSPLKNMDLSSRYSRVSHRAETNNFKFEGHRLSDRSQFKPSSLPDSRSFSTQGRGDSPDSMDQDYVLISGPPVDIPSSSSGSPKPFNYPFKSHSPPVEFIKRNVTNLTAPMPIASATGNNLSRFGSLESQNCIPGTSHGSLDLVDAFEQPSTNSLTRIRSLQKCAAAIAELVHERGENGKHLEAFSIQLVILAIWNQALHICHTQAVSGIEGSLLQDINRVGRNISHGGSEKLLPQIQKEFVQEVERAEELAKFVESDNAKMPDAMEMILQAALALGISGGVDEVMGDAENAGNLYSKAVRLLVFLAVEAQTLILNPPLTLTNSVRYRLRTYIDSLITRLKHLQSHRRTSYPQKQ

SEQ ID NO: 45704 - protein, 639 aa, Arabidopsis thaliana
  peptide (1)..(639): Ceres Seq. ID no. 13576227
MARLNKKLQESLMSEIIILRKINHPNIIRFIDMIEAPGKINLVLEYCKGGDLSMYIHKHGSVPEATAKHFMLQLAAGLQVLRDNNIIHRDLKPQVLSFLKQNLLLSTDDNDAALKIADFGFARSLQPRGLAETLCGSPLYMAPEIMQLQKYDAKLLQNIIRSTELHFPADCRDLSTDCKDLCQKLLRRNPVERLTFEEFFHHPFLSDKQSYDFTRSRLDSRTMNDFHSSGSSPSRNIEEISQEDGLPFFLDDDSSGPEGSPSSFKHTSPMKSSYGFSVERREAALSPLKNMDLSSRYSRVSHRAETNNFKFEGHRLSDRSQFKPSSLPDSRSFSTQGRGDSPDSMDQDYVLISGPPVDIPSSSSGSPKPFNYPFKSHSPPVEFIKRNVTNLTAPMPIASATGNNLSRFGSLESQNCIPGTSHGSLDLVDAFEQPSTNSLTRIRSLQKCAAAIAELVHERGENGKHLEAFSIQLVILAIWNQALHICHTQAVSGIEGSLLQDINRVGRNISHGGSEKLLPQIQKEFVQEVERAEELAKFVESDNAKMPDAMEMILQAALALGISGGVDEVMGDAENAGNLYSKAVRLLVFLAVEAQTLILNPPLTLTNSVRYRLRTYIDSLITRLKHLQSHRRTSYPQKQ

SEQ ID NO: 45705 - protein, 627 aa, Arabidopsis thaliana
  peptide (1)..(627): Ceres Seq. ID no. 13576228
MSEIIILRKINHPNIIRFIDMIEAPGKINLVLEYCKGGDLSMYIHKHGSVPEATAKHFMLQLAAGLQVLRDNNIIHRDLKPQVLSFLKQNLLLSTDDNDAALKIADFGFARSLQPRGLAETLCGSPLYMAPEIMQLQKYDAKLLQNIIRSTELHFPADCRDLSTDCKDLCQKLLRRNPVERLTFEEFFHHPFLSDKQSYDFTRSRLDSRTMNDFHSSGSSPSRNIEEISQEDGLPFFLDDDSSGPEGSPSSFKHTSPMKSSYGFSVERREAALSPLKNMDLSSRYSRVSHRAETNNFKFEGHRLSDRSQFKPSSLPDSRSFSTQGRGDSPDSMDQDYVLISGPPVDIPSSSSGSPKPFNYPFKSHSPPVEFIKRNVTNLTAPMPIASATGNNLSRFGSLESQNCIPGTSHGSLDLVDAFEQPSTNSLTRIRSLQKCAAAIAELVHERGENGKHLEAFSIQLVILAIWNQALHICHTQAVSGIEGSLLQDINRVGRNISHGGSEKLLPQIQKEFVQEVERAEELAKFVESDNAKMPDAMEMILQAALALGISGGVDEVMGDAENAGNLYSKAVRLLVFLAVEAQTLILNPPLTLTNSVRYRLRTYIDSLITRLKHLQSHRRTSYPQKQ

SEQ ID NO: 45706 - DNA, 1434 bp, Arabidopsis thaliana
  misc_feature (1)..(1434): Ceres Seq. ID no. 13646405
  misc_feature (1)..(1434): Ortholog of  Ceres SEQ ID NO 15170521 as cited in SEQ ID NO 55668
  misc_feature (1)..(1434): Ortholog of  Ceres SEQ ID NO 13598249 as cited in SEQ ID NO 62509
  misc_feature (1)..(1434): Ortholog of  Ceres SEQ ID NO 13598595 as cited in SEQ ID NO 64671
  misc_feature (1)..(1434): Ortholog of  Ceres SEQ ID NO 13654241 as cited in SEQ ID NO 68348
ggtacgaaacagactagttgcgaaacgcgaaagaacaagattcgacaaaagctaaaaataaaataaaagaagaagcaaaaccctagagctcaaggtaatcgccgtcgatttctcaatctctcaccggcgattacatgccgatgaaagttgtacaatagctgctgtaagagagagatttatcaggtatttttagaatcatgtatagagacagaggaacggtgaattcgagacctgaagttgtggatcgtaaacggatcaacgacgctcttgaacgtccttctccttcaacctctcgtcaagttaacggcaaaggcaaaggaaccgttacggcggcgacgacgacggcgaacttgattgggaagcagcagtcgaataacatcaaccatagagattctcgttctgcttctctctcgaagaacaatacggtttctgatgatgaatcagacacagatagtgaagaatcagatgtgagtggttctgatggagaggacacttcatggatatcttggttttgtaatctaagaggaaacgagttcttttgtgaagttgatgatgattacattcaagatgacttcaacttgtgtggactcagcagtctagttccctactacgagtacgctcttgatttgattttggatgttgaatcttctcagggagagatgtttacagaggaacagaatgaattgatcgagtcagcagctgagatgttgtatggactgattcatgctcgttacatattgactagcaaaggattggcagcaatgttagacaaatacaaaaactatgactttggaagatgtccaagagtttattgctgtggccaaccttgtcttccggttggtcaatcagacttaccgcgatctagcactgtgaagatatattgcgcgaaatgcgaagacatttattacccacgatcaaagtatcaaggcaacattgatggagcttactttgggacaacgtttccacatctgttcctgatgacttatgggcatctcaagccagcgaaggcaacacaaaactatgttcaaagagtgtttgggttcaaattacacaaaccgtgaaggaagtttgacgacaaaacccaaggatcaagatcatggcgttggaatggaactgagaaaagaagagacgtgtgtgaacagaaacggaaaataaaacgcactgtaatcacacgaatggtgaagagagcattcatgtctctatttgtcttcaggtacatacacattagaagaaagcaaaagcatggttagaaagaaaaaaaacacgaaaatcttttaatgagtttgttaaacttgaacatgtatttttctaccttcggtaaacttttttattttgtttcttttctcagtgtctgatttagtcatttatcnnaaaaaaaaaaaaaaaaaaaaaaaaaaaaaaagaaaaaaaaaaaaaaaaactcgagggggggcc

SEQ ID NO: 45707 - protein, 287 aa, Arabidopsis thaliana
  peptide (1)..(287): Ceres Seq. ID no. 13646406
MYRDRGTVNSRPEVVDRKRINDALERPSPSTSRQVNGKGKGTVTAATTTANLIGKQQSNNINHRDSRSASLSKNNTVSDDESDTDSEESDVSGSDGEDTSWISWFCNLRGNEFFCEVDDDYIQDDFNLCGLSSLVPYYEYALDLILDVESSQGEMFTEEQNELIESAAEMLYGLIHARYILTSKGLAAMLDKYKNYDFGRCPRVYCCGQPCLPVGQSDLPRSSTVKIYCAKCEDIYYPRSKYQGNIDGAYFGTTFPHLFLMTYGHLKPAKATQNYVQRVFGFKLHKP

SEQ ID NO: 45708 - DNA, 2482 bp, Arabidopsis thaliana
  misc_feature (1)..(2482): Ceres Seq. ID no. 14309739
  misc_feature (1)..(2482): Ortholog of  Ceres SEQ ID NO 13598023 as cited in SEQ ID NO 66487
gaagtaagtaaccaaaaacgcttctaatctttcgtttacaacaaatatctctctctctctcgctctctctttcttcttcttcatcttctttcatggctgttactggctgggcaatcacaatctgaattctttcttcctccttgtctctctgattttcgccgagttttgggggctcttgttgttacacgatgagtctggtggttggtcagtctctgggtttaactctagtcggtgatggtctttcgttacgcaattccaaaataaatgtcggaaaatcaaagtttttctcggtaaatcggaggagattggcgcgtgcggccctggtacaagctaggcctaaggaagacggagcggcggcaagtccttccccatcgtcgagaccggcgtcagttgtgcagtaccgacgagctgatctcgcggatgatcttcaagccgaggcacgagctttgggtcgtgctattgatgcttctatttactctccggagctcatcgccaggaaacatggctctcagcctttcaaggctttgcggagaagtttggagatattgggagctttgggtggtttcgctttgaaattggggattgaccagaagcagggcaacttagagaagaacatgaagaagagagcaatcgagctccggcggatcttcactcgtctcggacctacttttgttaaattgggtcaaggtttgtccacccgacccgacctctgtccacccgattaccttgaagaacttgcagagcttcaggatgctttgccaaccttccctgatgcagaggcatttgcttgcattgagagagagttggatttgtcgctagagaccattttctcgtctgtatctcctgagccaatcgcagcagctagtcttggccaggtttacaaagctcagctgaggtattcaggtcaggttgttgctgtcaaagttcaacgccctgggatcgaagaagccattggccttgatttttaccttattagaggagttgggaaactcattaacaagtatgtagacttcatcactaccgatgtccttacccttatcgatgagttcgcctgcagagtttatcaggagctaaactatgtccaggaggcccaaaatgccagaaggtttaaaaaattgtatgcagataaagcagatgttcttgtgcctgatatattctgggattacacgagccgcaaggtgctaacaatggaatgggttgagggaactaaactgaatgagcaacttgccattgagagtcagggattgaaggttctggatctcgtgaatacaggaatccagtgtagcctaaggcaactcttggagtatggctttttccatgctgaccctcatcctggtaatctcttggcaacacctgatggaaaacttgcctttctagactttggcatgatgagtgagacaccagaggaagctagatttgctatcataggccatgttgtccatttagtgaaccgagattatgaagccatggcacgagattactatgctctgaagttcttgtcccctgatgtggatgttactcctatcataccagctctcagagacttctttgacgatgcacttaattataccgtgagcgagctcaatttcaaaactttggttgatggtctaggtgctgtcttctaccagtatccatttaatgtcccgccctactatgctttgattttgaggtcgcttactgtgcttgaaggtttggcactctacgcagatcctaatttcaaagtactagctgcttcatacccatattttgccaaaaggcttctcactgatccaaacccgtatctaagagatgcccttatcgagctactattcaaagacggaaaatttaggtggaatagactcgagaaccttctacaacagggaagtaaagatagagacttctcagcaaaggatgctctacaaccagttttgaagcttttgctggatccaaatggcgaagaacttcgattgttagtaattaaagaagctgtacgagtcagtgaagcaattgcgctgggcactgttgttgatacatacaattcccttcctgagtttctgagatctcttgtcttcaatggaaatgggaatggccctcttacaatgagtaccgcggaacttcaaagtacgcttgagcttcgggatcaggtctccagaatctggggccttcttcaatcttcagaaagctttgatcctgctattttgcaaccaatactacaggtgttacaacaaccagaggcacgaagacttggaggacgtgttgcaggcggtgtaggccaacgtcttgcagctcggtttctgcaacaacttcttcgagccacaacaccatcttctgcaccatcccaataggtcctcttttcttctcagtgaaatggtaaattgtatattaaggcgagacactcgcaaaccacagaattgtttcatgttacagtaatatagtatcattctttctctttgtattgtactagtgaaaaaggaccaaagtataaccaatgagaaatacctcc

SEQ ID NO: 45709 - protein, 711 aa, Arabidopsis thaliana
  peptide (1)..(711): Ceres Seq. ID no. 14309740
MSLVVGQSLGLTLVGDGLSLRNSKINVGKSKFFSVNRRRLARAALVQARPKEDGAAASPSPSSRPASVVQYRRADLADDLQAEARALGRAIDASIYSPELIARKHGSQPFKALRRSLEILGALGGFALKLGIDQKQGNLEKNMKKRAIELRRIFTRLGPTFVKLGQGLSTRPDLCPPDYLEELAELQDALPTFPDAEAFACIERELDLSLETIFSSVSPEPIAAASLGQVYKAQLRYSGQVVAVKVQRPGIEEAIGLDFYLIRGVGKLINKYVDFITTDVLTLIDEFACRVYQELNYVQEAQNARRFKKLYADKADVLVPDIFWDYTSRKVLTMEWVEGTKLNEQLAIESQGLKVLDLVNTGIQCSLRQLLEYGFFHADPHPGNLLATPDGKLAFLDFGMMSETPEEARFAIIGHVVHLVNRDYEAMARDYYALKFLSPDVDVTPIIPALRDFFDDALNYTVSELNFKTLVDGLGAVFYQYPFNVPPYYALILRSLTVLEGLALYADPNFKVLAASYPYFAKRLLTDPNPYLRDALIELLFKDGKFRWNRLENLLQQGSKDRDFSAKDALQPVLKLLLDPNGEELRLLVIKEAVRVSEAIALGTVVDTYNSLPEFLRSLVFNGNGNGPLTMSTAELQSTLELRDQVSRIWGLLQSSESFDPAILQPILQVLQQPEARRLGGRVAGGVGQRLAARFLQQLLRATTPSSAPSQ

SEQ ID NO: 45710 - protein, 569 aa, Arabidopsis thaliana
  peptide (1)..(569): Ceres Seq. ID no. 14309741
MKKRAIELRRIFTRLGPTFVKLGQGLSTRPDLCPPDYLEELAELQDALPTFPDAEAFACIERELDLSLETIFSSVSPEPIAAASLGQVYKAQLRYSGQVVAVKVQRPGIEEAIGLDFYLIRGVGKLINKYVDFITTDVLTLIDEFACRVYQELNYVQEAQNARRFKKLYADKADVLVPDIFWDYTSRKVLTMEWVEGTKLNEQLAIESQGLKVLDLVNTGIQCSLRQLLEYGFFHADPHPGNLLATPDGKLAFLDFGMMSETPEEARFAIIGHVVHLVNRDYEAMARDYYALKFLSPDVDVTPIIPALRDFFDDALNYTVSELNFKTLVDGLGAVFYQYPFNVPPYYALILRSLTVLEGLALYADPNFKVLAASYPYFAKRLLTDPNPYLRDALIELLFKDGKFRWNRLENLLQQGSKDRDFSAKDALQPVLKLLLDPNGEELRLLVIKEAVRVSEAIALGTVVDTYNSLPEFLRSLVFNGNGNGPLTMSTAELQSTLELRDQVSRIWGLLQSSESFDPAILQPILQVLQQPEARRLGGRVAGGVGQRLAARFLQQLLRATTPSSAPSQ

SEQ ID NO: 45711 - protein, 378 aa, Arabidopsis thaliana
  peptide (1)..(378): Ceres Seq. ID no. 14309742
MEWVEGTKLNEQLAIESQGLKVLDLVNTGIQCSLRQLLEYGFFHADPHPGNLLATPDGKLAFLDFGMMSETPEEARFAIIGHVVHLVNRDYEAMARDYYALKFLSPDVDVTPIIPALRDFFDDALNYTVSELNFKTLVDGLGAVFYQYPFNVPPYYALILRSLTVLEGLALYADPNFKVLAASYPYFAKRLLTDPNPYLRDALIELLFKDGKFRWNRLENLLQQGSKDRDFSAKDALQPVLKLLLDPNGEELRLLVIKEAVRVSEAIALGTVVDTYNSLPEFLRSLVFNGNGNGPLTMSTAELQSTLELRDQVSRIWGLLQSSESFDPAILQPILQVLQQPEARRLGGRVAGGVGQRLAARFLQQLLRATTPSSAPSQ

SEQ ID NO: 45712 - DNA, 1026 bp, Arabidopsis thaliana
  misc_feature (1)..(1026): Ceres Seq. ID no. 12561187
  misc_feature (1)..(1026): Ortholog of  Ceres SEQ ID NO 14313548 as cited in SEQ ID NO 68496
tttgtcttttgctctttctccttcctctccactaaaacatttctctattttttcctttttatttgtttgtttggtttctttaaattctcagcttctatacaaacctttctcaattcttcttgacattagggtttcctctttctttgagagggctaaaaccctaatatatccctctcattgactaaagagttaagcctactctatctactttggaagcgaaattcaaagggtaaggtaaaagcccttgaaagaggaagaaagatacaagatcctcaaagaacctaaagatctaaaggttgtaagaagaaaaacaaatggcgtcgtcatcaaactcatacaactcaccatgcgcggcgtgcaagtttcttcgccggaaatgcatgccgggatgcatattcgcgccatattttccaccggaggagccacacaaattcgccaacgtccacaaaatctttggagcaagcaacgtcacgaagctcctcaacgagctcctccctcaccaacgtgaagacgcagtcaactccttagcctatgaggccgaggcacgtgtccgtgaccccgtctatggctgcgtcggagccatctcttatctccagagacaagtccataggcttcagaaggagctcgacgcagctaatgctgacttggcacattatggtttgtccacatcagccgccggagcacctggcaacgtcgtggacttggtttttcagcctcagccgcttccgtcgcagcaactgcctcccttgaacccggtttataggctttcgggggcaagtccggtgatgaatcagatgccacgtggcaccggagggtcgtatgggacttttcttccttggaacaatggtcatgatcagcaaggaggtaacatgtgagagtttataaattatgagtattcatcctctcatctctctctttctatatttatgtgtgtgtggtacgaatacgatattatttgtttaatgcatggactgtgtgtgggatattatttcctagcgaattataaatgcatggactgttcttatt

SEQ ID NO: 45713 - protein, 186 aa, Arabidopsis thaliana
  peptide (1)..(186): Ceres Seq. ID no. 12561188
MASSSNSYNSPCAACKFLRRKCMPGCIFAPYFPPEEPHKFANVHKIFGASNVTKLLNELLPHQREDAVNSLAYEAEARVRDPVYGCVGAISYLQRQVHRLQKELDAANADLAHYGLSTSAAGAPGNVVDLVFQPQPLPSQQLPPLNPVYRLSGASPVMNQMPRGTGGSYGTFLPWNNGHDQQGGNM

SEQ ID NO: 45714 - protein, 164 aa, Arabidopsis thaliana
  peptide (1)..(164): Ceres Seq. ID no. 12561189
MPGCIFAPYFPPEEPHKFANVHKIFGASNVTKLLNELLPHQREDAVNSLAYEAEARVRDPVYGCVGAISYLQRQVHRLQKELDAANADLAHYGLSTSAAGAPGNVVDLVFQPQPLPSQQLPPLNPVYRLSGASPVMNQMPRGTGGSYGTFLPWNNGHDQQGGNM

SEQ ID NO: 45715 - DNA, 1424 bp, Arabidopsis thaliana
  misc_feature (1)..(1424): Ceres Seq. ID no. 12561198
  misc_feature (1)..(1424): Ortholog of  Ceres SEQ ID NO 13654989 as cited in SEQ ID NO 63117
  misc_feature (1)..(1424): Ortholog of  Ceres SEQ ID NO 13657138 as cited in SEQ ID NO 65923
  misc_feature (1)..(1424): Ortholog of  Ceres SEQ ID NO 13584744 as cited in SEQ ID NO 69137
aacactaacactttttcaaattgtcgtctaaagtctctaaaaccaccatcgaagtcttgacagagagaattcgaatcggacagagaatttcttccgtagtttttcttgtaagcgaaaaagaagtttagttagctcgtgtgagagaagggtgtaatgagctgttttggttggtgtgggagtgaggattttcgcaacgctactgacactggcccaaggccagcgcataacccagcaggttacaatggaggccactaccaaagagctgatccacccatgaaccagcctgttattcccatgcagcctatttctgtaccagccattccagtggatgagctgagagatataactgataactatggttcaaagaccttgatcggcgagggttcttatggaagagtgttttatggtgttcttaaaagcggtggtgcagctgccatcaagaaacttgactctagtaagcagccagatcaagaatttctttcccagatatcaatggtttcgagattgcgacatgacaatgttactgcacttatgggctattgtgttgatggccctctccgtgttcttgcttatgaatttgctcctaaaggatctcttcatgatactcttcatggcaaaaaaggtgccaaaggagcacttagaggtcctgttatgacgtggcaacagagagtcaaaatcgccgttggtgcggccagaggacttgagtacttgcatgagaaggtgagccctcaggttatccaccgagacatcaaatccagcaacgtacttctgtttgatgatgatgttgccaaaattggtgattttgatctgtctgatcaagcccctgacatggctgctcgccttcactcaactcgtgtgctaggaacctttggctaccacgctccagaatatgcaatgacaggaacgttgagctcaaagagcgatgtgtacagttttggcgttgttctgctggagctcctaactggtcgtaaaccagtcgatcataccttaccgcgtggacaacaaagtctagtgacatgggcaacccctaaactaagtgaagacaaagtgaagcaatgcgttgatgcaagactactcggagagtaccctcccaaagctgttggcaagctagctgcagtggctgcactctgtgtgcaatatgaggcaaatttcagaccaaacatgagcattgtggtgaaggcacttcaacctcttttaaaccctcctcgttctgctccgcagactccacataggaacccctactgatcaaatattcaatcccccatatctcatcttctgatcatgatgattcatcaaatgtgtattattcattttggttctgtattgtgtaaatttatgggaccttatctcattaactcttcattctcaagtcccacttttcaagacatgtgtatgtctctcctctatatcaatatattttatgt

SEQ ID NO: 45716 - protein, 363 aa, Arabidopsis thaliana; identical to SEQ ID NO: 24281
  peptide (1)..(363): Ceres Seq. ID no. 12561199

SEQ ID NO: 45717 - protein, 323 aa, Arabidopsis thaliana; identical to SEQ ID NO: 24282
  peptide (1)..(323): Ceres Seq. ID no. 12561200

SEQ ID NO: 45718 - protein, 316 aa, Arabidopsis thaliana; identical to SEQ ID NO: 24283
  peptide (1)..(316): Ceres Seq. ID no. 12561201

SEQ ID NO: 45719 - DNA, 2165 bp, Arabidopsis thaliana
  misc_feature (1)..(2165): Ceres Seq. ID no. 13646758
  misc_feature (1)..(2165): Ortholog of  Ceres SEQ ID NO 15176771 as cited in SEQ ID NO 55128
gaaaagaagaaagacacatttcgttagtagaaatggcgggaaacggaaacgaaagtaccggtggagacttcagtttctcggctgcggcggcccgtgatgcgcttccgaggatcacgactgagaagggcggcaaatctccagggccggcagacgtctgccaggatgacatcgcaccgcgggtcaactttcagaccatcgacgagcttcacagtctccagaagaaacgatctgcccctaccactcctcttagagatggcagcgccagcggagtcagcggaactagtggtccgactactcctgtctccagcgagaccatgcttcaatccgtcagtgcatcgttggcttcgttgacgagagagacaggaccgaagttaataagaggagatccgacttcggcagctaaagtagcacacgtgccagtgactcctacgtcacttccggctgctgacgtcagcgacagtggcttgaagttcactcacatccttcacaacctctctcccgccgagttgtacgagcaagcgataaagtttgagaagggatcgtttgtgacatcgaccggtgcgttggctacattgtctggagccaaaaccggtcggtctcctaaagacaagcgtgtggttaaggatgataccactgaggccgaactctggtggggaaaaggatcaccaaacattgaaatggatgaaaaaacttttttggtgaaccgagagagagctgttgattacttaaactccttggacaaggtgtttgtgaatgatcaatacctaaactgggatccagagaacaaaatcaaagtgagaattgtttcagcaagagcttaccattcactattcatgcacaacatgtgtatccgtccaacacctgaggagttagagaatttcgggacacccgatttcacgatttacaacgcggggaaattcccgtgtaaccgtttcactcattacatgacatcttcgacgagtgtggacataaacctaggaagaagagagatggtgattctaggtacccaatatgctggagaaatgaagaaaggactctttggtgtgatgcattatttgatgcctaagagaaagattttgtctcttcactctggttgtaacatgggcaaagatggagatgttgctctctttttcggactctctggtaccggaaagactacgttgtcgactgaccataaccggtatttgatcggagatgatgaacattgttggagtgaggctggagtttcgaatatcgaaggtggttgttacgcgaaatgcattgatttggctagggacaaagagcctgatatctggaacgctatcaagtttggaaccgttttggagaatgttgtgtttgatgagcatacacgagaagtggattacactgacaaatcagtgacggagaacacacgtgcggcttatccgatagagtacattccaaactcgaagataccgtgcgttggaccacacccgaagaacgtgatcctattggcttgtgacgccttcggtgtgttgccgccaatcagcaagctcaatcttgctcagactatgtaccatttcatcagtggctacactgctctcgttgcaggaacagaggaaggagttaaggaacctcgagcgacattctcagcttgttttggtgctgctttcattatgctacacccaaccaagtacgctgctatgttggctgagaaaatgcaggctcaaggagccaccggttggcttgttaacaccggttggtccggtggaagctacggaactggaagccgaatcaagttggcgtatacacgaaagataatcgatgctatacattcgggtagtctactgaatgcaagttaccgtaaaacagatatttttggtttggagattccaaatgaagtagaaggagttccttctgagatactggaacctattaatgcatggcctgataaaatggcttatgaggacacattgttgaaattggctggtttgtttaaaagcaattttgagacattcacaagtcataagattggtgatgatggaaaattgactgaagagattcttgcagctggtcctaacttctaaagtgattgaagatgatgatgaaaaacaaaccttcttactaaccaaaataagacaactattttttttcacttcccaattttttcccattttttgttaatgacttcagtaagaacggcaatt

SEQ ID NO: 45720 - protein, 680 aa, Arabidopsis thaliana
  peptide (1)..(680): Ceres Seq. ID no. 15219092
KEERHISLVEMAGNGNESTGGDFSFSAAAARDALPRITTEKGGKSPGPADVCQDDIAPRVNFQTIDELHSLQKKRSAPTTPLRDGSASGVSGTSGPTTPVSSETMLQSVSASLASLTRETGPKLIRGDPTSAAKVAHVPVTPTSLPAADVSDSGLKFTHILHNLSPAELYEQAIKFEKGSFVTSTGALATLSGAKTGRSPKDKRVVKDDTTEAELWWGKGSPNIEMDEKTFLVNRERAVDYLNSLDKVFVNDQYLNWDPENKIKVRIVSARAYHSLFMHNMCIRPTPEELENFGTPDFTIYNAGKFPCNRFTHYMTSSTSVDINLGRREMVILGTQYAGEMKKGLFGVMHYLMPKRKILSLHSGCNMGKDGDVALFFGLSGTGKTTLSTDHNRYLIGDDEHCWSEAGVSNIEGGCYAKCIDLARDKEPDIWNAIKFGTVLENVVFDEHTREVDYTDKSVTENTRAAYPIEYIPNSKIPCVGPHPKNVILLACDAFGVLPPISKLNLAQTMYHFISGYTALVAGTEEGVKEPRATFSACFGAAFIMLHPTKYAAMLAEKMQAQGATGWLVNTGWSGGSYGTGSRIKLAYTRKIIDAIHSGSLLNASYRKTDIFGLEIPNEVEGVPSEILEPINAWPDKMAYEDTLLKLAGLFKSNFETFTSHKIGDDGKLTEEILAAGPNF

SEQ ID NO: 45721 - protein, 670 aa, Arabidopsis thaliana
  peptide (1)..(670): Ceres Seq. ID no. 15219093
MAGNGNESTGGDFSFSAAAARDALPRITTEKGGKSPGPADVCQDDIAPRVNFQTIDELHSLQKKRSAPTTPLRDGSASGVSGTSGPTTPVSSETMLQSVSASLASLTRETGPKLIRGDPTSAAKVAHVPVTPTSLPAADVSDSGLKFTHILHNLSPAELYEQAIKFEKGSFVTSTGALATLSGAKTGRSPKDKRVVKDDTTEAELWWGKGSPNIEMDEKTFLVNRERAVDYLNSLDKVFVNDQYLNWDPENKIKVRIVSARAYHSLFMHNMCIRPTPEELENFGTPDFTIYNAGKFPCNRFTHYMTSSTSVDINLGRREMVILGTQYAGEMKKGLFGVMHYLMPKRKILSLHSGCNMGKDGDVALFFGLSGTGKTTLSTDHNRYLIGDDEHCWSEAGVSNIEGGCYAKCIDLARDKEPDIWNAIKFGTVLENVVFDEHTREVDYTDKSVTENTRAAYPIEYIPNSKIPCVGPHPKNVILLACDAFGVLPPISKLNLAQTMYHFISGYTALVAGTEEGVKEPRATFSACFGAAFIMLHPTKYAAMLAEKMQAQGATGWLVNTGWSGGSYGTGSRIKLAYTRKIIDAIHSGSLLNASYRKTDIFGLEIPNEVEGVPSEILEPINAWPDKMAYEDTLLKLAGLFKSNFETFTSHKIGDDGKLTEEILAAGPNF

SEQ ID NO: 45722 - protein, 576 aa, Arabidopsis thaliana
  peptide (1)..(576): Ceres Seq. ID no. 15219094
MLQSVSASLASLTRETGPKLIRGDPTSAAKVAHVPVTPTSLPAADVSDSGLKFTHILHNLSPAELYEQAIKFEKGSFVTSTGALATLSGAKTGRSPKDKRVVKDDTTEAELWWGKGSPNIEMDEKTFLVNRERAVDYLNSLDKVFVNDQYLNWDPENKIKVRIVSARAYHSLFMHNMCIRPTPEELENFGTPDFTIYNAGKFPCNRFTHYMTSSTSVDINLGRREMVILGTQYAGEMKKGLFGVMHYLMPKRKILSLHSGCNMGKDGDVALFFGLSGTGKTTLSTDHNRYLIGDDEHCWSEAGVSNIEGGCYAKCIDLARDKEPDIWNAIKFGTVLENVVFDEHTREVDYTDKSVTENTRAAYPIEYIPNSKIPCVGPHPKNVILLACDAFGVLPPISKLNLAQTMYHFISGYTALVAGTEEGVKEPRATFSACFGAAFIMLHPTKYAAMLAEKMQAQGATGWLVNTGWSGGSYGTGSRIKLAYTRKIIDAIHSGSLLNASYRKTDIFGLEIPNEVEGVPSEILEPINAWPDKMAYEDTLLKLAGLFKSNFETFTSHKIGDDGKLTEEILAAGPNF

SEQ ID NO: 45723 - DNA, 2374 bp, Arabidopsis thaliana
  misc_feature (1)..(2374): Ceres Seq. ID no. 13646465
  misc_feature (1)..(2374): Ortholog of  Ceres SEQ ID NO 12586556 as cited in SEQ ID NO 64667
  misc_feature (1)..(2374): Ortholog of  Ceres SEQ ID NO 13660894 as cited in SEQ ID NO 67475
aaccttcacgcgcggctactcctactttcgcttcgtccggttccgtcgatactgtctccgaatcactgtcttctttcctttttcttcctacatgacatctgtcttatctcttttatgtttctctagatgtacttatacttccatgtttcgtctgtatacgacggagaagcaaaattgcttgaactttcgctttgatggatcaaactagtcttggaacaataatcaaaatccattcgttgccatcatatgcagcttactgtatatgccgtcttctccttctcgctctatactcagaggtctcactgtatccgaaatttgcaagtttattcctcaatcgtggaaacagctgccgagacccatctcagaaacttccaaaacccatgatgatgaatcagttccacaagtgcttttcaattcatttagacattgcatttcccatggtcaattatatgaagctttcagaactttctctctacttcgctaccagtctggttctcatgaattcgttttgtattcatcagcttctcttctatctacatgtgtgggttttaatgagtttgttcctggccagcaacttcatgctcattgtatctcgtcgggtttggagtttgactctgttttggtcccaaagttggtcactttctactctgcttttaatctccttgacgaagctcagaccattactgagaactctgagattttgcatcccttgccgtggaatgtgctcatcggttcgtatattaggaacaaaaggtttcaggagtctgtttctgtttacaagcgaatgatgagtaaaggaattagagcggatgaatttacttacccgtctgttatcaaggcttgtgcagcattactggattttgcatatgggagagttgttcatggctctattgaggttagctctcacaggtgtaacttgtatgtctgcaacgcgttgatatctatgtataaaagatttggtaaagtggatgttgctcggagattgtttgacaggatgtctgaaagggatgctgtctcatggaatgcaataatcaactgttatacttcagaagaaaagttaggggaagcttttaagcttcttgatagaatgtatctctctggtgtcgaagcgagtattgtaacttggaacacaatagctggaggttgtttggaggcaggaaattacataggggctttgaattgtgttgttgggatgagaaattgcaatgtaagaataggttctgtagctatgattaatggtttaaaggcatgctcacacattggagcgttaaagtgggggaaagtatttcattgccttgtgatccgtagttgtagtttttcccatgatattgacaatgttcggaattcgttgatcacaatgtactcaagatgcagtgatcttaggcacgcgtttatagtgtttcagcaggttgaagcaaatagtttgagtacatggaattctatcatttccggttttgcatacaacgagagatcagaagaaacctctttcctgctcaaggagatgttgctctctggatttcacccaaatcacattacgcttgctagcattctccctctttttgctcgggtgggaaacctgcaacatgggaaagagtttcactgctacatcctgagacgccaaagctacaaggactgtttaatcctgtggaactcccttgtcgatatgtatgcaaaatccggtgaaatcatagctgcaaagcgagtatttgattcgatgaggaagagggacaaagtgacatacacttctttgatcgatggatatggcaggctgggtaaaggagaagtcgcattggcatggttcaaggatatggacagatccggtatcaaacctgatcatgtaactatggttgcagttttatcagcttgcagccattccaatttagtgcgtgaaggacactggttgtttacgaagatggagcatgtgtttggtatacgccttcgccttgaacactattcttgtatggttgatctttattgcagagcaggttacctggataaagccagagatatattccatacaataccttacgagccatcaagtgctatgtgtgctactctactgaaagcgtgcctcatccacgggaacacaaacattggggagtgggctgcagataagttactactagaaacaaagccagaacacttaggtcactatatgttgcttgcagatatgtatgcagtaactggttcttggagcaagcttgtaacggtgaagactttactgagtgacttgggcgtgcaaaaggctcatgagtttgctttgatggaaacagattcggagttagatggagagaataataagccgatgaacgatgattctgtcatcaatcaggagcaaagttcagatgaagaacgtcttgtagaagtaggataa

SEQ ID NO: 45724 - protein, 703 aa, Arabidopsis thaliana
  peptide (1)..(703): Ceres Seq. ID no. 13646466
MPSSPSRSILRGLTVSEICKFIPQSWKQLPRPISETSKTHDDESVPQVLFNSFRHCISHGQLYEAFRTFSLLRYQSGSHEFVLYSSASLLSTCVGFNEFVPGQQLHAHCISSGLEFDSVLVPKLVTFYSAFNLLDEAQTITENSEILHPLPWNVLIGSYIRNKRFQESVSVYKRMMSKGIRADEFTYPSVIKACAALLDFAYGRVVHGSIEVSSHRCNLYVCNALISMYKRFGKVDVARRLFDRMSERDAVSWNAIINCYTSEEKLGEAFKLLDRMYLSGVEASIVTWNTIAGGCLEAGNYIGALNCVVGMRNCNVRIGSVAMINGLKACSHIGALKWGKVFHCLVIRSCSFSHDIDNVRNSLITMYSRCSDLRHAFIVFQQVEANSLSTWNSIISGFAYNERSEETSFLLKEMLLSGFHPNHITLASILPLFARVGNLQHGKEFHCYILRRQSYKDCLILWNSLVDMYAKSGEIIAAKRVFDSMRKRDKVTYTSLIDGYGRLGKGEVALAWFKDMDRSGIKPDHVTMVAVLSACSHSNLVREGHWLFTKMEHVFGIRLRLEHYSCMVDLYCRAGYLDKARDIFHTIPYEPSSAMCATLLKACLIHGNTNIGEWAADKLLLETKPEHLGHYMLLADMYAVTGSWSKLVTVKTLLSDLGVQKAHEFALMETDSELDGENNKPMNDDSVINQEQSSDEERLVEVG

SEQ ID NO: 45725 - protein, 529 aa, Arabidopsis thaliana
  peptide (1)..(529): Ceres Seq. ID no. 13646467
MMSKGIRADEFTYPSVIKACAALLDFAYGRVVHGSIEVSSHRCNLYVCNALISMYKRFGKVDVARRLFDRMSERDAVSWNAIINCYTSEEKLGEAFKLLDRMYLSGVEASIVTWNTIAGGCLEAGNYIGALNCVVGMRNCNVRIGSVAMINGLKACSHIGALKWGKVFHCLVIRSCSFSHDIDNVRNSLITMYSRCSDLRHAFIVFQQVEANSLSTWNSIISGFAYNERSEETSFLLKEMLLSGFHPNHITLASILPLFARVGNLQHGKEFHCYILRRQSYKDCLILWNSLVDMYAKSGEIIAAKRVFDSMRKRDKVTYTSLIDGYGRLGKGEVALAWFKDMDRSGIKPDHVTMVAVLSACSHSNLVREGHWLFTKMEHVFGIRLRLEHYSCMVDLYCRAGYLDKARDIFHTIPYEPSSAMCATLLKACLIHGNTNIGEWAADKLLLETKPEHLGHYMLLADMYAVTGSWSKLVTVKTLLSDLGVQKAHEFALMETDSELDGENNKPMNDDSVINQEQSSDEERLVEVG

SEQ ID NO: 45726 - protein, 528 aa, Arabidopsis thaliana
  peptide (1)..(528): Ceres Seq. ID no. 13646468
MSKGIRADEFTYPSVIKACAALLDFAYGRVVHGSIEVSSHRCNLYVCNALISMYKRFGKVDVARRLFDRMSERDAVSWNAIINCYTSEEKLGEAFKLLDRMYLSGVEASIVTWNTIAGGCLEAGNYIGALNCVVGMRNCNVRIGSVAMINGLKACSHIGALKWGKVFHCLVIRSCSFSHDIDNVRNSLITMYSRCSDLRHAFIVFQQVEANSLSTWNSIISGFAYNERSEETSFLLKEMLLSGFHPNHITLASILPLFARVGNLQHGKEFHCYILRRQSYKDCLILWNSLVDMYAKSGEIIAAKRVFDSMRKRDKVTYTSLIDGYGRLGKGEVALAWFKDMDRSGIKPDHVTMVAVLSACSHSNLVREGHWLFTKMEHVFGIRLRLEHYSCMVDLYCRAGYLDKARDIFHTIPYEPSSAMCATLLKACLIHGNTNIGEWAADKLLLETKPEHLGHYMLLADMYAVTGSWSKLVTVKTLLSDLGVQKAHEFALMETDSELDGENNKPMNDDSVINQEQSSDEERLVEVG

SEQ ID NO: 45727 - DNA, 1597 bp, Arabidopsis thaliana
  misc_feature (1)..(1597): Ceres Seq. ID no. 13576220
  misc_feature (1)..(1597): Ortholog of  Ceres SEQ ID NO 14307964 as cited in SEQ ID NO 66191
  misc_feature (1)..(1597): Ortholog of  Ceres SEQ ID NO 13502874 as cited in SEQ ID NO 66298
  misc_feature (1)..(1597): Ortholog of  Ceres SEQ ID NO 12614124 as cited in SEQ ID NO 68392
acactcacaacactctctctctcctgccataactcagcctgagatgtctccggaagcttacgttctgttctttaacagttttaacctcgtaaccttcgaagcctttgcttcagtctcacttatcatagccacagttgctttcttgctctcaccaggtgggctcgcatgggcctggaccgggtcatccaagagtcgggtttcgattccaggaccatctggttctctttccgtcttctccggctccaatccccaccgtgttctcgccgctcttgctaaacgcttcaaggcctctccgttgatggcgttctcagttgggttttcgcgtttcgttatctctagtgaaccggagacggctaaagagattttgagcagctctgcttttgctgaccggccggttaaggagtcagcttacgagcttttgtttcaccgtgccatgggattcgcaccgtatggtgagtattggaggaatctgaggagaatctcctccactcatcttttcagtccaagaagaatcgcgagttttgagggtgttagagttggcatcggtatgaagatggtcaagaagattaaaagccttgttacgtctgatgcttgtggtgaagttgaagtgaaaaagatcgttcactttggttctttgaataatgtaatgacgacagtgtttggtgaaagctacgattttgatgaagttaatggaaaagggtgttttttggagaggctggtgagtgaaggctacgagttgcttgggatttttaactggagtgatcacttttggtttcttcgttggtttgacttccaaggagtgaggaagaggtgtagagctttggtctctgaagtcaacacttttgtcggcggaataattgagaaacacaagatgaagaagggtaataatctcaatggagaggaaaatgacttcgttgatgtcttgcttggcttgcaaaaggatgaaaagttgtctgattctgacatgattgctgttctttgggaaatgatatttagagggacagatacagttgcgattctagtggaatgggtgcttgcaagaatggttttgcatcaagacatccaagataaactctacagagagatagcttctgctacaagtaacaatattagatccttgtctgattccgacatcccaaaactgccgtaccttcaagctattgtcaaagaaaccctaaggctccacccccctggtccacttctctcttgggctcgtctcgctatccatgacgtccacgtaggtcctaaccttgtccctgctggaaccatagctatggtcaacatgtggtccatcacacacaacgctaaaatctggaccgaccctgaagcgtttatgcctgaaaggttcattagtgaggatgtgagcatcatgggctcggatcttagattggctccattcggatccggtcgtcgggtttgtcccggtaaagcaatgggtctagctactgttcatctctggattggtcaactaattcagaattttgaatgggtgaagggttcttgtgatgttgagctcgctgaggttctgaagctgtctatggagatgaagaatccgttgaagtgcaaggctgttccaaggaatgttggtttcgcttga

SEQ ID NO: 45728 - protein, 531 aa, Arabidopsis thaliana
  peptide (1)..(531): Ceres Seq. ID no. 13576221
HSQHSLSPAITQPEMSPEAYVLFFNSFNLVTFEAFASVSLIIATVAFLLSPGGLAWAWTGSSKSRVSIPGPSGSLSVFSGSNPHRVLAALAKRFKASPLMAFSVGFSRFVISSEPETAKEILSSSAFADRPVKESAYELLFHRAMGFAPYGEYWRNLRRISSTHLFSPRRIASFEGVRVGIGMKMVKKIKSLVTSDACGEVEVKKIVHFGSLNNVMTTVFGESYDFDEVNGKGCFLERLVSEGYELLGIFNWSDHFWFLRWFDFQGVRKRCRALVSEVNTFVGGIIEKHKMKKGNNLNGEENDFVDVLLGLQKDEKLSDSDMIAVLWEMIFRGTDTVAILVEWVLARMVLHQDIQDKLYREIASATSNNIRSLSDSDIPKLPYLQAIVKETLRLHPPGPLLSWARLAIHDVHVGPNLVPAGTIAMVNMWSITHNAKIWTDPEAFMPERFISEDVSIMGSDLRLAPFGSGRRVCPGKAMGLATVHLWIGQLIQNFEWVKGSCDVELAEVLKLSMEMKNPLKCKAVPRNVGFA

SEQ ID NO: 45729 - protein, 517 aa, Arabidopsis thaliana
  peptide (1)..(517): Ceres Seq. ID no. 13576222
MSPEAYVLFFNSFNLVTFEAFASVSLIIATVAFLLSPGGLAWAWTGSSKSRVSIPGPSGSLSVFSGSNPHRVLAALAKRFKASPLMAFSVGFSRFVISSEPETAKEILSSSAFADRPVKESAYELLFHRAMGFAPYGEYWRNLRRISSTHLFSPRRIASFEGVRVGIGMKMVKKIKSLVTSDACGEVEVKKIVHFGSLNNVMTTVFGESYDFDEVNGKGCFLERLVSEGYELLGIFNWSDHFWFLRWFDFQGVRKRCRALVSEVNTFVGGIIEKHKMKKGNNLNGEENDFVDVLLGLQKDEKLSDSDMIAVLWEMIFRGTDTVAILVEWVLARMVLHQDIQDKLYREIASATSNNIRSLSDSDIPKLPYLQAIVKETLRLHPPGPLLSWARLAIHDVHVGPNLVPAGTIAMVNMWSITHNAKIWTDPEAFMPERFISEDVSIMGSDLRLAPFGSGRRVCPGKAMGLATVHLWIGQLIQNFEWVKGSCDVELAEVLKLSMEMKNPLKCKAVPRNVGFA

SEQ ID NO: 45730 - protein, 432 aa, Arabidopsis thaliana
  peptide (1)..(432): Ceres Seq. ID no. 13576223
MAFSVGFSRFVISSEPETAKEILSSSAFADRPVKESAYELLFHRAMGFAPYGEYWRNLRRISSTHLFSPRRIASFEGVRVGIGMKMVKKIKSLVTSDACGEVEVKKIVHFGSLNNVMTTVFGESYDFDEVNGKGCFLERLVSEGYELLGIFNWSDHFWFLRWFDFQGVRKRCRALVSEVNTFVGGIIEKHKMKKGNNLNGEENDFVDVLLGLQKDEKLSDSDMIAVLWEMIFRGTDTVAILVEWVLARMVLHQDIQDKLYREIASATSNNIRSLSDSDIPKLPYLQAIVKETLRLHPPGPLLSWARLAIHDVHVGPNLVPAGTIAMVNMWSITHNAKIWTDPEAFMPERFISEDVSIMGSDLRLAPFGSGRRVCPGKAMGLATVHLWIGQLIQNFEWVKGSCDVELAEVLKLSMEMKNPLKCKAVPRNVGFA

SEQ ID NO: 45731 - DNA, 1425 bp, Arabidopsis thaliana
  misc_feature (1)..(1425): Ceres Seq. ID no. 13646469
  misc_feature (1)..(1425): Ortholog of  Ceres SEQ ID NO 15171131 as cited in SEQ ID NO 58111
gacaattcctagttcttaagaaaaaagtggaaattttcctttaaatttagtttaaaactcatacaaatccttctactcgaccactggtactctccgtaagctacttgctgaattcgattattgattttgggcgtagaagaagatgaaggcatcgatgaagtttcgtgaagagcaaaagcctctttttagggctaaagttcctttaagcatcttaggtttaccctttcaatctggaatcgtcgccggagaatccaaggagctcagtctcaatctctccactttcttcgaatctggcccttctctcaaagtcgcttaccgtccaaacgattcgtggaatcctttctctctaatcgtcaaaaccggatcgggatcgttcggttctccgatttcaagctctatgctcatgagcgctgaattcaatctcctaggtcaaggaaaccctagctttatgctccacttcaaacctcaattcggcgatttctctatcaaaaagtctcattcttcgtctggatttgagaggaatttgatcaaatcgatgaatggatctgtttccgaagatgattcttcgattgaggtggtggatactccagcggtcaatggatgcggcggaggatttagaaaagtcacggttctgccgtcaacttctgctggagatatcgctggattgttatctggcgttgaggttgcggcgaggacgtctctgcctgtgagaggacgcgccgttttgaatttccggtggggcgttagggttcctacggagatcagacgcgatttcgatccaacggctgctatttcgttgaggagattcccttttttggtgatgaataaaataggaatcgaacacgtggacggcgcagatgctaaagtgaccaaatccactggtgatccgggtaaagtttcgggtccggctcagttcacaacaagtggtgacgtggcggaggtgatagaggagcttcgaacggagaacaagcagttaaagagagccgttgaagatctccgggaagtaatatcaaacgtccgtccatactcgccggcgacaattgattacggatcacactcgaagtatcgcgaatccgagaggaacaacaacaacaacaacaacaacaacaacaacaacaacgggagatcgagagctgatcggtggagcagcgagagaacgacaacgtctgattacggtgggaagaaaagcaaggaagagggcaatgtagctgaggagctgaagaaagctttgaaaggagctgcttgaagcttctatggcggctattggtaatcgcaggctttactcgaattacaattacatttgtcgaccttaatcagctattgcttttgtatatatatgcgttgaattatctggattagatttgcacaacttgttttgaatcttttgatggaatcttcagagttttgtatgagattatgcttttc

SEQ ID NO: 45732 - protein, 367 aa, Arabidopsis thaliana
  peptide (1)..(367): Ceres Seq. ID no. 13646470
MKASMKFREEQKPLFRAKVPLSILGLPFQSGIVAGESKELSLNLSTFFESGPSLKVAYRPNDSWNPFSLIVKTGSGSFGSPISSSMLMSAEFNLLGQGNPSFMLHFKPQFGDFSIKKSHSSSGFERNLIKSMNGSVSEDDSSIEVVDTPAVNGCGGGFRKVTVLPSTSAGDIAGLLSGVEVAARTSLPVRGRAVLNFRWGVRVPTEIRRDFDPTAAISLRRFPFLVMNKIGIEHVDGADAKVTKSTGDPGKVSGPAQFTTSGDVAEVIEELRTENKQLKRAVEDLREVISNVRPYSPATIDYGSHSKYRESERNNNNNNNNNNNNNGRSRADRWSSERTTTSDYGGKKSKEEGNVAEELKKALKGAA

SEQ ID NO: 45733 - protein, 363 aa, Arabidopsis thaliana
  peptide (1)..(363): Ceres Seq. ID no. 13646471
MKFREEQKPLFRAKVPLSILGLPFQSGIVAGESKELSLNLSTFFESGPSLKVAYRPNDSWNPFSLIVKTGSGSFGSPISSSMLMSAEFNLLGQGNPSFMLHFKPQFGDFSIKKSHSSSGFERNLIKSMNGSVSEDDSSIEVVDTPAVNGCGGGFRKVTVLPSTSAGDIAGLLSGVEVAARTSLPVRGRAVLNFRWGVRVPTEIRRDFDPTAAISLRRFPFLVMNKIGIEHVDGADAKVTKSTGDPGKVSGPAQFTTSGDVAEVIEELRTENKQLKRAVEDLREVISNVRPYSPATIDYGSHSKYRESERNNNNNNNNNNNNNGRSRADRWSSERTTTSDYGGKKSKEEGNVAEELKKALKGAA

SEQ ID NO: 45734 - protein, 282 aa, Arabidopsis thaliana
  peptide (1)..(282): Ceres Seq. ID no. 13646472
MLMSAEFNLLGQGNPSFMLHFKPQFGDFSIKKSHSSSGFERNLIKSMNGSVSEDDSSIEVVDTPAVNGCGGGFRKVTVLPSTSAGDIAGLLSGVEVAARTSLPVRGRAVLNFRWGVRVPTEIRRDFDPTAAISLRRFPFLVMNKIGIEHVDGADAKVTKSTGDPGKVSGPAQFTTSGDVAEVIEELRTENKQLKRAVEDLREVISNVRPYSPATIDYGSHSKYRESERNNNNNNNNNNNNNGRSRADRWSSERTTTSDYGGKKSKEEGNVAEELKKALKGAA

SEQ ID NO: 45735 - DNA, 1702 bp, Arabidopsis thaliana
  misc_feature (1)..(1702): Ceres Seq. ID no. 13593094
  misc_feature (1)..(1702): Ortholog of  Ceres SEQ ID NO 15179015 as cited in SEQ ID NO 0
  misc_feature (1)..(1702): Ortholog of  Ceres SEQ ID NO 15179613 as cited in SEQ ID NO 0
ctttcccccctgcaggaattcggcaccagagagagagagagagagctcactagtcccccccccccgagggtaaaagctttctcttttattgtgtcttgtcttgcattttcctctgttacgttttgcgttgtttacgaaaaatgtaggaaataaatttggttgcttgctttgttggtgtgtgaaccgacacttatctctgtgatttttttaattaaattctcagtgatgtttgaaggaattgtttcaatcttcgttaccttaaaatgatgtcgtcattgttattgtattgggtaaattttctgttttgtaattgttttagcatatgtctctgtctgattgtgtcagagttttgagtgaaacccccaaagttttattttttttatttaactggacatgaagctgtttttgaattcagcttttggtgaattttacgctgatttttgaatgtgttttatcttttcttgggtacagttagatagatagcatgaattggttacctgaagctgaagctgaggatgacttcaaaggtcttctctctggtgatttctttgatgatctcatcaatcaccttgacgtccctcttgatgacattgataccaccaatggtgaaggagattgggttgacaggtttcaagaccttgagcctcctcccatggatatgttccccactttgccttctgacctcacctcttgcggctctggcatggccaaggcccctcgtgtggatattcaaaggaacattcctgctttgaaacagtcctattcttctgaagccttgtccagcactctccaccaatcttcagctcctcctgaaatcaaagtttcgaaactatttcagtctttaagtccagtgtcagttctcgagaacagttatggttctctctcgacccacaacaatggatctcagagattggctttccctgtgaaaggcatgagaagcaagcgcaaacgccccacaacactgagacttagctacctttaccctctgaaccccgaaagcccgagaagtcaaccccgggcaaacctgaatccgagtgttacttttcttctgagcaacatgccaagaagaaacgcaagatccacctgaccacccgcacggtctcttccactctggaggcaagcaactcggatgggatagtccgcaaatgcactcattgcgagacaaccaagaccccacagtggagggaaggacccagtggaccgaagaccctctgcaatgcttgcggagtgaggttcagatctggtcgcctagttccagaataccgaccagcctcaagccccaccttcatcccagctgtgcattcaaactcacacaggaagatcattgagatgagaaggaaggacgacgaacagtttgatagcagcatgattcgggcagtgatatccagagggtaaagcagttttttttttaaagtttggtctctgatccgcagaaatgggaagtcagtggaggaagaagatggtataaaagtagggtttagtgactgttttcaaatctgatgaagagagtttagtggtttagttcaagttagggatatgaaatattttgttgtttcattatgtgtttttatctttatctcttggctgacatttgtgtatcagaggaaaacaggtgaagccaaagtttgctctctttttttcgctranaaaaaaaaaaaaaaaaaaaaaaaaaaaaaaaaaacctcgagggggggcccggtac

SEQ ID NO: 45736 - protein, 200 aa, Arabidopsis thaliana
  peptide (1)..(200): Ceres Seq. ID no. 15221196
MNWLPEAEAEDDFKGLLSGDFFDDLINHLDVPLDDIDTTNGEGDWVDRFQDLEPPPMDMFPTLPSDLTSCGSGMAKAPRVDIQRNIPALKQSYSSEALSSTLHQSSAPPEIKVSKLFQSLSPVSVLENSYGSLSTHNNGSQRLAFPVKGMRSKRKRPTTLRLSYLYPLNPESPRSQPRANLNPSVTFLLSNMPRRNARST

SEQ ID NO: 45737 - protein, 144 aa, Arabidopsis thaliana
  peptide (1)..(144): Ceres Seq. ID no. 15221197
MDMFPTLPSDLTSCGSGMAKAPRVDIQRNIPALKQSYSSEALSSTLHQSSAPPEIKVSKLFQSLSPVSVLENSYGSLSTHNNGSQRLAFPVKGMRSKRKRPTTLRLSYLYPLNPESPRSQPRANLNPSVTFLLSNMPRRNARST

SEQ ID NO: 45738 - protein, 142 aa, Arabidopsis thaliana
  peptide (1)..(142): Ceres Seq. ID no. 15221198
MFPTLPSDLTSCGSGMAKAPRVDIQRNIPALKQSYSSEALSSTLHQSSAPPEIKVSKLFQSLSPVSVLENSYGSLSTHNNGSQRLAFPVKGMRSKRKRPTTLRLSYLYPLNPESPRSQPRANLNPSVTFLLSNMPRRNARST

SEQ ID NO: 45739 - DNA, 1842 bp, Arabidopsis thaliana
  misc_feature (1)..(1842): Ceres Seq. ID no. 13646763
  misc_feature (1)..(1842): Ortholog of  Ceres SEQ ID NO 13597580 as cited in SEQ ID NO 65322
ggaacccagaaaaaagattcataaaaccaggcaatagaaatttcatctgaagaaaagaaaaagtaaagctattaaaaatcaaagccacgagaagaaagtagaaaaagttacagtctctgtctatcaaaatcccaacggtaactgaaaatcgccggaaccgaatctgcggcgagccaaaacttgtggatcttttaatgaaaacttgaagattcctctttccacggttgcttctagggttttctcttcgattcaccacatcgtcatgaaccaaatctctttctggtgcctttctttactccttacggtggtgattgctgcagaagagactcctatcactcgtatagccttcggatcatgcgctaatcaaagtgctccacagccgatatgggatgcgataaacaagtttgatccgcaactgtttatttggttgggtgataacatctacggagatataagaagaccacttacagtcattgggaaagagagaacttttgggccatggaggaattcaccgaggtttgtaccttcttcagaggaagaaatgaaactaagatacgctaaagccaaagctaatcctggatattctcgtattcagagaaaagctaaggttattggtacatgggatgatcatgattacggattgaatgacgctggaaaagagtttgatcgtaaagtcattaaccaaaaacttatgcttgatttcttgaatgagcctcttgatagtcctaggagaaagcaagctggtgtttatgcttcttatacttatggtccgcctaatcggaaagttaaggttatagttttagatactagatatcatagagaccctttaagaagtgacgggagcatattgggtgatacgcagtgggactggctcgaaaatgaattgagcggtccccgaagcgaaatcactatcataggatcctctgttcaggtgatatcaaatctttctgctaccactggacctctcttttatatggaatcatggggtcgttttccaaaggaaaggaaacgtctttttaaactgatagcagatactaagagagatggagttatattcatcagtggagatgtacattttggagaaatcacgagatatgattgttctgttgggtacccattatatgatgtcacctccagtggtctagtacaatctgttgagaaagttgtccctcgtcccttgcgttccatagttaggcttcttttttggtatactccaagcacgatgagagttatcaatgataactgcaaattcaaatcttgcacatacggacaacaaaattttggagcaatatcgatagattggaatgcaaatccggttaccataaagctcgagatcagagatgttaacggagacactgtactaggcacgaatgtttcattatctgaactccaaccaggaggctcgaattctttaaaagatacaacaactaagggaaagtctcaacgatattgcacactcgaaattgaattaccaggaacgaccagataccgattggcagttctcatctacttcaccattgctgtcttggcaatggcgatattaggacttatcattggagctgtattggccataacagcatgcgtttataaatgcaaggtcgattgattgttgatgacattaatcaactttttttggtccaacaaaagtgtctttatgacttataatctgtattagttggattattcagggattacaattcggatgtagcttataatgttaaaaattgttgaacacatggattttgatcttgtgatgggaattctaagcttgagctgttattaattaaacttctttgaaagagaaaaaaaaaaaaaaaaaaaactcgagggggggcccggtac

SEQ ID NO: 45740 - protein, 447 aa, Arabidopsis thaliana
  peptide (1)..(447): Ceres Seq. ID no. 13646764
MNQISFWCLSLLLTVVIAAEETPITRIAFGSCANQSAPQPIWDAINKFDPQLFIWLGDNIYGDIRRPLTVIGKERTFGPWRNSPRFVPSSEEEMKLRYAKAKANPGYSRIQRKAKVIGTWDDHDYGLNDAGKEFDRKVINQKLMLDFLNEPLDSPRRKQAGVYASYTYGPPNRKVKVIVLDTRYHRDPLRSDGSILGDTQWDWLENELSGPRSEITIIGSSVQVISNLSATTGPLFYMESWGRFPKERKRLFKLIADTKRDGVIFISGDVHFGEITRYDCSVGYPLYDVTSSGLVQSVEKVVPRPLRSIVRLLFWYTPSTMRVINDNCKFKSCTYGQQNFGAISIDWNANPVTIKLEIRDVNGDTVLGTNVSLSELQPGGSNSLKDTTTKGKSQRYCTLEIELPGTTRYRLAVLIYFTIAVLAMAILGLIIGAVLAITACVYKCKVD

SEQ ID NO: 45741 - protein, 354 aa, Arabidopsis thaliana
  peptide (1)..(354): Ceres Seq. ID no. 13646765
MKLRYAKAKANPGYSRIQRKAKVIGTWDDHDYGLNDAGKEFDRKVINQKLMLDFLNEPLDSPRRKQAGVYASYTYGPPNRKVKVIVLDTRYHRDPLRSDGSILGDTQWDWLENELSGPRSEITIIGSSVQVISNLSATTGPLFYMESWGRFPKERKRLFKLIADTKRDGVIFISGDVHFGEITRYDCSVGYPLYDVTSSGLVQSVEKVVPRPLRSIVRLLFWYTPSTMRVINDNCKFKSCTYGQQNFGAISIDWNANPVTIKLEIRDVNGDTVLGTNVSLSELQPGGSNSLKDTTTKGKSQRYCTLEIELPGTTRYRLAVLIYFTIAVLAMAILGLIIGAVLAITACVYKCKVD

SEQ ID NO: 45742 - protein, 304 aa, Arabidopsis thaliana
  peptide (1)..(304): Ceres Seq. ID no. 13646766
MLDFLNEPLDSPRRKQAGVYASYTYGPPNRKVKVIVLDTRYHRDPLRSDGSILGDTQWDWLENELSGPRSEITIIGSSVQVISNLSATTGPLFYMESWGRFPKERKRLFKLIADTKRDGVIFISGDVHFGEITRYDCSVGYPLYDVTSSGLVQSVEKVVPRPLRSIVRLLFWYTPSTMRVINDNCKFKSCTYGQQNFGAISIDWNANPVTIKLEIRDVNGDTVLGTNVSLSELQPGGSNSLKDTTTKGKSQRYCTLEIELPGTTRYRLAVLIYFTIAVLAMAILGLIIGAVLAITACVYKCKVD

SEQ ID NO: 45743 - DNA, 1890 bp, Arabidopsis thaliana
  misc_feature (1)..(1890): Ceres Seq. ID no. 12561142
  misc_feature (1)..(1890): Ortholog of  Ceres SEQ ID NO 13659394 as cited in SEQ ID NO 67049
atggatactctctttagactagtcagtctccaacaacaacaacaatccgatagtatcattacaaatcaatcttcgttaagcagaacttccaccaccactactggctctccacaaactgcttatcactacaactttccacaaaacgacgtcgtcgaagaatgcttcaactttttcatggatgaagaagacctttcctcttcttcttctcaccacaaccatcacaaccacaacaatcctaatacttactactctcctttcactactcccacccaataccatcccgccacatcatcaaccccttcctccaccgccgcagccgcagctttagcctcgccttactcctcctccggccaccataatgacccttccgcgttctccatacctcaaactcctccgtccttcgacttctcagccaatgccaagtgggcagactcggtccttcttgaagcggcacgtgccttctccgacaaagacactgcacgtgcgcaacaaatcctatggacgctcaacgagctctcttctccgtacggagacaccgagcaaaaactggcttcttacttcctccaagctctcttcaaccgcatgaccggttcaggcgaacgatgctaccgaaccatggtaacagctgcagccacagagaagacttgctccttcgagtcaacgcgaaaaactgtactaaagttccaagaagttagcccctgggccacgtttggacacgtggcggcaaacggagcaatcttggaagcagtagacggagaggcaaagatccacatcgttgacataagctccacgttttgcactcaatggccgactcttctagaagctttagccacaagatcagacgacacgcctcacctaaggctaaccacagttgtcgtggccaacaagtttgtcaacgatcaaacggcgtcgcatcggatgatgaaagagatcggaaaccgaatggagaaattcgctaggcttatgggagttcctttcaaatttaacattattcatcacgttggagatttatctgagtttgatctcaacgaactcgacgttaaaccagacgaagtcttggccattaactgcgtaggcgcgatgcatgggatcgcttcacgtggaagccctagagacgctgtgatatcgagtttccgacggttaagaccgaggattgtgacggtcgtagaagaagaagctgatcttgtcggagaagaagaaggtggctttgatgatgagttcttgagagggtttggagaatgtttacgatggtttagggtttgcttcgagtcatgggaagagagttttccaaggacgagcaacgagaggttgatgctagagcgtgcagcgggacgtgcgatcgttgatcttgtggcttgtgagccgtcggattccacggagaggcgagagacagcgaggaagtggtcgaggaggatgaggaatagtgggtttggagcggtggggtatagtgatgaggtggcggatgatgtcagagctttgttgaggagatataaagaaggtgtttggtcgatggtacagtgtcctgatgccgccggaatattcctttgttggagagatcagccggtggtttgggctagtgcgtggcggccaacgtaaagggttgtttttattttttcataaggaattcgcaagttcgatttttacttgagatggtttcacacgtgtggtgatggttgatgatgggctttgagattgagagagttacgattatgatgataatgcagttcataatatgaatttggattttggaataggactaattaagtaattctgatcattgaggtgggtatcaaggttcatacaattcgtgattttttgttttgtctttggtatttattaattttaaaaatccattttggaatgaaatttgtgattacttttgtttatccg

SEQ ID NO: 45744 - protein, 531 aa, Arabidopsis thaliana
  peptide (1)..(531): Ceres Seq. ID no. 12561143
MDTLFRLVSLQQQQQSDSIITNQSSLSRTSTTTTGSPQTAYHYNFPQNDVVEECFNFFMDEEDLSSSSSHHNHHNHNNPNTYYSPFTTPTQYHPATSSTPSSTAAAAALASPYSSSGHHNDPSAFSIPQTPPSFDFSANAKWADSVLLEAARAFSDKDTARAQQILWTLNELSSPYGDTEQKLASYFLQALFNRMTGSGERCYRTMVTAAATEKTCSFESTRKTVLKFQEVSPWATFGHVAANGAILEAVDGEAKIHIVDISSTFCTQWPTLLEALATRSDDTPHLRLTTVVVANKFVNDQTASHRMMKEIGNRMEKFARLMGVPFKFNIIHHVGDLSEFDLNELDVKPDEVLAINCVGAMHGIASRGSPRDAVISSFRRLRPRIVTVVEEEADLVGEEEGGFDDEFLRGFGECLRWFRVCFESWEESFPRTSNERLMLERAAGRAIVDLVACEPSDSTERRETARKWSRRMRNSGFGAVGYSDEVADDVRALLRRYKEGVWSMVQCPDAAGIFLCWRDQPVVWASAWRPT

SEQ ID NO: 45745 - protein, 473 aa, Arabidopsis thaliana
  peptide (1)..(473): Ceres Seq. ID no. 12561144
MDEEDLSSSSSHHNHHNHNNPNTYYSPFTTPTQYHPATSSTPSSTAAAAALASPYSSSGHHNDPSAFSIPQTPPSFDFSANAKWADSVLLEAARAFSDKDTARAQQILWTLNELSSPYGDTEQKLASYFLQALFNRMTGSGERCYRTMVTAAATEKTCSFESTRKTVLKFQEVSPWATFGHVAANGAILEAVDGEAKIHIVDISSTFCTQWPTLLEALATRSDDTPHLRLTTVVVANKFVNDQTASHRMMKEIGNRMEKFARLMGVPFKFNIIHHVGDLSEFDLNELDVKPDEVLAINCVGAMHGIASRGSPRDAVISSFRRLRPRIVTVVEEEADLVGEEEGGFDDEFLRGFGECLRWFRVCFESWEESFPRTSNERLMLERAAGRAIVDLVACEPSDSTERRETARKWSRRMRNSGFGAVGYSDEVADDVRALLRRYKEGVWSMVQCPDAAGIFLCWRDQPVVWASAWRPT

SEQ ID NO: 45746 - protein, 337 aa, Arabidopsis thaliana
  peptide (1)..(337): Ceres Seq. ID no. 12561145
MTGSGERCYRTMVTAAATEKTCSFESTRKTVLKFQEVSPWATFGHVAANGAILEAVDGEAKIHIVDISSTFCTQWPTLLEALATRSDDTPHLRLTTVVVANKFVNDQTASHRMMKEIGNRMEKFARLMGVPFKFNIIHHVGDLSEFDLNELDVKPDEVLAINCVGAMHGIASRGSPRDAVISSFRRLRPRIVTVVEEEADLVGEEEGGFDDEFLRGFGECLRWFRVCFESWEESFPRTSNERLMLERAAGRAIVDLVACEPSDSTERRETARKWSRRMRNSGFGAVGYSDEVADDVRALLRRYKEGVWSMVQCPDAAGIFLCWRDQPVVWASAWRPT

SEQ ID NO: 45747 - DNA, 1839 bp, Arabidopsis thaliana
  misc_feature (1)..(1839): Ceres Seq. ID no. 13593206
  misc_feature (1)..(1839): Ortholog of  Ceres SEQ ID NO 14311131 as cited in SEQ ID NO 53729
  misc_feature (1)..(1839): Ortholog of  Ceres SEQ ID NO 13594037 as cited in SEQ ID NO 55666
  misc_feature (1)..(1839): Ortholog of  Ceres SEQ ID NO 13657707 as cited in SEQ ID NO 66407
gagtaacatcaaaatttacaaaaaacaaaaaaacatgctatctctcaaactcttcctcgtaacactcttcttatctcttcaaacactcttcattgcttctcaaactcttcttccttcttcttcaaacacttcatcaaccatctgcaaaacaacacccgatccaaaattctgcaaatcagtgttcccacaaacatctcaaggcgacgttcgcgaatacggccgcttctccctccgcaaatcgctaacgcaatcgcggaaattcacacgcaccattgacaaatacctcaaacgcaacaatgcactattatctcaatccgccgttggagctctccaagactgccgttacctagcaagcctcacaacagactatctcataacatcgttcgagaccgacaatatcactacatcatccaaaacgttgtcgttttccaaagccgacgaaatccaaacacttctctctgcggctttgactaacgagcaaacatgtcttgatggaatcaacaccgctgcttcctcttcttggactatacgaaacggtgtcgcattgcctctaatcaacgacacgaagctctttagtgtttcgctcgcattattcaccaaaggttgggttccaaagaagaagaaacaagtagccagttactcttgggcccatccaaagaacactcatagtcacacaaaaccattccgtcatttccgtaacggagctttaccgttaaagatgacggaacacacacgcgcagtttacgagtctttaagcaggaggaaactcgctgacgacgataatgacgtaaacacggtgcttgtaagcgacatcgtaacggtgaaccaaaacggaacggggaatttcacgaccataacggaagctgttaattcggcgccgaatataactgacggtaccgccggttatttcgttatctacgtgacgtcaggtgtttatgaggaaaacgtagtgattgccaaaaacaaaagatatctaatgatgattggtgacggaataaaccgtacggtggttaccggtaaccggaatgtcgtcgacggttggaccactttcaactccgccacttttgctgttacatcgccgaacttcgttgccgtgaacatgactttccgaaataccgctggaccagagaagcaccaggccgtagctatgaggagcagtgcagatctttcaatcttctatagttgcagtttcgaagcttatcaagacactttatacacacattcactaagacagttctatagagaatgtgacatttatggaacagtcgatttcatattcggcaatgcagctgttgtgttccaagactgtaatctctatccaagacaaccgatgcagaaccagttcaacgctattacagctcaaggtcgtactgatccgaatcaaaacacgggaatttcgattcacaattgtacgattaaaccggcagatgatttggtttcgagtaactatacggttaaaacgtatttgggacgaccatggaaggagtattcacgtacggtttttatgcaatcgtacatagacgaggttgttgaaccggttggttggagagaatggaacggagatttcgcattgagtacgttgtactatgctgagtataacaataccggttccggttcaagtactacagatcgagtggtttggtccggttatcatgtgattaattctacggatgcgaataatttcacagtcgagaatttcttgttaggagatggttggatggttcagagtggtgtaccttatattagtggtttactttcgtaatttcttgtatctgattatttgttttagctattattatgggtaaaaaaaaaaaaaaaaaactcgagggggggcccggt

SEQ ID NO: 45748 - protein, 586 aa, Arabidopsis thaliana
  peptide (1)..(586): Ceres Seq. ID no. 13593207
SNIKIYKKQKNMLSLKLFLVTLFLSLQTLFIASQTLLPSSSNTSSTICKTTPDPKFCKSVFPQTSQGDVREYGRFSLRKSLTQSRKFTRTIDKYLKRNNALLSQSAVGALQDCRYLASLTTDYLITSFETDNITTSSKTLSFSKADEIQTLLSAALTNEQTCLDGINTAASSSWTIRNGVALPLINDTKLFSVSLALFTKGWVPKKKKQVASYSWAHPKNTHSHTKPFRHFRNGALPLKMTEHTRAVYESLSRRKLADDDNDVNTVLVSDIVTVNQNGTGNFTTITEAVNSAPNITDGTAGYFVIYVTSGVYEENVVIAKNKRYLMMIGDGINRTVVTGNRNVVDGWTTFNSATFAVTSPNFVAVNMTFRNTAGPEKHQAVAMRSSADLSIFYSCSFEAYQDTLYTHSLRQFYRECDIYGTVDFIFGNAAVVFQDCNLYPRQPMQNQFNAITAQGRTDPNQNTGISIHNCTIKPADDLVSSNYTVKTYLGRPWKEYSRTVFMQSYIDEVVEPVGWREWNGDFALSTLYYAEYNNTGSGSSTTDRVVWSGYHVINSTDANNFTVENFLLGDGWMVQSGVPYISGLLS

SEQ ID NO: 45749 - protein, 575 aa, Arabidopsis thaliana
  peptide (1)..(575): Ceres Seq. ID no. 13593208
MLSLKLFLVTLFLSLQTLFIASQTLLPSSSNTSSTICKTTPDPKFCKSVFPQTSQGDVREYGRFSLRKSLTQSRKFTRTIDKYLKRNNALLSQSAVGALQDCRYLASLTTDYLITSFETDNITTSSKTLSFSKADEIQTLLSAALTNEQTCLDGINTAASSSWTIRNGVALPLINDTKLFSVSLALFTKGWVPKKKKQVASYSWAHPKNTHSHTKPFRHFRNGALPLKMTEHTRAVYESLSRRKLADDDNDVNTVLVSDIVTVNQNGTGNFTTITEAVNSAPNITDGTAGYFVIYVTSGVYEENVVIAKNKRYLMMIGDGINRTVVTGNRNVVDGWTTFNSATFAVTSPNFVAVNMTFRNTAGPEKHQAVAMRSSADLSIFYSCSFEAYQDTLYTHSLRQFYRECDIYGTVDFIFGNAAVVFQDCNLYPRQPMQNQFNAITAQGRTDPNQNTGISIHNCTIKPADDLVSSNYTVKTYLGRPWKEYSRTVFMQSYIDEVVEPVGWREWNGDFALSTLYYAEYNNTGSGSSTTDRVVWSGYHVINSTDANNFTVENFLLGDGWMVQSGVPYISGLLS

SEQ ID NO: 45750 - protein, 347 aa, Arabidopsis thaliana
  peptide (1)..(347): Ceres Seq. ID no. 13593209
MTEHTRAVYESLSRRKLADDDNDVNTVLVSDIVTVNQNGTGNFTTITEAVNSAPNITDGTAGYFVIYVTSGVYEENVVIAKNKRYLMMIGDGINRTVVTGNRNVVDGWTTFNSATFAVTSPNFVAVNMTFRNTAGPEKHQAVAMRSSADLSIFYSCSFEAYQDTLYTHSLRQFYRECDIYGTVDFIFGNAAVVFQDCNLYPRQPMQNQFNAITAQGRTDPNQNTGISIHNCTIKPADDLVSSNYTVKTYLGRPWKEYSRTVFMQSYIDEVVEPVGWREWNGDFALSTLYYAEYNNTGSGSSTTDRVVWSGYHVINSTDANNFTVENFLLGDGWMVQSGVPYISGLLS

SEQ ID NO: 45751 - DNA, 1629 bp, Arabidopsis thaliana
  misc_feature (1)..(1629): Ceres Seq. ID no. 14309798
  misc_feature (1)..(1629): Ortholog of  Ceres SEQ ID NO 13596816 as cited in SEQ ID NO 62287
aaaaccccctggtctggaggaaatagtaccagctaagctcgcagctcaaagctcagtgtttaataattgtatagcttttttggtgaacgaagagtcagatcggcgagcctgagatgggttggggttcggtgttgctattactggcggtggctcttctttgtcagagggcaagttcaatcggagctaactggggcacacaggcgtcgcacccacttccaccggacatagttgtgcggatgctaagagagaatggtattcagaaagtaaagctctttgacgccgaatacgacactctcagagctttgggcaaatccggaatcgaagtcatggttggtattcccaatgagatgcttgcgactctcgcctctagcctgaaagctgctgagaaatgggttgctaaaaatgtctctactcacatctccaccgacaacgtcaacatcagatatgtggctgttgggaatgaacctttcttgtctacttataatgggagctatctgagtactactttccctgcgttgaggaacatccaaattgcaattataaaggctggccttcagaaccaagtgaaggtcacttgtcccttgaacgctgatgtctatgacagctccaccacttttccttctggaggggacttcagggccaatatccgtgacctcatgatcactatcgtcaagttcttgagcgaaaatggcggtcctttcactgttaacatctacccttacatcagtctttacaccaaccccgatttcccagttgattacgccttctttgacggcaatgcacagcccctgaacgatggtgggactttttattacaacatgtttgatgcaaattacgacaccctagtccacgcgttggagaagaatgggtttggtaacatgcctatcattattggggaaattggttggcctactgatggagacagtaatgcgaatttggactacgctaagaagttcaaccaaggctttatggctcacatctcaggggggaaagggactccgaggagacctggccctatcgatgcatacctgttcagcttgatagacgaggacgccaagagtgttcagccaggatactttgagcgacactgggggatattcacatttgacggcttaccaaaatatgccttgaacctagggacaacgaacacaggagctctgatccaggccaaaggggtacgctacctagagaggaagtggtgtgtgatgaagccaaatgtgaggttggatgatccgcaggtagctccagccgtgagctacgcgtgtagccttggggactgtactagtcttggggttgggacgtcctgtgctaatcttgacgggaaacaaaacatatcgtatgcattcaacagttattatcagatacaggatcagcttgatacagcttgtaagttcccaaacatatcagaggtgaccaagacagatccatctactggaacttgcagatttccgattatgatagaaccttactacggtggggcagcccgggaacacgggttctttttcccactactgatggtggcagccatcgcagtctctattttttgatggtttcttcttgtcaatttgtaattctgtgtgatggcttgaactatttttttttcttcttgaattctgatttctcttcctt

SEQ ID NO: 45752 - protein, 477 aa, Arabidopsis thaliana
  peptide (1)..(477): Ceres Seq. ID no. 14309799
MGWGSVLLLLAVALLCQRASSIGANWGTQASHPLPPDIVVRMLRENGIQKVKLFDAEYDTLRALGKSGIEVMVGIPNEMLATLASSLKAAEKWVAKNVSTHISTDNVNIRYVAVGNEPFLSTYNGSYLSTTFPALRNIQIAIIKAGLQNQVKVTCPLNADVYDSSTTFPSGGDFRANIRDLMITIVKFLSENGGPFTVNIYPYISLYTNPDFPVDYAFFDGNAQPLNDGGTFYYNMFDANYDTLVHALEKNGFGNMPIIIGEIGWPTDGDSNANLDYAKKFNQGFMAHISGGKGTPRRPGPIDAYLFSLIDEDAKSVQPGYFERHWGIFTFDGLPKYALNLGTTNTGALIQAKGVRYLERKWCVMKPNVRLDDPQVAPAVSYACSLGDCTSLGVGTSCANLDGKQNISYAFNSYYQIQDQLDTACKFPNISEVTKTDPSTGTCRFPIMIEPYYGGAAREHGFFFPLLMVAAIAVSIF

SEQ ID NO: 45753 - protein, 436 aa, Arabidopsis thaliana
  peptide (1)..(436): Ceres Seq. ID no. 14309800
MLRENGIQKVKLFDAEYDTLRALGKSGIEVMVGIPNEMLATLASSLKAAEKWVAKNVSTHISTDNVNIRYVAVGNEPFLSTYNGSYLSTTFPALRNIQIAIIKAGLQNQVKVTCPLNADVYDSSTTFPSGGDFRANIRDLMITIVKFLSENGGPFTVNIYPYISLYTNPDFPVDYAFFDGNAQPLNDGGTFYYNMFDANYDTLVHALEKNGFGNMPIIIGEIGWPTDGDSNANLDYAKKFNQGFMAHISGGKGTPRRPGPIDAYLFSLIDEDAKSVQPGYFERHWGIFTFDGLPKYALNLGTTNTGALIQAKGVRYLERKWCVMKPNVRLDDPQVAPAVSYACSLGDCTSLGVGTSCANLDGKQNISYAFNSYYQIQDQLDTACKFPNISEVTKTDPSTGTCRFPIMIEPYYGGAAREHGFFFPLLMVAAIAVSIF

SEQ ID NO: 45754 - protein, 406 aa, Arabidopsis thaliana
  peptide (1)..(406): Ceres Seq. ID no. 14309801
MVGIPNEMLATLASSLKAAEKWVAKNVSTHISTDNVNIRYVAVGNEPFLSTYNGSYLSTTFPALRNIQIAIIKAGLQNQVKVTCPLNADVYDSSTTFPSGGDFRANIRDLMITIVKFLSENGGPFTVNIYPYISLYTNPDFPVDYAFFDGNAQPLNDGGTFYYNMFDANYDTLVHALEKNGFGNMPIIIGEIGWPTDGDSNANLDYAKKFNQGFMAHISGGKGTPRRPGPIDAYLFSLIDEDAKSVQPGYFERHWGIFTFDGLPKYALNLGTTNTGALIQAKGVRYLERKWCVMKPNVRLDDPQVAPAVSYACSLGDCTSLGVGTSCANLDGKQNISYAFNSYYQIQDQLDTACKFPNISEVTKTDPSTGTCRFPIMIEPYYGGAAREHGFFFPLLMVAAIAVSIF

SEQ ID NO: 45755 - DNA, 1923 bp, Arabidopsis thaliana
  misc_feature (1)..(1923): Ceres Seq. ID no. 13646485
  misc_feature (1)..(1923): Ortholog of  Ceres SEQ ID NO 15176959 as cited in SEQ ID NO 52610
attttctctttatkgacttttcctttgctttgacttgtcagtcttctcttccccttttctcttcttttttttttttgatcaaacaaatcaatctcacacctcttcttcttcttcttcttcttcttcttcttcaacctcttaaatctcaaaatctcaatcatcaagcttctccttcttcttcttctttccatcttcgcttcaacaacaatgtctaatttcacttatacatctgctttcaacttatccgacaactccccttttaatcccgccattggttcttcgtcttcttcttcctccgcgctcgtcgtagcttccgatgatgataataataccgatgatgcttgtagcatctgtctcgagcctttcaccctccaggatccttccactgtcagattcttttaatcctctctctttttgtttttgtctataagctcttcggggtttaacgatctccttctcgcttttatttcgcttttacttgaaatctgggataatcggattttgtgccttgcgatattttgactcagattaataacgagatcgtttgattaactcgatcacttgttcttgaaccatcgttgaacatgtttgattgatcctctcgctttctcattttggtcctattggatctaacataaacatcttctattgttgtttcttctccgatatctaaagctttccgatggttttctcaggtcaccagctgcaaacatgaatatcaccttcagtgcatcattgaatggtcacagagaagcaaagagtgtcctatttgctggcaattgtttgttttgagagaccctgctagccaagagcttttagctgctgtggaaaaggaaagacttttgaaaaccaggaatatatcttcatcctctccaatctctattcatcactctcatgacgattttcactctgaggaggaggaatcacagtttagcagctttgatgaacaattcttgaggcatcttactgaagctgcacatagacgttgtttgcttcgcagaagggatggtcaaatatcctctagtcttgtttcgtccagcgatcccactacgattcatcctactgatttggtcaatctttatcgtctctctgctatttcccatgttgaacatcaaaactcaaacccttgtccaagtcctggctcaatgactccatctcccgtctctggtcattcttccattcctgcagatagcaataacggatccagaatctctcctggcccttctccatctcgttcatctcaaagtccaaaatcacctgaagcatcctcgcttccggaagccattaaatcgaaactagctgctgcttctgcaaagtacaaggaatcgatctctaaaagtaaacaaggtcttaaagagaagctacttgctcgcaataactcagtgaaagaattgagcaaaggagtgcaacgtgagatgaatgcaggaatagctggtgttgcacgaatgatcgaacgcatggatttttcttcaaaacgttttggagggtctgctcatgtatcaacctccactgctactgcttctggattcaatttctcattcaaagggaaacgtgtagaagccaattctaagtctaacaacaatggagacaaaaccgaaccccaaaagctgcagggaggagaaacgtgctgaggcaatcagaaaaatggagagaggcctttaatgcaagcgatgtacgtttccattgaatcaacttacccgttggtcttcgcatcctgcattgttcagagctcacggtctcgtctctcgtctctctgttacctttgcgatgcgtacttttagatggctaaaataagcaactgagtaataattttattactcgattttgacggagccaaaactataatatttattaatttcaaaggataatgttttatgttttttcactaagaattggatcagtcctaatcaatattgcactatg

SEQ ID NO: 45756 - protein, 161 aa, Arabidopsis thaliana
  peptide (1)..(161): Ceres Seq. ID no. 15219409
MTPSPVSGHSSIPADSNNGSRISPGPSPSRSSQSPKSPEASSLPEAIKSKLAAASAKYKESISKSKQGLKEKLLARNNSVKELSKGVQREMNAGIAGVARMIERMDFSSKRFGGSAHVSTSTATASGFNFSFKGKRVEANSKSNNNGDKTEPQKLQGGETC

SEQ ID NO: 45757 - DNA, 2127 bp, Arabidopsis thaliana; identical to SEQ ID NO: 42669
  misc_feature (1)..(2127): Ceres Seq. ID no. 13646490
  misc_feature (1)..(2127): Ortholog of  Ceres SEQ ID NO 15174638 as cited in SEQ ID NO 53185
  misc_feature (1)..(2127): Ortholog of  Ceres SEQ ID NO 13657460 as cited in SEQ ID NO 66115
  misc_feature (1)..(2127): Ortholog of  Ceres SEQ ID NO 13659394 as cited in SEQ ID NO 67049

SEQ ID NO: 45758 - protein, 533 aa, Arabidopsis thaliana; identical to SEQ ID NO: 42670
  peptide (1)..(533): Ceres Seq. ID no. 13646491

SEQ ID NO: 45759 - protein, 518 aa, Arabidopsis thaliana; identical to SEQ ID NO: 42671
  peptide (1)..(518): Ceres Seq. ID no. 13646492

SEQ ID NO: 45760 - protein, 517 aa, Arabidopsis thaliana; identical to SEQ ID NO: 42672
  peptide (1)..(517): Ceres Seq. ID no. 13646493

SEQ ID NO: 45761 - DNA, 2106 bp, Arabidopsis thaliana
  misc_feature (1)..(2106): Ceres Seq. ID no. 12561149
  misc_feature (1)..(2106): Ortholog of  Ceres SEQ ID NO 14313963 as cited in SEQ ID NO 59547
tgttttccttcttcttccttatctccgcctctttctagggtttctctcaaatcagctcttcaaccatggcggacgaatctcaatactcatcggatacttactccaacaaacgcaaatacgaagaaccaaccgctcctcctccatcaactcgcagacctaccggcttctcttctggtccgatcccatctgcttcagttgatcccaccgcacctaccggtcttccaccttcttcttacaacagcgttcctcctccgatggatgaaatccagattgctaaacaaaaagcacaagaaatcgctgctcgtcttcttaatagcgctgatgctaaacgtcctcgtgttgacaatggtgcttcttatgattatggtgacaacaaaggatttagctcatatccctctgagggtaagcagatgtcagggacggttccgtcttcgataccggtttcgtatggtagctttcaaggaactactaagaagattgatattccgaatatgagagttggtgttatcattggtaaaggtggagagactattaagtatcttcagcttcagtctggagctaagattcaggttactagagatatggatgcagaccctaattgtgctactaggactgttgacctaactggtacccctgatcagatctcaaaggctgaacagttgatcactgacgtccttcaagaggctgaggcaggcaatacagctggttcaggtggaggaggcggccgtaggatgggtggacaagcaggggctgatcaatttgttatgaaaattccgaataacaaggttggtttgataattggtaaaggaggtgaaacaatcaaatctatgcaagctaagactggagctagaattcaggttattcctttacatttgccccctggagacccaacgccagaacggactttgcagattgatgggataaccgaacagattgaacatgctaaacaattagttaatgaaatcatcagtggcgagaaccgtatgagaaactcagcaatgggtggaggctatccacaacaaggtggttatcaagcccgcccaccctcaagctgggcaccacctggtggtccgccagcacaacctggttatggtggttacatgcaaccaggagcatatccaggtccacctcagtatggtcaatcaccttacggaagttaccctcaacaaacttcagctggttactatgatcagtcctctgtgccaccatcccagcagagcgcgcaaggtgagtatgattattacggtcagcaacagtctcagcaaccaagcagtggtggtagctcagccccaccaacagataccacagggtacaattactaccagcatgcttctggttatggccaagctggtcagggataccagcaagatgggtatggagcttacaatgcctcgcagcaatcgggatatggtcaagctgctgggtatgatcaacagggtggttacggcagcaccactaatccaagtcaagaggaagatgcatctcaagccgctccaccatcgtcagctcagtctggacaggctgggtatggtacaactggtcaacagccgcctgctcaaggtagtactggtcaggcagggtatggagctcctccaacttctcaggctggttacagcagccagccagcagcagcttacaattctgggtatggagcaccaccacctgcttcaaagccaccgacttatggccagagccagcagtctccaggtgctcctgggagctatggtagtcagtctgggtatgcccaaccagcagcttcagggtatggacaacctccagcgtatgggtatggtcaagcgccacagggatatgggtcttatggaggatacacacaacctgctgctggtggaggttactcttcagacgggtctgctggagccactgctggtggtggtggtggtacaccagcttcacagagtgctgctccacctgctggaccgcccaaagcatccccgaaaagttgatatgtgtatggataaatttctactgttatacaaaacatgcttccatgctcttatctttttcttgaggatttatcaatgtttgtgtttcacattttagctcttgtctgtcaactctctttatattaaagataatgttacgttt

SEQ ID NO: 45762 - protein, 632 aa, Arabidopsis thaliana
  peptide (1)..(632): Ceres Seq. ID no. 12561150
MADESQYSSDTYSNKRKYEEPTAPPPSTRRPTGFSSGPIPSASVDPTAPTGLPPSSYNSVPPPMDEIQIAKQKAQEIAARLLNSADAKRPRVDNGASYDYGDNKGFSSYPSEGKQMSGTVPSSIPVSYGSFQGTTKKIDIPNMRVGVIIGKGGETIKYLQLQSGAKIQVTRDMDADPNCATRTVDLTGTPDQISKAEQLITDVLQEAEAGNTAGSGGGGGRRMGGQAGADQFVMKIPNNKVGLIIGKGGETIKSMQAKTGARIQVIPLHLPPGDPTPERTLQIDGITEQIEHAKQLVNEIISGENRMRNSAMGGGYPQQGGYQARPPSSWAPPGGPPAQPGYGGYMQPGAYPGPPQYGQSPYGSYPQQTSAGYYDQSSVPPSQQSAQGEYDYYGQQQSQQPSSGGSSAPPTDTTGYNYYQHASGYGQAGQGYQQDGYGAYNASQQSGYGQAAGYDQQGGYGSTTNPSQEEDASQAAPPSSAQSGQAGYGTTGQQPPAQGSTGQAGYGAPPTSQAGYSSQPAAAYNSGYGAPPPASKPPTYGQSQQSPGAPGSYGSQSGYAQPAASGYGQPPAYGYGQAPQGYGSYGGYTQPAAGGGYSSDGSAGATAGGGGGTPASQSAAPPAGPPKASPKS

SEQ ID NO: 45763 - protein, 569 aa, Arabidopsis thaliana
  peptide (1)..(569): Ceres Seq. ID no. 12561151
MDEIQIAKQKAQEIAARLLNSADAKRPRVDNGASYDYGDNKGFSSYPSEGKQMSGTVPSSIPVSYGSFQGTTKKIDIPNMRVGVIIGKGGETIKYLQLQSGAKIQVTRDMDADPNCATRTVDLTGTPDQISKAEQLITDVLQEAEAGNTAGSGGGGGRRMGGQAGADQFVMKIPNNKVGLIIGKGGETIKSMQAKTGARIQVIPLHLPPGDPTPERTLQIDGITEQIEHAKQLVNEIISGENRMRNSAMGGGYPQQGGYQARPPSSWAPPGGPPAQPGYGGYMQPGAYPGPPQYGQSPYGSYPQQTSAGYYDQSSVPPSQQSAQGEYDYYGQQQSQQPSSGGSSAPPTDTTGYNYYQHASGYGQAGQGYQQDGYGAYNASQQSGYGQAAGYDQQGGYGSTTNPSQEEDASQAAPPSSAQSGQAGYGTTGQQPPAQGSTGQAGYGAPPTSQAGYSSQPAAAYNSGYGAPPPASKPPTYGQSQQSPGAPGSYGSQSGYAQPAASGYGQPPAYGYGQAPQGYGSYGGYTQPAAGGGYSSDGSAGATAGGGGGTPASQSAAPPAGPPKASPKS

SEQ ID NO: 45764 - protein, 517 aa, Arabidopsis thaliana
  peptide (1)..(517): Ceres Seq. ID no. 12561152
MSGTVPSSIPVSYGSFQGTTKKIDIPNMRVGVIIGKGGETIKYLQLQSGAKIQVTRDMDADPNCATRTVDLTGTPDQISKAEQLITDVLQEAEAGNTAGSGGGGGRRMGGQAGADQFVMKIPNNKVGLIIGKGGETIKSMQAKTGARIQVIPLHLPPGDPTPERTLQIDGITEQIEHAKQLVNEIISGENRMRNSAMGGGYPQQGGYQARPPSSWAPPGGPPAQPGYGGYMQPGAYPGPPQYGQSPYGSYPQQTSAGYYDQSSVPPSQQSAQGEYDYYGQQQSQQPSSGGSSAPPTDTTGYNYYQHASGYGQAGQGYQQDGYGAYNASQQSGYGQAAGYDQQGGYGSTTNPSQEEDASQAAPPSSAQSGQAGYGTTGQQPPAQGSTGQAGYGAPPTSQAGYSSQPAAAYNSGYGAPPPASKPPTYGQSQQSPGAPGSYGSQSGYAQPAASGYGQPPAYGYGQAPQGYGSYGGYTQPAAGGGYSSDGSAGATAGGGGGTPASQSAAPPAGPPKASPKS

SEQ ID NO: 45765 - DNA, 1664 bp, Arabidopsis thaliana; identical to SEQ ID NO: 26269
  misc_feature (1)..(1664): Ceres Seq. ID no. 13591642
  misc_feature (1)..(1664): Ortholog of  Ceres SEQ ID NO 14305697 as cited in SEQ ID NO 52505
  misc_feature (1)..(1664): Ortholog of  Ceres SEQ ID NO 15179023 as cited in SEQ ID NO 0

SEQ ID NO: 45766 - protein, 448 aa, Arabidopsis thaliana; identical to SEQ ID NO: 26270
  peptide (1)..(448): Ceres Seq. ID no. 13591643

SEQ ID NO: 45767 - protein, 296 aa, Arabidopsis thaliana; identical to SEQ ID NO: 26271
  peptide (1)..(296): Ceres Seq. ID no. 13591644

SEQ ID NO: 45768 - DNA, 1275 bp, Arabidopsis thaliana
  misc_feature (1)..(1275): Ceres Seq. ID no. 13646508
  misc_feature (1)..(1275): Ortholog of  Ceres SEQ ID NO 12583469 as cited in SEQ ID NO 51031
  misc_feature (1)..(1275): Ortholog of  Ceres SEQ ID NO 13597389 as cited in SEQ ID NO 63426
  misc_feature (1)..(1275): Ortholog of  Ceres SEQ ID NO 13595998 as cited in SEQ ID NO 68161
  misc_feature (1)..(1275): Ortholog of  Ceres SEQ ID NO 15180463 as cited in SEQ ID NO 0
actctatcttgatcaaatctctactagcaagttacaatggctactctctctcttcactcccactctttccttcttgttctccttccgtttatcctcattctccgacaaaacttggcagtggccggaggatgtcaggttccgccggtgatttttaactttggcgattccaactccgacacgggtggactcgtcgccggactcggatacagcattggtcttcctaacggtcgttcgtttttccagagatccaccggccgattatccgacggacgcctcgtcatcgatttcctttgccagagtttgaatacaagtctattgaacccatacttagactcattggttggatcaaagttccaaaacggtgccaatttcgcaattgttggatcttccactcttcccagatatgttccttttgctctcaacattcagctcatgcagttcctccatttcaaatcccgagcactcgagcttgcttctatttcagatcctttgaaagagatgatgataggcgaaagtggattcagaaacgcattgtacatgatcgatatcggacagaatgatattgcggattcattctccaaaggcctttcttactcccgggtcgtcaagcttattccaaacgttatttccgagatcaaaagtgccataaagatattgtatgatgaaggagggaggaaattttgggttcacaacacaggaccattaggttgtctgcctcagaaactttcaatggttcatagcaaaggttttgataagcatggttgtctagcaacttataacgcagctgcaaaactgtttaacgaaggactggatcatatgtgtcgggatctgaggacggaactgaaagaggccaacattgtctatgtcgacatttatgccatcaagtacgatctcatcgcaaactccaacaattatggctttgagaaacccttaatggcatgttgcggatacggagggcctccttacaactacaatgtgaacataacgtgtgggaatggtggctctaaaagttgcgacgaagggtctcggtttataagctgggacggaatacactacaccgagactgctaacgccattgtagccatgaaagtattgtcgatgcaacattctacgccaccaactccgttccatttcttctgcggcggctgacattctacacattgcttccgttccaagtaagaaattttatttttgtttcggatttggttttagcctctgtaattgtgcaaattagacttcaccaatataaaaaccggtcacaattgattttctttc

SEQ ID NO: 45769 - protein, 370 aa, Arabidopsis thaliana
  peptide (1)..(370): Ceres Seq. ID no. 13646509
MATLSLHSHSFLLVLLPFILILRQNLAVAGGCQVPPVIFNFGDSNSDTGGLVAGLGYSIGLPNGRSFFQRSTGRLSDGRLVIDFLCQSLNTSLLNPYLDSLVGSKFQNGANFAIVGSSTLPRYVPFALNIQLMQFLHFKSRALELASISDPLKEMMIGESGFRNALYMIDIGQNDIADSFSKGLSYSRVVKLIPNVISEIKSAIKILYDEGGRKFWVHNTGPLGCLPQKLSMVHSKGFDKHGCLATYNAAAKLFNEGLDHMCRDLRTELKEANIVYVDIYAIKYDLIANSNNYGFEKPLMACCGYGGPPYNYNVNITCGNGGSKSCDEGSRFISWDGIHYTETANAIVAMKVLSMQHSTPPTPFHFFCGG

SEQ ID NO: 45770 - protein, 238 aa, Arabidopsis thaliana
  peptide (1)..(238): Ceres Seq. ID no. 13646510
MQFLHFKSRALELASISDPLKEMMIGESGFRNALYMIDIGQNDIADSFSKGLSYSRVVKLIPNVISEIKSAIKILYDEGGRKFWVHNTGPLGCLPQKLSMVHSKGFDKHGCLATYNAAAKLFNEGLDHMCRDLRTELKEANIVYVDIYAIKYDLIANSNNYGFEKPLMACCGYGGPPYNYNVNITCGNGGSKSCDEGSRFISWDGIHYTETANAIVAMKVLSMQHSTPPTPFHFFCGG

SEQ ID NO: 45771 - protein, 216 aa, Arabidopsis thaliana
  peptide (1)..(216): Ceres Seq. ID no. 13646511
MMIGESGFRNALYMIDIGQNDIADSFSKGLSYSRVVKLIPNVISEIKSAIKILYDEGGRKFWVHNTGPLGCLPQKLSMVHSKGFDKHGCLATYNAAAKLFNEGLDHMCRDLRTELKEANIVYVDIYAIKYDLIANSNNYGFEKPLMACCGYGGPPYNYNVNITCGNGGSKSCDEGSRFISWDGIHYTETANAIVAMKVLSMQHSTPPTPFHFFCGG

SEQ ID NO: 45772 - DNA, 2665 bp, Arabidopsis thaliana
  misc_feature (1)..(2665): Ceres Seq. ID no. 12561126
  misc_feature (1)..(2665): Ortholog of  Ceres SEQ ID NO 13600595 as cited in SEQ ID NO 629
  misc_feature (1)..(2665): Ortholog of  Ceres SEQ ID NO 13593379 as cited in SEQ ID NO 20573
atgaaacacttcactcgtctcttatcattgttcttcatcctcattacttcattatctttggctaaatcaaccattgtctctcatgatgaacgagccatcacaattaatggaaaacgccggatcctactttcaggctccattcattacccacgaagcactgctgatatgtggcctgatctgatcaacaaagccaaagatggtggcttagatgcaatcgagacgtacgttttttggaacgcacatgaaccaaaacgtagggaatacgatttctcggggaatctcgatgttgttcgttttatcaaaaccattcaagacgcaggtctctactccgttcttcgcatcggaccttatgtttgcgcagaatggaattatggaggctttcccgtgtggctgcacaatatgcccaacatgaaattcagaacagttaaccctagtttcatgaatgaaatgcaaaatttcactacaaagatagtgaagatgatgaaggaagagaagctctttgcttcacaaggcggtccaattatcctagctcagatcgagaatgaatacgggaatgtgatctcgtcgtatggagcagagggtaaggcctacattgattggtgtgccaacatggccaactctctagacattggtgttccatggcttatgtgccaacaaccaaacgctcctcagcctatgctcgagacgtgcaatggattctactgtgaccagtacgaaccaaccaacccgagcaccccaaagatgtggacagagaattggaccggctggttcaagaattggggaggcaaacatccttacagaaccgctgaggatcttgctttttcagttgctagattcttccaaaccggaggaactttccaaaactattacatgtaccatggtggtactaactttggaagagtcgctggaggtccatacatcaccacttcatatgattaccatgctcctcttgatgaattcggtaacttgaaccagcctaaatggggtcacttgaaacagctccacacagtcttaaaatccatggagaaatcgctgacttacggaaacatatcaagaatcgatcttggcaactcaatcaaggcgacgatttacacaacaaaggagggatcaagctgcttcatcggtaatgtgaacgcaactgcggatgctttagtcaacttcaaaggaaaagactaccacgtaccggcttggtctgtaagtgttcttccggactgcgataaagaggcttacaacactgcaaaagtgaacactcaaacatcaatcatgaccgaggactctagtaagccagagaggctggaatggacctggagaccggagtccgctcagaagatgattcttaaaggcagtggagatctcattgccaagggtcttgtagaccaaaaagatgttacaaacgatgctagtgactatctttggtacatgactaggcttcatctcgacaagaaagatccactttggagccgaaacatgacgttacgggttcacagcaatgcccatgttctacacgcttacgtcaatggaaaatacgtcggtaaccaattcgtaaaggacgggaaatttgattacagatttgagaggaaggtcaatcatctcgttcatgggactaatcacatttcacttctcagcgtttccgttggactacagaattatggacctttctttgagagcggaccaactggaatcaatggtcctgtgtccttagtcggatacaaaggagaggaaacaatcgagaaggatctctcgcagcatcaatgggactacaagattggtttgaatggatacaacgacaaacttttcagcataaaatctgttggtcaccaaaaatgggcaaacgaaaagctacctactggtcggatgttgacatggtacaaggcaaagttcaaggctcctcttggtaaggagccagtgattgtggacttaaatggtctcgggaaaggtgaggcttggatcaacggtcagagcattggtcgttactggccgagctttaactctagcgatgatggttgcaaagacgaatgtgactaccgtggggcgtatggtagcgacaaatgcgcttttatgtgcggcaaaccaactcaaagatggtaccatgttccacgatcgttcttgaatgcgagcggacataacactatcacactattcgaagaaatgggcggtaacccgtcaatggtgaacttcaagacagtagtggttggaacagtttgtgccagggctcatgaacacaacaaagtggagttgtcctgccataaccggccgatttcagccgttaaatttgcaagctttggaaatccgttggggcattgtgggtcattcgcggttggtacgtgccaaggagacaaggatgctgcgaagaccgtggctaaagagtgtgttggcaaactcaactgcactgtcaatgtgtcttccgacacgtttggttctactttggactgtggagattcacctaaaaaattggccgtggaattggagtgctagattagatcttagctctagctagctagtgattgcaataatttccatcaaataatgtcgtacttgtttttgatctatcaggttttttagatgatttggatttaggattgtggaataaatattatgatcgaataaaagtttctcttgtttaaatattttatcttgagatggtttttgttctgacgcggccgcg

SEQ ID NO: 45773 - protein, 824 aa, Arabidopsis thaliana
  peptide (1)..(824): Ceres Seq. ID no. 12561127
MKHFTRLLSLFFILITSLSLAKSTIVSHDERAITINGKRRILLSGSIHYPRSTADMWPDLINKAKDGGLDAIETYVFWNAHEPKRREYDFSGNLDVVRFIKTIQDAGLYSVLRIGPYVCAEWNYGGFPVWLHNMPNMKFRTVNPSFMNEMQNFTTKIVKMMKEEKLFASQGGPIILAQIENEYGNVISSYGAEGKAYIDWCANMANSLDIGVPWLMCQQPNAPQPMLETCNGFYCDQYEPTNPSTPKMWTENWTGWFKNWGGKHPYRTAEDLAFSVARFFQTGGTFQNYYMYHGGTNFGRVAGGPYITTSYDYHAPLDEFGNLNQPKWGHLKQLHTVLKSMEKSLTYGNISRIDLGNSIKATIYTTKEGSSCFIGNVNATADALVNFKGKDYHVPAWSVSVLPDCDKEAYNTAKVNTQTSIMTEDSSKPERLEWTWRPESAQKMILKGSGDLIAKGLVDQKDVTNDASDYLWYMTRLHLDKKDPLWSRNMTLRVHSNAHVLHAYVNGKYVGNQFVKDGKFDYRFERKVNHLVHGTNHISLLSVSVGLQNYGPFFESGPTGINGPVSLVGYKGEETIEKDLSQHQWDYKIGLNGYNDKLFSIKSVGHQKWANEKLPTGRMLTWYKAKFKAPLGKEPVIVDLNGLGKGEAWINGQSIGRYWPSFNSSDDGCKDECDYRGAYGSDKCAFMCGKPTQRWYHVPRSFLNASGHNTITLFEEMGGNPSMVNFKTVVVGTVCARAHEHNKVELSCHNRPISAVKFASFGNPLGHCGSFAVGTCQGDKDAAKTVAKECVGKLNCTVNVSSDTFGSTLDCGDSPKKLAVELEC

SEQ ID NO: 45774 - protein, 769 aa, Arabidopsis thaliana
  peptide (1)..(769): Ceres Seq. ID no. 12561128
MWPDLINKAKDGGLDAIETYVFWNAHEPKRREYDFSGNLDVVRFIKTIQDAGLYSVLRIGPYVCAEWNYGGFPVWLHNMPNMKFRTVNPSFMNEMQNFTTKIVKMMKEEKLFASQGGPIILAQIENEYGNVISSYGAEGKAYIDWCANMANSLDIGVPWLMCQQPNAPQPMLETCNGFYCDQYEPTNPSTPKMWTENWTGWFKNWGGKHPYRTAEDLAFSVARFFQTGGTFQNYYMYHGGTNFGRVAGGPYITTSYDYHAPLDEFGNLNQPKWGHLKQLHTVLKSMEKSLTYGNISRIDLGNSIKATIYTTKEGSSCFIGNVNATADALVNFKGKDYHVPAWSVSVLPDCDKEAYNTAKVNTQTSIMTEDSSKPERLEWTWRPESAQKMILKGSGDLIAKGLVDQKDVTNDASDYLWYMTRLHLDKKDPLWSRNMTLRVHSNAHVLHAYVNGKYVGNQFVKDGKFDYRFERKVNHLVHGTNHISLLSVSVGLQNYGPFFESGPTGINGPVSLVGYKGEETIEKDLSQHQWDYKIGLNGYNDKLFSIKSVGHQKWANEKLPTGRMLTWYKAKFKAPLGKEPVIVDLNGLGKGEAWINGQSIGRYWPSFNSSDDGCKDECDYRGAYGSDKCAFMCGKPTQRWYHVPRSFLNASGHNTITLFEEMGGNPSMVNFKTVVVGTVCARAHEHNKVELSCHNRPISAVKFASFGNPLGHCGSFAVGTCQGDKDAAKTVAKECVGKLNCTVNVSSDTFGSTLDCGDSPKKLAVELEC

SEQ ID NO: 45775 - protein, 691 aa, Arabidopsis thaliana
  peptide (1)..(691): Ceres Seq. ID no. 12561129
MPNMKFRTVNPSFMNEMQNFTTKIVKMMKEEKLFASQGGPIILAQIENEYGNVISSYGAEGKAYIDWCANMANSLDIGVPWLMCQQPNAPQPMLETCNGFYCDQYEPTNPSTPKMWTENWTGWFKNWGGKHPYRTAEDLAFSVARFFQTGGTFQNYYMYHGGTNFGRVAGGPYITTSYDYHAPLDEFGNLNQPKWGHLKQLHTVLKSMEKSLTYGNISRIDLGNSIKATIYTTKEGSSCFIGNVNATADALVNFKGKDYHVPAWSVSVLPDCDKEAYNTAKVNTQTSIMTEDSSKPERLEWTWRPESAQKMILKGSGDLIAKGLVDQKDVTNDASDYLWYMTRLHLDKKDPLWSRNMTLRVHSNAHVLHAYVNGKYVGNQFVKDGKFDYRFERKVNHLVHGTNHISLLSVSVGLQNYGPFFESGPTGINGPVSLVGYKGEETIEKDLSQHQWDYKIGLNGYNDKLFSIKSVGHQKWANEKLPTGRMLTWYKAKFKAPLGKEPVIVDLNGLGKGEAWINGQSIGRYWPSFNSSDDGCKDECDYRGAYGSDKCAFMCGKPTQRWYHVPRSFLNASGHNTITLFEEMGGNPSMVNFKTVVVGTVCARAHEHNKVELSCHNRPISAVKFASFGNPLGHCGSFAVGTCQGDKDAAKTVAKECVGKLNCTVNVSSDTFGSTLDCGDSPKKLAVELEC

SEQ ID NO: 45776 - DNA, 2271 bp, Arabidopsis thaliana
  misc_feature (1)..(2271): Ceres Seq. ID no. 14309805
  misc_feature (1)..(2271): Ortholog of  Ceres SEQ ID NO 12460981 as cited in SEQ ID NO 65146
agagcccaacattggattcctcttctttgaccattcctctctacctgaataacccgttaatctctctctgtccctttcttcttcttttttcaagaacaataaaaaaatgtctcaagattctgcaactactactccgccgccacctttaacctccgacgtttcaatgccttccggtgaggaagatgagccaaagcatgtaacattggaagaagaagcaccggtgacttcggagacaaatctgaagctacctttaatgccggagctagaggagtcaaatcatacggcggaggtagtttcagagaaggtgacgccggagacgatgactttggagtcagaaggtctcaaccacgcggcggaggattcaaagcagacacatgaagtaacgccggaggcagagactttgaagctagaggttctcaaccacacggcggaggattcagagcagacacatgaagtgacgccggagacagagacagtgaagtcagagtttctcaaccacgtggcggaggattcagagcagacacatgaagtgacgccggagacagagactgtgaagtcagaggttctcaaccatgcggcggaggattcagagcagccacgtggagtgacgccgacgccggagacagaaacttctgagccaaacacgtcattgcttgtaacttccgagacagaagagcctaaccatgcggcggaggattattcagagacagagccatcacagaaactaatgttggagcagaggagaaagtacatggaagtagaagattggacagagccagaactaccagatgaagcggtgttagaagctgcagcgtcagtccctgagccaaagcaaccagagcctcagacaccaccaccaccaccatctactactacttccactgttgcatctagatctttagccgaaatgatgaacagagaagaagcagaagcagaagagaaacaaaagattcagattcctcgtagtctcggttcattcaaagaagaaacaaacaaaatctccgatctttcagaaacagagttaaacgcacttcaagagcttcgtcaccttcttcaagtatcacaagattcaagcaaaacctctatatggggtgtgccatttctcaaagacgacagaaccgacgtcgttttgttaaagtttctaagagcaagagactttaaacctcaagaagcttactcaatgctaaacaagacactccaatggagaatcgacttcaacatcgaagagcttctagacgaaaacctcggtgacgatttagacaaagttgtgttcatgcaaggacaagacaaggagaatcatcctgtctgtttcaatgtctacggtgagtttcagaacaaagatctttatcagaaaacgttttcagatgaagagaagagagaacggttcttgagatggaggattcagtttcttgaaaagagtatcaggaatcttgattttgtagctggtggtgtttccacgatatgtcaagtaaatgatcttaagaattctccaggacctggtaagactgagcttaggttagctactaagcaagctcttcatcttcttcaagacaattaccctgagtttgtctctaaacagatattcatcaatgttccatggtggtaccttgcgttctataggattattagtccttttatgtcacaaagatcaaagagcaaactagttttcgcaggtccttcaagatctgcagaaacccttctcaggtacatatcacccgaacatgtcccggttcagtatggtggactaagtgtggataattgcgagtgtaactcggatttcacacacgatgatatcgctaccgagatcactattaaaccaactactaaacaaaccgtcgagattattgtttacgagaaatgtacaatcgtgtgggagataagagtagtgggatgggaggtttcgtatggagcggagtttgtgccggagaacaaagaaggttatacagtgatcattcagaaaccgaggaagatgactgcgaaaaatgaactggtggtgtctcatagcttcaaagttggagaagttggcaggattttgctaactgttgataacccgacttcaaccaagaaaatgcttatctacaggttcaaggttaagcctttagcttgtgagtaacaaaagtgcgcatctttcttcgagtgtttcttagtttagaacttgatcatatgattgttgattgtgttttgtttttctctcttttaccgacttatatgtttgtgtggttctgtttgctaaattcttttgttttatattgtattttgctcttatttttt

SEQ ID NO: 45777 - protein, 668 aa, Arabidopsis thaliana
  peptide (1)..(668): Ceres Seq. ID no. 14309806
MSQDSATTTPPPPLTSDVSMPSGEEDEPKHVTLEEEAPVTSETNLKLPLMPELEESNHTAEVVSEKVTPETMTLESEGLNHAAEDSKQTHEVTPEAETLKLEVLNHTAEDSEQTHEVTPETETVKSEFLNHVAEDSEQTHEVTPETETVKSEVLNHAAEDSEQPRGVTPTPETETSEPNTSLLVTSETEEPNHAAEDYSETEPSQKLMLEQRRKYMEVEDWTEPELPDEAVLEAAASVPEPKQPEPQTPPPPPSTTTSTVASRSLAEMMNREEAEAEEKQKIQIPRSLGSFKEETNKISDLSETELNALQELRHLLQVSQDSSKTSIWGVPFLKDDRTDVVLLKFLRARDFKPQEAYSMLNKTLQWRIDFNIEELLDENLGDDLDKVVFMQGQDKENHPVCFNVYGEFQNKDLYQKTFSDEEKRERFLRWRIQFLEKSIRNLDFVAGGVSTICQVNDLKNSPGPGKTELRLATKQALHLLQDNYPEFVSKQIFINVPWWYLAFYRIISPFMSQRSKSKLVFAGPSRSAETLLRYISPEHVPVQYGGLSVDNCECNSDFTHDDIATEITIKPTTKQTVEIIVYEKCTIVWEIRVVGWEVSYGAEFVPENKEGYTVIIQKPRKMTAKNELVVSHSFKVGEVGRILLTVDNPTSTKKMLIYRFKVKPLACE

SEQ ID NO: 45778 - protein, 649 aa, Arabidopsis thaliana
  peptide (1)..(649): Ceres Seq. ID no. 14309807
MPSGEEDEPKHVTLEEEAPVTSETNLKLPLMPELEESNHTAEVVSEKVTPETMTLESEGLNHAAEDSKQTHEVTPEAETLKLEVLNHTAEDSEQTHEVTPETETVKSEFLNHVAEDSEQTHEVTPETETVKSEVLNHAAEDSEQPRGVTPTPETETSEPNTSLLVTSETEEPNHAAEDYSETEPSQKLMLEQRRKYMEVEDWTEPELPDEAVLEAAASVPEPKQPEPQTPPPPPSTTTSTVASRSLAEMMNREEAEAEEKQKIQIPRSLGSFKEETNKISDLSETELNALQELRHLLQVSQDSSKTSIWGVPFLKDDRTDVVLLKFLRARDFKPQEAYSMLNKTLQWRIDFNIEELLDENLGDDLDKVVFMQGQDKENHPVCFNVYGEFQNKDLYQKTFSDEEKRERFLRWRIQFLEKSIRNLDFVAGGVSTICQVNDLKNSPGPGKTELRLATKQALHLLQDNYPEFVSKQIFINVPWWYLAFYRIISPFMSQRSKSKLVFAGPSRSAETLLRYISPEHVPVQYGGLSVDNCECNSDFTHDDIATEITIKPTTKQTVEIIVYEKCTIVWEIRVVGWEVSYGAEFVPENKEGYTVIIQKPRKMTAKNELVVSHSFKVGEVGRILLTVDNPTSTKKMLIYRFKVKPLACE

SEQ ID NO: 45779 - protein, 619 aa, Arabidopsis thaliana
  peptide (1)..(619): Ceres Seq. ID no. 14309808
MPELEESNHTAEVVSEKVTPETMTLESEGLNHAAEDSKQTHEVTPEAETLKLEVLNHTAEDSEQTHEVTPETETVKSEFLNHVAEDSEQTHEVTPETETVKSEVLNHAAEDSEQPRGVTPTPETETSEPNTSLLVTSETEEPNHAAEDYSETEPSQKLMLEQRRKYMEVEDWTEPELPDEAVLEAAASVPEPKQPEPQTPPPPPSTTTSTVASRSLAEMMNREEAEAEEKQKIQIPRSLGSFKEETNKISDLSETELNALQELRHLLQVSQDSSKTSIWGVPFLKDDRTDVVLLKFLRARDFKPQEAYSMLNKTLQWRIDFNIEELLDENLGDDLDKVVFMQGQDKENHPVCFNVYGEFQNKDLYQKTFSDEEKRERFLRWRIQFLEKSIRNLDFVAGGVSTICQVNDLKNSPGPGKTELRLATKQALHLLQDNYPEFVSKQIFINVPWWYLAFYRIISPFMSQRSKSKLVFAGPSRSAETLLRYISPEHVPVQYGGLSVDNCECNSDFTHDDIATEITIKPTTKQTVEIIVYEKCTIVWEIRVVGWEVSYGAEFVPENKEGYTVIIQKPRKMTAKNELVVSHSFKVGEVGRILLTVDNPTSTKKMLIYRFKVKPLACE

SEQ ID NO: 45780 - DNA, 1223 bp, Arabidopsis thaliana
  misc_feature (1)..(1223): Ceres Seq. ID no. 13591684
  misc_feature (1)..(1223): Ortholog of  Ceres SEQ ID NO 14304830 as cited in SEQ ID NO 54884
  misc_feature (1)..(1223): Ortholog of  Ceres SEQ ID NO 14316297 as cited in SEQ ID NO 57465
  misc_feature (1)..(1223): Ortholog of  Ceres SEQ ID NO 12784351 as cited in SEQ ID NO 60968
  misc_feature (1)..(1223): Ortholog of  Ceres SEQ ID NO 13584213 as cited in SEQ ID NO 63690
gaatctcgaagttggtcgaagcaaagcaaaagcaaaattctcttggccgagagaagaaacattgatcgtcgatcatggttggaccagtaagacctcaaatcgtacttttcggttcttcaattgttcaatatagcttcactgatcgtggttggggtgccactctcgctgacctctactctcgcacggctgatatcattcttcgtggatatgctggttggaattctaggtttgccttgaaggttcttcaccaagtattcccaaaggatgctgtgatacaaccttctttggtgatagtctatttcggtgggaatgattcaactcatcctcatccttcaggtcatggccctcatgttcctttatctgaattcatcgaaaacatgaggaagattggtgaacatcttttgagcctttctgataaaactcgtgtcattttcctcactccgccaccaatgaatgagaaacagatcgagatagtttttggagatgcaataaaaggccggagtaacgagttgtgccgtccatatgcagaagagttgttaaatctatgcagagagatcaatgtgaaaggtatcgatatttggaccgcgatacagcagcaagatgattggttgaacagctgcttcacagatgggatccatttcactgcgaaggcaagtgagattgttgttaaggagatattgaaggtactgagaggagcggattggaaaccaagtctttactggaaatcattaccggttgaatttccatttgattttgatgctccaaactctataagccttcatgacctagagttaaccagaaacaaccattttgagtcaccgcaccttgtaagcctttgtgaacaagagttaaccagaaacgagcagctggagccgccacaccctgtaagcctttgtgaccatgagttaacccgaaacgagcagctggagccgccacaccctgtaagcctttgtgaccatgagttaacccaaaacgagcagctggagccaccacagcctacggcgcgcttgtaaaacaagtcgtagttagagattatgcttctacattgacatcttgatggtgtgtaaccagtttcacctttcatttgcatctggatatttgtattgctaatttaacattttgttagacgttttgttttgtatcattagtttcgctgggtctttggattagaatattttgttctcacttgtgtgcttcagatatacaaaacaaaatgctagctc

SEQ ID NO: 45781 - protein, 312 aa, Arabidopsis thaliana
  peptide (1)..(312): Ceres Seq. ID no. 13591685
MVGPVRPQIVLFGSSIVQYSFTDRGWGATLADLYSRTADIILRGYAGWNSRFALKVLHQVFPKDAVIQPSLVIVYFGGNDSTHPHPSGHGPHVPLSEFIENMRKIGEHLLSLSDKTRVIFLTPPPMNEKQIEIVFGDAIKGRSNELCRPYAEELLNLCREINVKGIDIWTAIQQQDDWLNSCFTDGIHFTAKASEIVVKEILKVLRGADWKPSLYWKSLPVEFPFDFDAPNSISLHDLELTRNNHFESPHLVSLCEQELTRNEQLEPPHPVSLCDHELTRNEQLEPPHPVSLCDHELTQNEQLEPPQPTARL

SEQ ID NO: 45782 - protein, 211 aa, Arabidopsis thaliana
  peptide (1)..(211): Ceres Seq. ID no. 13591686
MRKIGEHLLSLSDKTRVIFLTPPPMNEKQIEIVFGDAIKGRSNELCRPYAEELLNLCREINVKGIDIWTAIQQQDDWLNSCFTDGIHFTAKASEIVVKEILKVLRGADWKPSLYWKSLPVEFPFDFDAPNSISLHDLELTRNNHFESPHLVSLCEQELTRNEQLEPPHPVSLCDHELTRNEQLEPPHPVSLCDHELTQNEQLEPPQPTARL

SEQ ID NO: 45783 - protein, 187 aa, Arabidopsis thaliana
  peptide (1)..(187): Ceres Seq. ID no. 13591687
MNEKQIEIVFGDAIKGRSNELCRPYAEELLNLCREINVKGIDIWTAIQQQDDWLNSCFTDGIHFTAKASEIVVKEILKVLRGADWKPSLYWKSLPVEFPFDFDAPNSISLHDLELTRNNHFESPHLVSLCEQELTRNEQLEPPHPVSLCDHELTRNEQLEPPHPVSLCDHELTQNEQLEPPQPTARL

SEQ ID NO: 45784 - DNA, 1475 bp, Arabidopsis thaliana
  misc_feature (1)..(1475): Ceres Seq. ID no. 14309790
  misc_feature (1)..(1475): Ortholog of  Ceres SEQ ID NO 15226515 as cited in SEQ ID NO 58519
ggactgtccctgtggaagatataattttacatgtccgaattccggagaagaaaaagatgaagtgattgattaaattgaaatcgatcacatcaaccatctctttctctcgcctgcaaagttatctccttttcaaaccgaacgaatcaattcgggaatcttcatctttctacgtgttttctcagctatgtatctctgggttcgacttcagtaaaagcttcaccagccatggatttcgttaggggtttttggaggaagcatagaaggaaggtcttggtgacggctggttgtttgggaagtgggtatttactctacaaactatacaattcccatactcgtaggcttgctgatttggaacgagaactcgctcacgagcgtgaaaatgacgaaatcatcaaaacccaaatgaaagcacatttcgagagtattcagatgattgtggattcgaccacactgcctcacgcaatgcagtttttgagtatccgtatcagcgaggagatcgatgtctctcatgttatggacagactgaaccaagggaaaggaatgctgagtccacctgagaaacttcagctctgggatgagctcaagattttgagtttcacgaggatggttttgtctctgtggtctgtgacaatgcttagcttatacattagggttcaagtcaacattttaggcagacatttgtatgttgacaccgctcgagctcttggcagctctcatttacttgaagaggtagatctcattgatagagatgatgaacagaagtttttgtcgagtgctgattttcttgtcaccaatgcaatgccaagtttgatttcagatatgcagggttcagccgaggaagtccttaaaggaaagcagttaaaggatgtaattaccacaagagttcttcaagaaaccgtgatgcagattgtagatgtgtttatgagcactggaagcccacatcactgggttgattatttaatgatgcctcaagacacaaagctttcaagaaccacaagtgactcttctgatgaagctgtgtccaagtttcatcaactcatggttgagactcgagaagtactcatcagcactgaattcacaaatatagtcgaaatttcgctcaagtgcttcacggatgcgttggtagaggaaatggaaacgcagactgaagcaggcggtttggctacagggaaaccattggcaaaggtcttaccacagattgagaagacaatgaatgtgattacagctgaaccaagcaagaaccggttcttacaaatcatcagagatctgcctgaagttaaactcttttttactcttttatacgctaatatgccgcaatagcaacttttgtttgttctcttagaaattccccaaagtgttttgctatatgctttctttgtaggggggtcttttagcttgaaagaaatgcaggaattttcgtgttttgagcttgtagaaccaaagttgatttcatttatttgttttgattagaaaag

SEQ ID NO: 45785 - protein, 364 aa, Arabidopsis thaliana
  peptide (1)..(364): Ceres Seq. ID no. 14309791
MDFVRGFWRKHRRKVLVTAGCLGSGYLLYKLYNSHTRRLADLERELAHERENDEIIKTQMKAHFESIQMIVDSTTLPHAMQFLSIRISEEIDVSHVMDRLNQGKGMLSPPEKLQLWDELKILSFTRMVLSLWSVTMLSLYIRVQVNILGRHLYVDTARALGSSHLLEEVDLIDRDDEQKFLSSADFLVTNAMPSLISDMQGSAEEVLKGKQLKDVITTRVLQETVMQIVDVFMSTGSPHHWVDYLMMPQDTKLSRTTSDSSDEAVSKFHQLMVETREVLISTEFTNIVEISLKCFTDALVEEMETQTEAGGLATGKPLAKVLPQIEKTMNVITAEPSKNRFLQIIRDLPEVKLFFTLLYANMPQ

SEQ ID NO: 45786 - protein, 305 aa, Arabidopsis thaliana
  peptide (1)..(305): Ceres Seq. ID no. 14309792
MKAHFESIQMIVDSTTLPHAMQFLSIRISEEIDVSHVMDRLNQGKGMLSPPEKLQLWDELKILSFTRMVLSLWSVTMLSLYIRVQVNILGRHLYVDTARALGSSHLLEEVDLIDRDDEQKFLSSADFLVTNAMPSLISDMQGSAEEVLKGKQLKDVITTRVLQETVMQIVDVFMSTGSPHHWVDYLMMPQDTKLSRTTSDSSDEAVSKFHQLMVETREVLISTEFTNIVEISLKCFTDALVEEMETQTEAGGLATGKPLAKVLPQIEKTMNVITAEPSKNRFLQIIRDLPEVKLFFTLLYANMPQ

SEQ ID NO: 45787 - protein, 296 aa, Arabidopsis thaliana
  peptide (1)..(296): Ceres Seq. ID no. 14309793
MIVDSTTLPHAMQFLSIRISEEIDVSHVMDRLNQGKGMLSPPEKLQLWDELKILSFTRMVLSLWSVTMLSLYIRVQVNILGRHLYVDTARALGSSHLLEEVDLIDRDDEQKFLSSADFLVTNAMPSLISDMQGSAEEVLKGKQLKDVITTRVLQETVMQIVDVFMSTGSPHHWVDYLMMPQDTKLSRTTSDSSDEAVSKFHQLMVETREVLISTEFTNIVEISLKCFTDALVEEMETQTEAGGLATGKPLAKVLPQIEKTMNVITAEPSKNRFLQIIRDLPEVKLFFTLLYANMPQ

SEQ ID NO: 45788 - DNA, 3093 bp, Arabidopsis thaliana; identical to SEQ ID NO: 45040
  misc_feature (1)..(3093): Ceres Seq. ID no. 12600157
  misc_feature (1)..(3093): Ortholog of  Ceres SEQ ID NO 13600595 as cited in SEQ ID NO 629
  misc_feature (1)..(3093): Ortholog of  Ceres SEQ ID NO 13593379 as cited in SEQ ID NO 20573

SEQ ID NO: 45789 - protein, 856 aa, Arabidopsis thaliana; identical to SEQ ID NO: 45041
  peptide (1)..(856): Ceres Seq. ID no. 12600158

SEQ ID NO: 45790 - protein, 853 aa, Arabidopsis thaliana; identical to SEQ ID NO: 45042
  peptide (1)..(853): Ceres Seq. ID no. 12600159

SEQ ID NO: 45791 - protein, 794 aa, Arabidopsis thaliana; identical to SEQ ID NO: 45043
  peptide (1)..(794): Ceres Seq. ID no. 12600160

SEQ ID NO: 45792 - DNA, 2367 bp, Arabidopsis thaliana
  misc_feature (1)..(2367): Ceres Seq. ID no. 13600852
  misc_feature (1)..(2367): Ortholog of  Ceres SEQ ID NO 12465083 as cited in SEQ ID NO 68239
gagcagccaaaacatttcttgttcatctctccgaccttaaaccctccgatccaaaaatctccaccgactctaatccaatcaaatggcctccgtcgcgcttctacggtcttttcgtcgccgtgaagtccaaatggcttccgtatctgcgtttaaatccgtttccgcaaatggaaagaattctatgtttgggaaattaggttacttggcgagacctttctgctcgaggcctgtggggaatgatgttattggtattgatttgggtactaccaattcttgtgtatctgtgatggagggaaagaccgctagggttattgagaatgcggaaggaagtcgaaccacaccatcggttgttgctatgaaccaaaaaggggaactccttgttggaacaccggctaaacgtcaggccgtgaccaatccaacaaacacgattttcggttctaaacgtttgattgggagacgttttgatgatccacagactcagaaggagatgaaaatggttccttacaagattgttaaggcacctaacggtgatgcttgggtcgaagccaatggacaaaagttttctcccagtcagattggagctaatgtcctcactaaaatgaaggaaacagctgaagcttacctcgggaaatctatcaacaaagctgttgttaccgttccagcttatttcaatgatgcacagagacaagccactaaggatgctgggaaaatcgctggtcttgatgtccagaggatcatcaacgaacctacagctgctgcactatcatatggtatgaacaacaaggaaggtgtcattgcagtgtttgatcttggaggtggaacctttgatgtttctatcttggaaatctcaagtggtgtttttgaggttaaagcaacaaatggagatacctttttgggaggagaagactttgacaacaccttgttggagtacttggttaatgagttcaaaagatcagataatattgatctgactaaagacaaccttgccctccagaggctgagagaagctgcagagaaggccaagattgagctctcatcgacaactcagaccgaaatcaacctgcctttcattacagcggatgcttcaggagctaagcacttgaacatcaccttaactaggtcaaagtttgaaggtttggtgggcaagttgattgagagaacaagatccccgtgccaaaactgcctgaaggatgctggagtcacaattaaggaagttgatgaggttcttcttgttggtggaatgacccgtgttcccaaagtgcaagagatagtttctgagatctttgggaagagtccttgtaaaggtgttaacccggatgaagcggttgccatgggagcagccattcaaggtggtatcctccgtggtgatgtgaaggatttgcttcttttggacgtggttcctctctcattgggtattgaaacattgggtgcagtcttcaccaagttgattccacgaaacaccactattcccacaaagaagtctcaggttttctccacagctgctgacaaccagatgcaagtgggaatcaaagttcttcagggagaacgtgaaatggcggctgacaacaaagtgcttggagaattcgaccttgttggcatcccaccggcacctagaggaatgccacagatcgaagttacattcgacattgatgcaaatggtattactactgtctcagcgaaagacaaagcaacaggtaaagagcagaatatcacaatcagatcttcaggtggtctctcagacgatgagattaacagaatggtgaaagaagctgagcttaacgcacagaaggatcaagagaagaagcaacttatcgaccttaggaacagtgctgatacaacaatttacagtgtagagaagagcttgagtgaatacagagagaagattccagctgagattgcctctgagatcgaaactgcagtgtctgatctcaggactgctatggctggtgaggatgtcgaggacatcaaggctaaggtcgaagctgcaaacaaggcagtgtcgaagatcggagaacacatgtctaagggatctggatcatctggttccgatggaagctctggtgagggtacaagtgggactgagcagacgcctgaagctgaattcgaggaggccagtggttcaaggaagtgaggttgccgctaaccggttccatacagaaatcaggtttttcccaaaataagtttacatgcttatctcctccctcacaaatttgattagttttgtgtatttaaaaccttatttgagaggtatcatctcttcgaaacctattgagagtcccggatgtagtttgtttgattggttattttcatgaagtttacggttattatcttgaccggttaaatgagtcaatttcacataagattatg

SEQ ID NO: 45793 - protein, 682 aa, Arabidopsis thaliana
  peptide (1)..(682): Ceres Seq. ID no. 13600853
MASVALLRSFRRREVQMASVSAFKSVSANGKNSMFGKLGYLARPFCSRPVGNDVIGIDLGTTNSCVSVMEGKTARVIENAEGSRTTPSVVAMNQKGELLVGTPAKRQAVTNPTNTIFGSKRLIGRRFDDPQTQKEMKMVPYKIVKAPNGDAWVEANGQKFSPSQIGANVLTKMKETAEAYLGKSINKAVVTVPAYFNDAQRQATKDAGKIAGLDVQRIINEPTAAALSYGMNNKEGVIAVFDLGGGTFDVSILEISSGVFEVKATNGDTFLGGEDFDNTLLEYLVNEFKRSDNIDLTKDNLALQRLREAAEKAKIELSSTTQTEINLPFITADASGAKHLNITLTRSKFEGLVGKLIERTRSPCQNCLKDAGVTIKEVDEVLLVGGMTRVPKVQEIVSEIFGKSPCKGVNPDEAVAMGAAIQGGILRGDVKDLLLLDVVPLSLGIETLGAVFTKLIPRNTTIPTKKSQVFSTAADNQMQVGIKVLQGEREMAADNKVLGEFDLVGIPPAPRGMPQIEVTFDIDANGITTVSAKDKATGKEQNITIRSSGGLSDDEINRMVKEAELNAQKDQEKKQLIDLRNSADTTIYSVEKSLSEYREKIPAEIASEIETAVSDLRTAMAGEDVEDIKAKVEAANKAVSKIGEHMSKGSGSSGSDGSSGEGTSGTEQTPEAEFEEASGSRK

SEQ ID NO: 45794 - protein, 666 aa, Arabidopsis thaliana
  peptide (1)..(666): Ceres Seq. ID no. 13600854
MASVSAFKSVSANGKNSMFGKLGYLARPFCSRPVGNDVIGIDLGTTNSCVSVMEGKTARVIENAEGSRTTPSVVAMNQKGELLVGTPAKRQAVTNPTNTIFGSKRLIGRRFDDPQTQKEMKMVPYKIVKAPNGDAWVEANGQKFSPSQIGANVLTKMKETAEAYLGKSINKAVVTVPAYFNDAQRQATKDAGKIAGLDVQRIINEPTAAALSYGMNNKEGVIAVFDLGGGTFDVSILEISSGVFEVKATNGDTFLGGEDFDNTLLEYLVNEFKRSDNIDLTKDNLALQRLREAAEKAKIELSSTTQTEINLPFITADASGAKHLNITLTRSKFEGLVGKLIERTRSPCQNCLKDAGVTIKEVDEVLLVGGMTRVPKVQEIVSEIFGKSPCKGVNPDEAVAMGAAIQGGILRGDVKDLLLLDVVPLSLGIETLGAVFTKLIPRNTTIPTKKSQVFSTAADNQMQVGIKVLQGEREMAADNKVLGEFDLVGIPPAPRGMPQIEVTFDIDANGITTVSAKDKATGKEQNITIRSSGGLSDDEINRMVKEAELNAQKDQEKKQLIDLRNSADTTIYSVEKSLSEYREKIPAEIASEIETAVSDLRTAMAGEDVEDIKAKVEAANKAVSKIGEHMSKGSGSSGSDGSSGEGTSGTEQTPEAEFEEASGSRK

SEQ ID NO: 45795 - protein, 649 aa, Arabidopsis thaliana
  peptide (1)..(649): Ceres Seq. ID no. 13600855
MFGKLGYLARPFCSRPVGNDVIGIDLGTTNSCVSVMEGKTARVIENAEGSRTTPSVVAMNQKGELLVGTPAKRQAVTNPTNTIFGSKRLIGRRFDDPQTQKEMKMVPYKIVKAPNGDAWVEANGQKFSPSQIGANVLTKMKETAEAYLGKSINKAVVTVPAYFNDAQRQATKDAGKIAGLDVQRIINEPTAAALSYGMNNKEGVIAVFDLGGGTFDVSILEISSGVFEVKATNGDTFLGGEDFDNTLLEYLVNEFKRSDNIDLTKDNLALQRLREAAEKAKIELSSTTQTEINLPFITADASGAKHLNITLTRSKFEGLVGKLIERTRSPCQNCLKDAGVTIKEVDEVLLVGGMTRVPKVQEIVSEIFGKSPCKGVNPDEAVAMGAAIQGGILRGDVKDLLLLDVVPLSLGIETLGAVFTKLIPRNTTIPTKKSQVFSTAADNQMQVGIKVLQGEREMAADNKVLGEFDLVGIPPAPRGMPQIEVTFDIDANGITTVSAKDKATGKEQNITIRSSGGLSDDEINRMVKEAELNAQKDQEKKQLIDLRNSADTTIYSVEKSLSEYREKIPAEIASEIETAVSDLRTAMAGEDVEDIKAKVEAANKAVSKIGEHMSKGSGSSGSDGSSGEGTSGTEQTPEAEFEEASGSRK

SEQ ID NO: 45796 - DNA, 1766 bp, Arabidopsis thaliana; identical to SEQ ID NO: 29046
  misc_feature (1)..(1766): Ceres Seq. ID no. 13647205
  misc_feature (1)..(1766): Ortholog of  Ceres SEQ ID NO 13595877 as cited in SEQ ID NO 67702
  misc_feature (1)..(1766): Ortholog of  Ceres SEQ ID NO 13654367 as cited in SEQ ID NO 67993
  misc_feature (1)..(1766): Ortholog of  Ceres SEQ ID NO 13622667 as cited in SEQ ID NO 0

SEQ ID NO: 45797 - protein, 345 aa, Arabidopsis thaliana; identical to SEQ ID NO: 29047
  peptide (1)..(345): Ceres Seq. ID no. 15218678

SEQ ID NO: 45798 - DNA, 2145 bp, Arabidopsis thaliana
  misc_feature (1)..(2145): Ceres Seq. ID no. 15168989
  misc_feature (1)..(2145): Ortholog of  Ceres SEQ ID NO 15177463 as cited in SEQ ID NO 0
tcacacactaaaagcttgcaaaaaccataagcttatctacttactcatctctctcacaaatcattttctcagacttctctctttctcttaaaccatgcctgaggcaccaaagaaagaatctttagaggttttcgatctgacgcttgaccaaaaaaacaagcaaaagcttcagttgatcgaagaactcacctctaacgccgaccaagtccaaagacaagtcttggaggagatcttgacccgcaatgctgacgtggagtatctcaggcgacacgacctcaacggtcgcactgaccgtgagactttcaaaaacatcatgcccgttatcacctacgaagatattgagcctgagatcaacaggatcgctaatggtgataaatcacctatcctctcttccaaacccatctctgagttcctcacaagctctgggacatctggtggggagaggaagctaatgccaacaatcgaagaggagctagacaggagatcactcctctacagtctcttgatgcctgtgatgagccagttcgttcctggtctcgaaaacggcaaaggaatgtatttcttgttcatcaagtccgaatccaagactccaggaggcctccctgctcgtcctgtcttaaccagttactacaaatcttcccatttcaaagaaagaccctatgatccttacaccaactacacaagccctaacgagaccatcctttgctctgactcttaccagagcatgtactctcagatgctttgtggcttatgtcaacaccaggaggttcttagagtcggcgctgtcttcgcctctggattcatcagagccatcaagtttcttgagaaacactggatcgagttggtccgtgacatcagaaccgggactctaagttccctgatcaccgatccttcagtgcgtgaggcggtcgccaagatccttaaaccgagcccaaagctagctgatttcgtggaatttgagtgcaagaagtcgtcctggcaagggattattactaggctgtggcctaacacaaagtatgtggatgtgattgtgaccgggacaatgtctcaatacattccaactttggactactacagtaatggcttgcctcttgtctgcacaatgtatgcttcctctgagtgttactttggtgtgaatctaaggccactctgcaaaccaagcgaggtctcttacacgctcataccatccatggcttatttcgagttcttgcctgttcatagaaacaacggtgttactaactccatcaaccttcctaaagcactcactgagaaagagcaacaagagcttgttgatctagttgatgtcaagcttggtcaggaatacgagcttgttgtcaccacttacgccgggctttgcagatacagagttggtgatttattgagagtgactggtttcaagaacaaagcgcctcaattcagtttcatatgtcgcaaaaatgtggtcttgagcatagattccgacaagaccgacgaggttgagcttcagaacgcggtgaagaacgcagtgacacaccttgtcccatttgatgcctcactctctgagtacacgagctatgcagacacaagttccatcccaggccattatgtcctgttttgggagctatgtttggatggaaacacaccgatccctccttcggtcttcgaggactgctgcttagctgtagaagagtcattcaacactgtttatagacaaggaagggttagtgacaagtccataggcccgcttgagatcaagattgttgagccagggacattcgataagctcatggattacgcaatcagcttgggagcatcgattaatcagtataagacgccgagatgcgtgaagtttgctccaattatcgagctattgaactcaagggttgttgatagttacttcagccccaagtgtcctaaatgggttcctggtcacaaacagtgggggagtaactaagatggaatgtggaacgtgaagagactctctttgagctagaaggtttgggacttggacttgcaaatgatgatgtcttctctaatcttaattttagtttaatcttttgttcttttttttttgttatccttttaatatccatagtccctgtgggtttgaaaaccagttgtacaaaaggcaaatcatgttttctccaaccaactctcatcactctc

SEQ ID NO: 45799 - protein, 612 aa, Arabidopsis thaliana
  peptide (1)..(612): Ceres Seq. ID no. 15168990
MPEAPKKESLEVFDLTLDQKNKQKLQLIEELTSNADQVQRQVLEEILTRNADVEYLRRHDLNGRTDRETFKNIMPVITYEDIEPEINRIANGDKSPILSSKPISEFLTSSGTSGGERKLMPTIEEELDRRSLLYSLLMPVMSQFVPGLENGKGMYFLFIKSESKTPGGLPARPVLTSYYKSSHFKERPYDPYTNYTSPNETILCSDSYQSMYSQMLCGLCQHQEVLRVGAVFASGFIRAIKFLEKHWIELVRDIRTGTLSSLITDPSVREAVAKILKPSPKLADFVEFECKKSSWQGIITRLWPNTKYVDVIVTGTMSQYIPTLDYYSNGLPLVCTMYASSECYFGVNLRPLCKPSEVSYTLIPSMAYFEFLPVHRNNGVTNSINLPKALTEKEQQELVDLVDVKLGQEYELVVTTYAGLCRYRVGDLLRVTGFKNKAPQFSFICRKNVVLSIDSDKTDEVELQNAVKNAVTHLVPFDASLSEYTSYADTSSIPGHYVLFWELCLDGNTPIPPSVFEDCCLAVEESFNTVYRQGRVSDKSIGPLEIKIVEPGTFDKLMDYAISLGASINQYKTPRCVKFAPIIELLNSRVVDSYFSPKCPKWVPGHKQWGSN

SEQ ID NO: 45800 - protein, 539 aa, Arabidopsis thaliana
  peptide (1)..(539): Ceres Seq. ID no. 15168991
MPVITYEDIEPEINRIANGDKSPILSSKPISEFLTSSGTSGGERKLMPTIEEELDRRSLLYSLLMPVMSQFVPGLENGKGMYFLFIKSESKTPGGLPARPVLTSYYKSSHFKERPYDPYTNYTSPNETILCSDSYQSMYSQMLCGLCQHQEVLRVGAVFASGFIRAIKFLEKHWIELVRDIRTGTLSSLITDPSVREAVAKILKPSPKLADFVEFECKKSSWQGIITRLWPNTKYVDVIVTGTMSQYIPTLDYYSNGLPLVCTMYASSECYFGVNLRPLCKPSEVSYTLIPSMAYFEFLPVHRNNGVTNSINLPKALTEKEQQELVDLVDVKLGQEYELVVTTYAGLCRYRVGDLLRVTGFKNKAPQFSFICRKNVVLSIDSDKTDEVELQNAVKNAVTHLVPFDASLSEYTSYADTSSIPGHYVLFWELCLDGNTPIPPSVFEDCCLAVEESFNTVYRQGRVSDKSIGPLEIKIVEPGTFDKLMDYAISLGASINQYKTPRCVKFAPIIELLNSRVVDSYFSPKCPKWVPGHKQWGSN

SEQ ID NO: 45801 - protein, 493 aa, Arabidopsis thaliana
  peptide (1)..(493): Ceres Seq. ID no. 15168992
MPTIEEELDRRSLLYSLLMPVMSQFVPGLENGKGMYFLFIKSESKTPGGLPARPVLTSYYKSSHFKERPYDPYTNYTSPNETILCSDSYQSMYSQMLCGLCQHQEVLRVGAVFASGFIRAIKFLEKHWIELVRDIRTGTLSSLITDPSVREAVAKILKPSPKLADFVEFECKKSSWQGIITRLWPNTKYVDVIVTGTMSQYIPTLDYYSNGLPLVCTMYASSECYFGVNLRPLCKPSEVSYTLIPSMAYFEFLPVHRNNGVTNSINLPKALTEKEQQELVDLVDVKLGQEYELVVTTYAGLCRYRVGDLLRVTGFKNKAPQFSFICRKNVVLSIDSDKTDEVELQNAVKNAVTHLVPFDASLSEYTSYADTSSIPGHYVLFWELCLDGNTPIPPSVFEDCCLAVEESFNTVYRQGRVSDKSIGPLEIKIVEPGTFDKLMDYAISLGASINQYKTPRCVKFAPIIELLNSRVVDSYFSPKCPKWVPGHKQWGSN

SEQ ID NO: 45802 - DNA, 2302 bp, Arabidopsis thaliana
  misc_feature (1)..(2302): Ceres Seq. ID no. 13646389
  misc_feature (1)..(2302): Ortholog of  Ceres SEQ ID NO 14316344 as cited in SEQ ID NO 60120
aaaacccctttttttcctcttccccgaagcaaaacccttctccttcttggcggctgcggccatttttttcttctttctctcttctattctatctcttaaaccctagattcgatctgggtttttcctgattccatttagggnttctctatcttcttttttttcttcttcttcttctttctctctttctctttggtcgcatccacttttatccgagaaggatctatccaaatctttgtttgtcgaatctcctctcatggctaccgttgctcctcctgctgatcaagctacagatctgttgcagaaactatccttggactcgccagcaaaagcttcagagatccctgagcctaacaagaagactgccgtctaccagtatggaggcgttgatgttcatggtcaagttccttcttatgatcgatctttgacaccaatgcttcccagtgatgctgctgacccttcagtttgctatgttcctaatccttacaatccctaccagtattacaatgtatatgggagtggtcaagagtggactgactacccagcttacacaaatcctgagggtgttgacatgaattctggaatttatggagagaatgggactgttgtgtatcctcagggttatgggtatgcagcgtatccttactcgccagcaactagccctgctccacagcttggcggggaagggcagttgtacggtgctcagcagtatcagtatcctaactattttccaaacagtggaccgtatgcttcatctgtggctacacctacccagccggatctctctgcaaacaaacctgctggtgtgaagacactacctgcggatagcaataatgttgcttctgctgctggtatcacaaaaggaagtaatggatcagctccagtgaaaccaactaaccaggctacccttaacacctcaagtaatttgtatggtatgggtgctccaggaggaggtttggctgctggttatcaggaccccaggtatgcctatgaagggtattatgctcctgtgccgtggcacgatggctctaagtactctgatgtgcagagacctgtttctggtagtggagttgcatcctcctattctaagtctagcacagtaccttcatcgaggaatcaaaactaccgctcaaattctcactacacgagcgtgcaccagccttcatcagtgactggctatggtacagctcaggggtactacaacaggatgtatcagaacaagttatatggtcagtatggtagcacagggagatctgctttgggttatggttcatctgggtatgattcaagaacaaatggaagaggatgggcggccacagacaacaaatacagaagctggggcaggggtaacagttactattacggaaatgagaacaatgtagatggtttgaatgaacttaacaggggacctagagctaagggcacaaagaaccagaagggaaatctagatgatagcttagaggttaaggagcagactggagaatcaaatgtaactgaggttggggaggcggataacacatgtgttgttcctgacagagaacagtacaataaagaagatttcccagtggattatgcaaatgccatgttctttatcatcaagtcatacagtgaagatgatgtgcacaagagcattaaatataatgtttgggctagcacaccaaatggaaacaagaagcttgctgcagcataccaggaagctcaacagaaagctggcggctgtcccatctttctgtttttctcggtcaatgcaagtggacaatttgttggtcttgctgaaatgacaggaccagttgatttcaacacaaatgtggagtactggcagcaagataagtggaccggctctttccccctcaagtggcatattgtgaaggatgtgccaaacagtttactgaagcatattactttagagaacaatgagaacaaacctgttaccaacagcagagacacacaagaggttaagttggagcaaggtttgaagattgtgaaaattttcaaggagcatagcagcaagacttgcattttggatgatttctcattctacgaggttcgacagaagactatcttggagaagaaagccaagcaaacccagaaacaggtaagcgaggagaaggtaaccgatgaaaagaaggaatctgcaactgcagagtcagcgagcaaggaatctcctgcagctgttcaaacgtccagtgatgttaaggttgctgagaatgggtctgttgctaaaccagtcacaggcgatgtggtggcaaatggttgctaactaagaggatggtgtcgctcacggcatgggcataaaactgactag

SEQ ID NO: 45803 - protein, 667 aa, Arabidopsis thaliana
  peptide (1)..(667): Ceres Seq. ID no. 13646390
MATVAPPADQATDLLQKLSLDSPAKASEIPEPNKKTAVYQYGGVDVHGQVPSYDRSLTPMLPSDAADPSVCYVPNPYNPYQYYNVYGSGQEWTDYPAYTNPEGVDMNSGIYGENGTVVYPQGYGYAAYPYSPATSPAPQLGGEGQLYGAQQYQYPNYFPNSGPYASSVATPTQPDLSANKPAGVKTLPADSNNVASAAGITKGSNGSAPVKPTNQATLNTSSNLYGMGAPGGGLAAGYQDPRYAYEGYYAPVPWHDGSKYSDVQRPVSGSGVASSYSKSSTVPSSRNQNYRSNSHYTSVHQPSSVTGYGTAQGYYNRMYQNKLYGQYGSTGRSALGYGSSGYDSRTNGRGWAATDNKYRSWGRGNSYYYGNENNVDGLNELNRGPRAKGTKNQKGNLDDSLEVKEQTGESNVTEVGEADNTCVVPDREQYNKEDFPVDYANAMFFIIKSYSEDDVHKSIKYNVWASTPNGNKKLAAAYQEAQQKAGGCPIFLFFSVNASGQFVGLAEMTGPVDFNTNVEYWQQDKWTGSFPLKWHIVKDVPNSLLKHITLENNENKPVTNSRDTQEVKLEQGLKIVKIFKEHSSKTCILDDFSFYEVRQKTILEKKAKQTQKQVSEEKVTDEKKESATAESASKESPAAVQTSSDVKVAENGSVAKPVTGDVVANGC

SEQ ID NO: 45804 - protein, 608 aa, Arabidopsis thaliana
  peptide (1)..(608): Ceres Seq. ID no. 13646391
MLPSDAADPSVCYVPNPYNPYQYYNVYGSGQEWTDYPAYTNPEGVDMNSGIYGENGTVVYPQGYGYAAYPYSPATSPAPQLGGEGQLYGAQQYQYPNYFPNSGPYASSVATPTQPDLSANKPAGVKTLPADSNNVASAAGITKGSNGSAPVKPTNQATLNTSSNLYGMGAPGGGLAAGYQDPRYAYEGYYAPVPWHDGSKYSDVQRPVSGSGVASSYSKSSTVPSSRNQNYRSNSHYTSVHQPSSVTGYGTAQGYYNRMYQNKLYGQYGSTGRSALGYGSSGYDSRTNGRGWAATDNKYRSWGRGNSYYYGNENNVDGLNELNRGPRAKGTKNQKGNLDDSLEVKEQTGESNVTEVGEADNTCVVPDREQYNKEDFPVDYANAMFFIIKSYSEDDVHKSIKYNVWASTPNGNKKLAAAYQEAQQKAGGCPIFLFFSVNASGQFVGLAEMTGPVDFNTNVEYWQQDKWTGSFPLKWHIVKDVPNSLLKHITLENNENKPVTNSRDTQEVKLEQGLKIVKIFKEHSSKTCILDDFSFYEVRQKTILEKKAKQTQKQVSEEKVTDEKKESATAESASKESPAAVQTSSDVKVAENGSVAKPVTGDVVANGC

SEQ ID NO: 45805 - protein, 562 aa, Arabidopsis thaliana
  peptide (1)..(562): Ceres Seq. ID no. 13646392
MNSGIYGENGTVVYPQGYGYAAYPYSPATSPAPQLGGEGQLYGAQQYQYPNYFPNSGPYASSVATPTQPDLSANKPAGVKTLPADSNNVASAAGITKGSNGSAPVKPTNQATLNTSSNLYGMGAPGGGLAAGYQDPRYAYEGYYAPVPWHDGSKYSDVQRPVSGSGVASSYSKSSTVPSSRNQNYRSNSHYTSVHQPSSVTGYGTAQGYYNRMYQNKLYGQYGSTGRSALGYGSSGYDSRTNGRGWAATDNKYRSWGRGNSYYYGNENNVDGLNELNRGPRAKGTKNQKGNLDDSLEVKEQTGESNVTEVGEADNTCVVPDREQYNKEDFPVDYANAMFFIIKSYSEDDVHKSIKYNVWASTPNGNKKLAAAYQEAQQKAGGCPIFLFFSVNASGQFVGLAEMTGPVDFNTNVEYWQQDKWTGSFPLKWHIVKDVPNSLLKHITLENNENKPVTNSRDTQEVKLEQGLKIVKIFKEHSSKTCILDDFSFYEVRQKTILEKKAKQTQKQVSEEKVTDEKKESATAESASKESPAAVQTSSDVKVAENGSVAKPVTGDVVANGC

SEQ ID NO: 45806 - DNA, 1939 bp, Arabidopsis thaliana
  misc_feature (1)..(1939): Ceres Seq. ID no. 13647170
  misc_feature (1)..(1939): Ortholog of  Ceres SEQ ID NO 14308359 as cited in SEQ ID NO 55097
  misc_feature (1)..(1939): Ortholog of  Ceres SEQ ID NO 15169195 as cited in SEQ ID NO 55200
  misc_feature (1)..(1939): Ortholog of  Ceres SEQ ID NO 15226540 as cited in SEQ ID NO 58479
  misc_feature (1)..(1939): Ortholog of  Ceres SEQ ID NO 13581611 as cited in SEQ ID NO 59028
  misc_feature (1)..(1939): Ortholog of  Ceres SEQ ID NO 14301693 as cited in SEQ ID NO 69246
gatttcccttactatttacgttctcttctttctcctccgacacactccaaaactcataaatctatctgatgcgaatttgactaactctttcgtaaattcaggatcttactwcaaatctttaactcaccaatcttcttcttattcaaagattagagagaaaatggacaacgagctgtttatgaacacagagtttccaccaccgccggagatggcgacgcatttcgaacaccaacagtcttcttcatcggccatgatgcttaattgggctttaatggatccaaatccgcatcaagattcttcctttttatgggaaaagtcaacggaacaacaacaacaacaaagcatctttgactctgctttaagctcattagtctcatcaccgacgccgtcaaattccaacttctccggcggtggcggtgacggttttctcatcagagaactcatcggaaagcttggaaacatcggtaataataataacaactccggtgagatctacggaactccgatgtctcgctccgcctcatgttacgcaactccgatgagctctccaccgccaccgacgaattcgaattctcagatgatgatgaacagaacgacgccgttgacggaattctcagcagatccgggttttgcggagagagcagctagattctcttgttttggtagtcggagctttaacggaagaaccaatacaaatcttccgattaacaacggtaataacatggtcaacaactccgggaagctgacacgtgtctccagcacaccagctcttaaggctcttgtttcaccggaagtcacacccggcggcgaattttcccggaagagaaaatctgtgcctaaaggaaaatccaaagaaaaccccatttctacagcttctccatctcctagtttctcaaagacggcggaaaagaatggtggaaaaggaggaagtaaaagttcagaagaaaaaggaggaaaaaggagaagagaagaagaagatgatgaagaagaagaaggagaaggtgaagggaacaaaagcaataacacaaaaccacctgagcctcctaaagattacattcatgttcgagctcgacgaggccaagcaaccgatagtcacagcctcgccgaacgagttcggagggagaaaattggtgaaaggatgaagcttcttcaagatcttgtgcctggatgcaataaggttactggaaaagcactgatgcttgatgaaattataaactacgtacaatcattgcaaagacaagttgagttcttgtcaatgaagttatcatcagtgaacgacaccaggctggattttaacgtggacgctcttgtgtcaaaggatgttatgattccatcaagtaacaaccgattgcatgaagaaggactccaatcaaagtcttcaagtcatcatcatcaacaacaacttaatatttataacaataattcacaattacttcccaatatttcttccaataacatgatgctccagtctcctatgaactctttggaaacctctaccttagccagaagcttcactcacttaccaacacttacccaatttactgactcaatttctcagtatcaaatgtttagcgaagaagatttacaaagcatagtaggaatgggagtggcagaaaaccccaacaatgaatctcaacacatgaaaattgagctttgatcaaccatttttttcaaggtctcaaggaagaaaacaagagaaaaaggattgatgggtgtacataaaccataccaatatttgtgatttattcatatactcatctccatatatatatgtatacacacttttatggaaataacctatatttttttactttttatactttatattatcatcttccaattcattattagcattattagggttcaattgtattgttatccactttggattccttttgcttttctgatgtaatatcaatgtaagtttcttaccatcctt

SEQ ID NO: 45807 - protein, 551 aa, Arabidopsis thaliana
  peptide (1)..(551): Ceres Seq. ID no. 15219190
  misc_feature (37)..(37): Xaa is any aa, unknown or other
ISLTIYVLFFLLRHTPKLINLSDANLTNSFVNSGSYXKSLTHQSSSYSKIREKMDNELFMNTEFPPPPEMATHFEHQQSSSSAMMLNWALMDPNPHQDSSFLWEKSTEQQQQQSIFDSALSSLVSSPTPSNSNFSGGGGDGFLIRELIGKLGNIGNNNNNSGEIYGTPMSRSASCYATPMSSPPPPTNSNSQMMMNRTTPLTEFSADPGFAERAARFSCFGSRSFNGRTNTNLPINNGNNMVNNSGKLTRVSSTPALKALVSPEVTPGGEFSRKRKSVPKGKSKENPISTASPSPSFSKTAEKNGGKGGSKSSEEKGGKRRREEEDDEEEEGEGEGNKSNNTKPPEPPKDYIHVRARRGQATDSHSLAERVRREKIGERMKLLQDLVPGCNKVTGKALMLDEIINYVQSLQRQVEFLSMKLSSVNDTRLDFNVDALVSKDVMIPSSNNRLHEEGLQSKSSSHHHQQQLNIYNNNSQLLPNISSNNMMLQSPMNSLETSTLARSFTHLPTLTQFTDSISQYQMFSEEDLQSIVGMGVAENPNNESQHMKIEL

SEQ ID NO: 45808 - protein, 498 aa, Arabidopsis thaliana
  peptide (1)..(498): Ceres Seq. ID no. 15219191
MDNELFMNTEFPPPPEMATHFEHQQSSSSAMMLNWALMDPNPHQDSSFLWEKSTEQQQQQSIFDSALSSLVSSPTPSNSNFSGGGGDGFLIRELIGKLGNIGNNNNNSGEIYGTPMSRSASCYATPMSSPPPPTNSNSQMMMNRTTPLTEFSADPGFAERAARFSCFGSRSFNGRTNTNLPINNGNNMVNNSGKLTRVSSTPALKALVSPEVTPGGEFSRKRKSVPKGKSKENPISTASPSPSFSKTAEKNGGKGGSKSSEEKGGKRRREEEDDEEEEGEGEGNKSNNTKPPEPPKDYIHVRARRGQATDSHSLAERVRREKIGERMKLLQDLVPGCNKVTGKALMLDEIINYVQSLQRQVEFLSMKLSSVNDTRLDFNVDALVSKDVMIPSSNNRLHEEGLQSKSSSHHHQQQLNIYNNNSQLLPNISSNNMMLQSPMNSLETSTLARSFTHLPTLTQFTDSISQYQMFSEEDLQSIVGMGVAENPNNESQHMKIEL

SEQ ID NO: 45809 - protein, 492 aa, Arabidopsis thaliana
  peptide (1)..(492): Ceres Seq. ID no. 15219192
MNTEFPPPPEMATHFEHQQSSSSAMMLNWALMDPNPHQDSSFLWEKSTEQQQQQSIFDSALSSLVSSPTPSNSNFSGGGGDGFLIRELIGKLGNIGNNNNNSGEIYGTPMSRSASCYATPMSSPPPPTNSNSQMMMNRTTPLTEFSADPGFAERAARFSCFGSRSFNGRTNTNLPINNGNNMVNNSGKLTRVSSTPALKALVSPEVTPGGEFSRKRKSVPKGKSKENPISTASPSPSFSKTAEKNGGKGGSKSSEEKGGKRRREEEDDEEEEGEGEGNKSNNTKPPEPPKDYIHVRARRGQATDSHSLAERVRREKIGERMKLLQDLVPGCNKVTGKALMLDEIINYVQSLQRQVEFLSMKLSSVNDTRLDFNVDALVSKDVMIPSSNNRLHEEGLQSKSSSHHHQQQLNIYNNNSQLLPNISSNNMMLQSPMNSLETSTLARSFTHLPTLTQFTDSISQYQMFSEEDLQSIVGMGVAENPNNESQHMKIEL

SEQ ID NO: 45810 - DNA, 1102 bp, Arabidopsis thaliana
  misc_feature (1)..(1102): Ceres Seq. ID no. 13646393
  misc_feature (1)..(1102): Ortholog of  Ceres SEQ ID NO 14302299 as cited in SEQ ID NO 68665
  misc_feature (1)..(1102): Ortholog of  Ceres SEQ ID NO 15174396 as cited in SEQ ID NO 0
gggggggggcccccgctgtgcaaagatatcactttcttgctcccaaagcaaaatcaactcttcttcttcttcttctcccagacatcagcaagattcaggagattaaaaccttaaattaaaacaatacaaactccaaattcaccggaggaaataacttaaaacttgaatctgaaaagatgagctgcaatggttgccgtgttctccggaaaggttgcagcgagaattgtatcctccggccatgtattcaatggattgaaaccgccgatgctcaaggccacgccaccgtcttcgtcgctaaattcttcggccgtgctggtctcatgtcctttatctccgctgttccggattctcaacgtcctgctttgtttcagtcgttgctctacgaagcttgtggaagaactgtcaatccagttaacggagcaatcggaatgttatggactggaaactggaatatctgtcaagcggctgttgaaacagtgcttcgcggcggttctttaagaccgatcccggagcttctcactcacggcggcggtttcgctggctttccttcgcctacatctgaagaagcatctgagatctgcaccgaaatgttgaatctccagcaaaatgattccaccgatcgtaacatctatcatcattcacgattctcaagctctagatctagatctactatggattcttcttctccgacgaaacgtaagagattatcatcggaagaccaaccatcttcggagcttgatctatctctcaaccctaattttcccattaagcaaacaacaccttcttctacacggcggcgatcagtaacaccgtcgatgaactcagaggactccgggacgacgacgactacgacggcgttttgtgacaagggtgatgtgtacggtaacggaggaggagaaacgaccaagttgcttaacctttttgtttaatgcaaaacggcgtcggttttctcagagttagtctagggttttaaatgtaattttacacattttcttcctttttcctggataaatattggaccggcgaattaacaactacgtcgttttgttctctaaaaaaaaaagaaaaaaaaaaaaaaaaaaaactcgagggggggcccggt

SEQ ID NO: 45811 - protein, 250 aa, Arabidopsis thaliana
  peptide (1)..(250): Ceres Seq. ID no. 13646394
MSCNGCRVLRKGCSENCILRPCIQWIETADAQGHATVFVAKFFGRAGLMSFISAVPDSQRPALFQSLLYEACGRTVNPVNGAIGMLWTGNWNICQAAVETVLRGGSLRPIPELLTHGGGFAGFPSPTSEEASEICTEMLNLQQNDSTDRNIYHHSRFSSSRSRSTMDSSSPTKRKRLSSEDQPSSELDLSLNPNFPIKQTTPSSTRRRSVTPSMNSEDSGTTTTTTAFCDKGDVYGNGGGETTKLLNLFV

SEQ ID NO: 45812 - protein, 202 aa, Arabidopsis thaliana
  peptide (1)..(202): Ceres Seq. ID no. 13646395
MSFISAVPDSQRPALFQSLLYEACGRTVNPVNGAIGMLWTGNWNICQAAVETVLRGGSLRPIPELLTHGGGFAGFPSPTSEEASEICTEMLNLQQNDSTDRNIYHHSRFSSSRSRSTMDSSSPTKRKRLSSEDQPSSELDLSLNPNFPIKQTTPSSTRRRSVTPSMNSEDSGTTTTTTAFCDKGDVYGNGGGETTKLLNLFV

SEQ ID NO: 45813 - protein, 166 aa, Arabidopsis thaliana
  peptide (1)..(166): Ceres Seq. ID no. 13646396
MLWTGNWNICQAAVETVLRGGSLRPIPELLTHGGGFAGFPSPTSEEASEICTEMLNLQQNDSTDRNIYHHSRFSSSRSRSTMDSSSPTKRKRLSSEDQPSSELDLSLNPNFPIKQTTPSSTRRRSVTPSMNSEDSGTTTTTTAFCDKGDVYGNGGGETTKLLNLFV

SEQ ID NO: 45814 - DNA, 2622 bp, Arabidopsis thaliana
  misc_feature (1)..(2622): Ceres Seq. ID no. 13647162
  misc_feature (1)..(2622): Ortholog of  Ceres SEQ ID NO 13663060 as cited in SEQ ID NO 60964
  misc_feature (1)..(2622): Ortholog of  Ceres SEQ ID NO 13598532 as cited in SEQ ID NO 65204
  misc_feature (1)..(2622): Ortholog of  Ceres SEQ ID NO 13656849 as cited in SEQ ID NO 65764
  misc_feature (1)..(2622): Ortholog of  Ceres SEQ ID NO 13656501 as cited in SEQ ID NO 69206
atcacgagaaccacacaaatacgcggcaaagagagagaaagatagagagagagagagagagagagagaaagcggtggagtcgtgataagggagaagctctggatacagtctcttcccgtcgtcggagacggagtttatgcctattggctcctgaggttagattaagcttcgtatttagtggattttcttcttttgagatatggaacaagattacatctgctcagggtgctaccagtatcgagttttttcattgcaagaagcactcgattggcggtttcttgtgcactcagatttccttatcggctctttcgtgaactgcacctagtggtcagaccttctgcgatctttacggaaggtgtgatgcaaatttctgattcagggctgatgtttgcaagttatcctaccttcacacagtcctagagtgtcatctaaatctgttccctgcactcaaaaactagttggtccttcttccatatcctgttcttatgagagcttgttgaagaaggatgaatcagttttttttcaagttatgacttttcttagctgtgtcttttcctcgagtctctgaaccccttgagtgaaatgttgtgagcataagtttcgtccagctacccagaacattactttttgttagtgcgtcttccaattctcagtatgttttgtctttttctcttagcgtctttcttttgccttgttggtcaacccattgatgttcaaacttcaaagtaaataagggtcagtctacccagcgggagaatcattgatcttgctgccatacgaacaactggaagattaaagtgatagacatatttcagaagttctttacagagaaatacttaaggggatactttgcttcacctagaggcgatggagaggtatacattactcaaagaagttggtgacggaacatttgggaatgtttggcgagctgtcaataaacagacgaatgaagttgtggcaattaaaagaatgaagaagaagtatttctcttgggaagagtgtgtgaatctaagagaagtgaagtcacttagcagaatgaatcatccaaacattgtgaagctgaaggaagtcatccgggaaaatgatatcctatactttgtgtttgagtacatggagtgcaatctttaccagcttatgaaggatcgccctaagcattttgcagaatctgatatccgaaattggtgcttccaggtcttccaaggcctttcttatatgcatcagcgtggatacttccaccgtgatcttaagccagaaaatctattggtctcgaaagatgtcattaagattgctgatcttggcctggcccgggagatcgactcgagtccaccttatacagaatatgtctctacacgctggtatagggcacctgaagtactgctacaatcatatgtatacacgtcaaaagttgatatgtgggcgatgggtgctattatggcggagctgttgtctcttcgccctctctttcctggagctagtgaagcggatgagatatacaaaatctgcagtgtcataggcagcccaaccgaagagacctggttggaggggctgaaccttgccagcgttatcaattaccaattccctcagtttcccggtgtacatttatcaagtgtgatgccatatgctagtgcggatgcggttaaccttattgagcgcctttgctcgtgggatccctgcaatagaccgactactgcagaggctctacagcatccgttcttccaaagttgctactatattcccccatctctccgtcccaagctgtctgaaccaagagggtctctcgagcagcagcaatccgtgaagcgtttaccagcggctccgacttataatgctaataagccgttgaacacctacgttactccaaagacgaatgctccttttagcaatggtgtcaacagttatgttactccaaagacaaatgctccatttagcaatggtgtcaacagttatgttactgcaaagacgaatgctccttttagcaatggtgtcaacaattatgttgctccaaagatgaatgctccttttgacaatggtgcgacccagcagaaggtggatacgactaataataataaccagaacacggcgtggaacaacaaacctgtgagaagttataacgttaaagattcaaagtatagaccaccgggaaggaagagtccacttgcagcatctatggaaaagaactgggtcttttcccgtggagcatcagagactgcaaataaactggcaaatgcaacaattggaggaagatggactcaaagtcaaaggcaacaacaaccggcgatgaaggcagggtgggtgggagaaagtggtgacatgttcctcagacctacacagccttccaatccctactctaggaaaatcgccggttaagctgaaagattctgttatggcgcatctaagttacgagccctcatcaacaccttcacccgtcgttgtgcttttgattatcatcatcacctatctgagagtccaagttatttgaagacaacttatgttgattttttctcttttgtgtttcgttcttttaaacctctcttgtttgttcggtagtacttcccgtcttcatgacgattatgtatggagtgtttctttttacagttcgcaataaaagctctcgacattgca

SEQ ID NO: 45815 - protein, 499 aa, Arabidopsis thaliana
  peptide (1)..(499): Ceres Seq. ID no. 13647163
MERYTLLKEVGDGTFGNVWRAVNKQTNEVVAIKRMKKKYFSWEECVNLREVKSLSRMNHPNIVKLKEVIRENDILYFVFEYMECNLYQLMKDRPKHFAESDIRNWCFQVFQGLSYMHQRGYFHRDLKPENLLVSKDVIKIADLGLAREIDSSPPYTEYVSTRWYRAPEVLLQSYVYTSKVDMWAMGAIMAELLSLRPLFPGASEADEIYKICSVIGSPTEETWLEGLNLASVINYQFPQFPGVHLSSVMPYASADAVNLIERLCSWDPCNRPTTAEALQHPFFQSCYYIPPSLRPKLSEPRGSLEQQQSVKRLPAAPTYNANKPLNTYVTPKTNAPFSNGVNSYVTPKTNAPFSNGVNSYVTAKTNAPFSNGVNNYVAPKMNAPFDNGATQQKVDTTNNNNQNTAWNNKPVRSYNVKDSKYRPPGRKSPLAASMEKNWVFSRGASETANKLANATIGGRWTQSQRQQQPAMKAGWVGESGDMFLRPTQPSNPYSRKIAG

SEQ ID NO: 45816 - protein, 465 aa, Arabidopsis thaliana
  peptide (1)..(465): Ceres Seq. ID no. 13647164
MKKKYFSWEECVNLREVKSLSRMNHPNIVKLKEVIRENDILYFVFEYMECNLYQLMKDRPKHFAESDIRNWCFQVFQGLSYMHQRGYFHRDLKPENLLVSKDVIKIADLGLAREIDSSPPYTEYVSTRWYRAPEVLLQSYVYTSKVDMWAMGAIMAELLSLRPLFPGASEADEIYKICSVIGSPTEETWLEGLNLASVINYQFPQFPGVHLSSVMPYASADAVNLIERLCSWDPCNRPTTAEALQHPFFQSCYYIPPSLRPKLSEPRGSLEQQQSVKRLPAAPTYNANKPLNTYVTPKTNAPFSNGVNSYVTPKTNAPFSNGVNSYVTAKTNAPFSNGVNNYVAPKMNAPFDNGATQQKVDTTNNNNQNTAWNNKPVRSYNVKDSKYRPPGRKSPLAASMEKNWVFSRGASETANKLANATIGGRWTQSQRQQQPAMKAGWVGESGDMFLRPTQPSNPYSRKIAG

SEQ ID NO: 45817 - protein, 443 aa, Arabidopsis thaliana
  peptide (1)..(443): Ceres Seq. ID no. 13647165
MNHPNIVKLKEVIRENDILYFVFEYMECNLYQLMKDRPKHFAESDIRNWCFQVFQGLSYMHQRGYFHRDLKPENLLVSKDVIKIADLGLAREIDSSPPYTEYVSTRWYRAPEVLLQSYVYTSKVDMWAMGAIMAELLSLRPLFPGASEADEIYKICSVIGSPTEETWLEGLNLASVINYQFPQFPGVHLSSVMPYASADAVNLIERLCSWDPCNRPTTAEALQHPFFQSCYYIPPSLRPKLSEPRGSLEQQQSVKRLPAAPTYNANKPLNTYVTPKTNAPFSNGVNSYVTPKTNAPFSNGVNSYVTAKTNAPFSNGVNNYVAPKMNAPFDNGATQQKVDTTNNNNQNTAWNNKPVRSYNVKDSKYRPPGRKSPLAASMEKNWVFSRGASETANKLANATIGGRWTQSQRQQQPAMKAGWVGESGDMFLRPTQPSNPYSRKIAG

SEQ ID NO: 45818 - DNA, 2331 bp, Arabidopsis thaliana
  misc_feature (1)..(2331): Ceres Seq. ID no. 12561116
  misc_feature (1)..(2331): Ortholog of  Ceres SEQ ID NO 13594958 as cited in SEQ ID NO 55996
  misc_feature (1)..(2331): Ortholog of  Ceres SEQ ID NO 15180204 as cited in SEQ ID NO 0
atggcgggttttatcaatcttgaggattccccaatgtttcaaaaacaggtcttctccttggaagggacaagtgatgagcttaaagatcgttgtcagaagttatacaaaggtgttaagaagttcatgggagctttaggagaggcatctactggagttagtgcctttgcagattctcttgaagagtttggtgctggacatgatgatccagtcagtgtttcaattggaggtccagtaatatctaagttcataaatacacttcgagagctctcctcttataaggagtttcttcgctcacaggtggagcatgtattacttgagaggctgacaaactttatgactgttgatctacaagaagcaaaggagtctcggcgtcggttcgataaagctgtccattcttatgatcaggcacgcgaaaagtttgtgtcgctaaagaagaataccagaggagacattgttgctgagttggaagaggatttggagaactcgaagtcagcatttgagaaaagtcgtttcaatctagtaaattcactgatgaccattgaagcaaaaaagaagtacgagttcttggaatctataagtgcaattatggattcccatttcaaatattttaagcttggttatgatctattaagtcaattggagccttacatccatcaggtattgacatacgcacaacagtcaaaagaacagtctaagattgaacaagatcgatttgcacaacgcattcaagaattcaggactcaatctgaattagacagccaacaggcctctgctaaagcagatccctccgatgttggtggaaaccatgtttatagagctatcccccgtaaaaacgtagaagcaaactcagtttcaacagcagacaaggaagtaactaaacaagggtatctattaaagcgatcagctagtttgagagctgattggaaaaggagattctttgtgcttgacaaccatggatccctatactattacagaaacaccggtaataaatcagcgaaatctcagcattactacagtggtttaggagagcatagtagcggcgtctttgggagatttcgtacaagacacaatcgatcagcttcacagggaagcctagattgcaatatgatcgatctccgtacttcactgataaaattggacgcagaggacacagatcttcgactctgttttagaattatatctcctcaaaagacttacacactacaggctgaaaatggagctgataggatggattgggtaaataagatcacagcagctataacaatacgtctgaattctcattttctgcagcagtcaccagcaagatacttggataaaaagaatactagttctggtcctgccactgaaaacctcaccctgaatcaaaaagaagattataatcaaagactaaatgtgggggatgacgtccttacaatactcagagaaattcctggaaataacacttgtgcagaatgcaatgcacctgaccccgattgggcatcattgaatcttggagttttgatgtgcattgaatgctctggtgttcacaggaatctcggcgttcatatatccaaggtgagatcgctcacattggatgtgaaagtatgggagcctacaatcttggacttatttcggaacttaggcaacggatactgtaattcagtctgggaggagctacttcatcaccttgacgatgacagtgaaaagggatcgacagacacacttgcatcagtttcgaaaccatcttcagaagattggtttactctgaaggagaaatatattaacggaaagtacctggagaaagcactagttgtcaaagatgaaagagaagcaaattctactgcctcaagtagaatatgggaagcggttcaaagcaggaacataagagacatctaccgactcattgtaaaagcagatgcaaatatcatcaataccaagttcgatgatattactgaccttgatgtatatcaccaccaccatgttgatgcaccagatgaagtaaagaaaaggcacgatccaaatgcgtgtcagagaatcaagaattcgaacgaagcaagaaactgtcttcaaggctgctcattgttgcatgtggcgtgtcaaagcggtgacccaatcttgcttgaactgctgttgcagttcggggctgacataaacatgagagattaccacggacgaactccattacaccattgcatcgcatcagggaacaacgcatttgcaaaggttttgctgagaagaggtgctcgtccatcaatagaggatggtggaggattaagtgtgttggaaagggcaatggagatgggagccataaccgatgaagagctcttccttctattagcagagtgtcagtaa

SEQ ID NO: 45819 - protein, 776 aa, Arabidopsis thaliana
  peptide (1)..(776): Ceres Seq. ID no. 12561117
MAGFINLEDSPMFQKQVFSLEGTSDELKDRCQKLYKGVKKFMGALGEASTGVSAFADSLEEFGAGHDDPVSVSIGGPVISKFINTLRELSSYKEFLRSQVEHVLLERLTNFMTVDLQEAKESRRRFDKAVHSYDQAREKFVSLKKNTRGDIVAELEEDLENSKSAFEKSRFNLVNSLMTIEAKKKYEFLESISAIMDSHFKYFKLGYDLLSQLEPYIHQVLTYAQQSKEQSKIEQDRFAQRIQEFRTQSELDSQQASAKADPSDVGGNHVYRAIPRKNVEANSVSTADKEVTKQGYLLKRSASLRADWKRRFFVLDNHGSLYYYRNTGNKSAKSQHYYSGLGEHSSGVFGRFRTRHNRSASQGSLDCNMIDLRTSLIKLDAEDTDLRLCFRIISPQKTYTLQAENGADRMDWVNKITAAITIRLNSHFLQQSPARYLDKKNTSSGPATENLTLNQKEDYNQRLNVGDDVLTILREIPGNNTCAECNAPDPDWASLNLGVLMCIECSGVHRNLGVHISKVRSLTLDVKVWEPTILDLFRNLGNGYCNSVWEELLHHLDDDSEKGSTDTLASVSKPSSEDWFTLKEKYINGKYLEKALVVKDEREANSTASSRIWEAVQSRNIRDIYRLIVKADANIINTKFDDITDLDVYHHHHVDAPDEVKKRHDPNACQRIKNSNEARNCLQGCSLLHVACQSGDPILLELLLQFGADINMRDYHGRTPLHHCIASGNNAFAKVLLRRGARPSIEDGGGLSVLERAMEMGAITDEELFLLLAECQ

SEQ ID NO: 45820 - protein, 765 aa, Arabidopsis thaliana
  peptide (1)..(765): Ceres Seq. ID no. 12561118
MFQKQVFSLEGTSDELKDRCQKLYKGVKKFMGALGEASTGVSAFADSLEEFGAGHDDPVSVSIGGPVISKFINTLRELSSYKEFLRSQVEHVLLERLTNFMTVDLQEAKESRRRFDKAVHSYDQAREKFVSLKKNTRGDIVAELEEDLENSKSAFEKSRFNLVNSLMTIEAKKKYEFLESISAIMDSHFKYFKLGYDLLSQLEPYIHQVLTYAQQSKEQSKIEQDRFAQRIQEFRTQSELDSQQASAKADPSDVGGNHVYRAIPRKNVEANSVSTADKEVTKQGYLLKRSASLRADWKRRFFVLDNHGSLYYYRNTGNKSAKSQHYYSGLGEHSSGVFGRFRTRHNRSASQGSLDCNMIDLRTSLIKLDAEDTDLRLCFRIISPQKTYTLQAENGADRMDWVNKITAAITIRLNSHFLQQSPARYLDKKNTSSGPATENLTLNQKEDYNQRLNVGDDVLTILREIPGNNTCAECNAPDPDWASLNLGVLMCIECSGVHRNLGVHISKVRSLTLDVKVWEPTILDLFRNLGNGYCNSVWEELLHHLDDDSEKGSTDTLASVSKPSSEDWFTLKEKYINGKYLEKALVVKDEREANSTASSRIWEAVQSRNIRDIYRLIVKADANIINTKFDDITDLDVYHHHHVDAPDEVKKRHDPNACQRIKNSNEARNCLQGCSLLHVACQSGDPILLELLLQFGADINMRDYHGRTPLHHCIASGNNAFAKVLLRRGARPSIEDGGGLSVLERAMEMGAITDEELFLLLAECQ

SEQ ID NO: 45821 - protein, 735 aa, Arabidopsis thaliana
  peptide (1)..(735): Ceres Seq. ID no. 12561119
MGALGEASTGVSAFADSLEEFGAGHDDPVSVSIGGPVISKFINTLRELSSYKEFLRSQVEHVLLERLTNFMTVDLQEAKESRRRFDKAVHSYDQAREKFVSLKKNTRGDIVAELEEDLENSKSAFEKSRFNLVNSLMTIEAKKKYEFLESISAIMDSHFKYFKLGYDLLSQLEPYIHQVLTYAQQSKEQSKIEQDRFAQRIQEFRTQSELDSQQASAKADPSDVGGNHVYRAIPRKNVEANSVSTADKEVTKQGYLLKRSASLRADWKRRFFVLDNHGSLYYYRNTGNKSAKSQHYYSGLGEHSSGVFGRFRTRHNRSASQGSLDCNMIDLRTSLIKLDAEDTDLRLCFRIISPQKTYTLQAENGADRMDWVNKITAAITIRLNSHFLQQSPARYLDKKNTSSGPATENLTLNQKEDYNQRLNVGDDVLTILREIPGNNTCAECNAPDPDWASLNLGVLMCIECSGVHRNLGVHISKVRSLTLDVKVWEPTILDLFRNLGNGYCNSVWEELLHHLDDDSEKGSTDTLASVSKPSSEDWFTLKEKYINGKYLEKALVVKDEREANSTASSRIWEAVQSRNIRDIYRLIVKADANIINTKFDDITDLDVYHHHHVDAPDEVKKRHDPNACQRIKNSNEARNCLQGCSLLHVACQSGDPILLELLLQFGADINMRDYHGRTPLHHCIASGNNAFAKVLLRRGARPSIEDGGGLSVLERAMEMGAITDEELFLLLAECQ

SEQ ID NO: 45822 - DNA, 2916 bp, Arabidopsis thaliana
  misc_feature (1)..(2916): Ceres Seq. ID no. 14309731
  misc_feature (1)..(2916): Ortholog of  Ceres SEQ ID NO 15168977 as cited in SEQ ID NO 20587
gacttttgaagctgtaataatattcttgaatctattcctttctttctctttctcatgtttaatcggtgaaggctttactctgtttctttcatcatgtttcaatcaaaagccttaactttttctttagctctttccattacaagagacctctagcttcatactttttataaaaattctctctttttctcagtttaatctcaagaaatggtttcaagatcgtattcaaatctgttggagttagcttcaggagactcaccaacgtttggacgcatgaaccgacaaatcccacgaatcatggccgttgctggaatcatgtcaaacatcgataatgactctaaagacactgatctgtctcctaaagatcgtatcatcattgtagccaatgaattacctatacgagctcagagaagggttgatggtaatggtagtggtagtagtagtagtagtacttgttgtagcaaaggttggaacttttcttgggatgagaattcacttcttctccaattgaaagatgggttaggagatgaagctattgaagttatctatgttggttgtttgaaagaagagattcctcttaatgagcaagaagaagtgtatcagattcttcttgagagtttcaagtgtgtgcctacgtttttgcctttggatttgtacactagatactaccatggattctgtaagcaacagctttggcctttgtttcattacatgttgccactttctcctgatcttggaggtaggtttgataggactttgtggcaagcttatgtctctgtgaacaagatttttgctgatagaattatggaggtgattaatcctgaggatgattttgtgtggatacatgattatcatttgatggttttgcctactttcttgaggaagaggtttaacagagtcaagcttggtttcttccttcatagtccatttccatcgtctgagatttacaaaactttgcctattcgtgaagagcttcttcgggctttgctaaactcggatttgatagggttccatacttttgactacgctaggcatttcttgtcttgttgtagtcgaatgcttggtcttacttatgaatctaagagaggatacattggacttgagtattatggtagaaccgtgagtatcaaaattctacctgttggaatccacatgggtcagcttcagtcggttttgagcttacccgagactgaaaggaaagtcggggaacttattgaacggtatggtcgaaaaggcaggacgatgctgcttggtgtggatgatatggacattttcaaagggattactttaaagctgttggctatggagcagctgcttatgcaacatcctgaatggcaagggaaggttgtgttggtgcagatagctaatccggcgagagggaaagggaaagatgttaaagagatgcaagctgagacgtattcaactgttaagcggattaatgaaacgtttgggagacccggttacgatcctatagtattgatcgatgcaccgttgaagttctatgaaagggttgcttattacgtagtagctgagtgttgtttggtgacagcggttagggatgggatgaatcttataccttatgagtacatagtttctcgtcaaggaaatgagaaactggacaaaattctgaagctggaggcgaataatcgtaacaagaaaagcatgctggtggtttctgagtttattggttgctctccatcgctaagcggagccattcgtgttaatccatggaatgttgatgcagtagctgatgcaatggatagtgcccttgaagtagctgaaccggagaagcagctaagacatgagaagcattacaagtatgtgagcacacatgatgttggctattgggctcgtagcttcctccaagatcttgagaggagttgtggtgagcatggacgaaggaggtgttggggaattgggtttggtctcagtttcagagttgtggcactagaccagagcttcaggaagctgtcaatggaacacatagtatcagcttataagaggacaaagacacgggctatccttttagactatgatgatactttaatgccacaaggctcgatcgataaaaggccttcatcgaagtcaatcgacaaattgaacaccttgtgtagggacaagggcaatctggtgttcattgttagtgctaaaagccgagaaactctatcggactggtttagtccttgtgagaagcttggtattgctgctgaacatggctattttctgaggctaaggaaggcagtagagtgggaaaactgtgtggcagcagtagattgttcttggaagcaaattgccgagcctgtgatggaactctacaccgagacaaccgatggctcaacaattgaagacaaggagactgctcttgtttggagttatgaggatgctgaccctgattttggctcatgtcaagctaaggaacttctagatcatcttgaaagtgtccttgccaatgaacctgtaacagtgaaacgaggacagaactatgttgaggtcaagccacagggcgtgagcaagggacttatagcgagaaggatgctttcgatgatgcaagaaagaggaacacttcctgagtttgttctatgtattggagatgaccggtctgacgaagacatgtttgaggtgatctgcagttccactgaaggcccttcgattgccccaagagctgagattttcgcttgtactgtcggtcaaaagcctagcaaggccaagtattacctggatgacactactgagattgtcaggttaatgcatggtttagcttctgttacagaccagatcactcctgtttaaacaatcacagagaaagtatcagagactagagatcttatgtttgtatatctaccacggaaaattgtaacaaagagagatcttatgtttgttgacaatcttagaatatatgagtaaggctttacatcctac

SEQ ID NO: 45823 - protein, 860 aa, Arabidopsis thaliana
  peptide (1)..(860): Ceres Seq. ID no. 14309732
MVSRSYSNLLELASGDSPTFGRMNRQIPRIMAVAGIMSNIDNDSKDTDLSPKDRIIIVANELPIRAQRRVDGNGSGSSSSSTCCSKGWNFSWDENSLLLQLKDGLGDEAIEVIYVGCLKEEIPLNEQEEVYQILLESFKCVPTFLPLDLYTRYYHGFCKQQLWPLFHYMLPLSPDLGGRFDRTLWQAYVSVNKIFADRIMEVINPEDDFVWIHDYHLMVLPTFLRKRFNRVKLGFFLHSPFPSSEIYKTLPIREELLRALLNSDLIGFHTFDYARHFLSCCSRMLGLTYESKRGYIGLEYYGRTVSIKILPVGIHMGQLQSVLSLPETERKVGELIERYGRKGRTMLLGVDDMDIFKGITLKLLAMEQLLMQHPEWQGKVVLVQIANPARGKGKDVKEMQAETYSTVKRINETFGRPGYDPIVLIDAPLKFYERVAYYVVAECCLVTAVRDGMNLIPYEYIVSRQGNEKLDKILKLEANNRNKKSMLVVSEFIGCSPSLSGAIRVNPWNVDAVADAMDSALEVAEPEKQLRHEKHYKYVSTHDVGYWARSFLQDLERSCGEHGRRRCWGIGFGLSFRVVALDQSFRKLSMEHIVSAYKRTKTRAILLDYDDTLMPQGSIDKRPSSKSIDKLNTLCRDKGNLVFIVSAKSRETLSDWFSPCEKLGIAAEHGYFLRLRKAVEWENCVAAVDCSWKQIAEPVMELYTETTDGSTIEDKETALVWSYEDADPDFGSCQAKELLDHLESVLANEPVTVKRGQNYVEVKPQGVSKGLIARRMLSMMQERGTLPEFVLCIGDDRSDEDMFEVICSSTEGPSIAPRAEIFACTVGQKPSKAKYYLDDTTEIVRLMHGLASVTDQITPV

SEQ ID NO: 45824 - protein, 838 aa, Arabidopsis thaliana
  peptide (1)..(838): Ceres Seq. ID no. 14309733
MNRQIPRIMAVAGIMSNIDNDSKDTDLSPKDRIIIVANELPIRAQRRVDGNGSGSSSSSTCCSKGWNFSWDENSLLLQLKDGLGDEAIEVIYVGCLKEEIPLNEQEEVYQILLESFKCVPTFLPLDLYTRYYHGFCKQQLWPLFHYMLPLSPDLGGRFDRTLWQAYVSVNKIFADRIMEVINPEDDFVWIHDYHLMVLPTFLRKRFNRVKLGFFLHSPFPSSEIYKTLPIREELLRALLNSDLIGFHTFDYARHFLSCCSRMLGLTYESKRGYIGLEYYGRTVSIKILPVGIHMGQLQSVLSLPETERKVGELIERYGRKGRTMLLGVDDMDIFKGITLKLLAMEQLLMQHPEWQGKVVLVQIANPARGKGKDVKEMQAETYSTVKRINETFGRPGYDPIVLIDAPLKFYERVAYYVVAECCLVTAVRDGMNLIPYEYIVSRQGNEKLDKILKLEANNRNKKSMLVVSEFIGCSPSLSGAIRVNPWNVDAVADAMDSALEVAEPEKQLRHEKHYKYVSTHDVGYWARSFLQDLERSCGEHGRRRCWGIGFGLSFRVVALDQSFRKLSMEHIVSAYKRTKTRAILLDYDDTLMPQGSIDKRPSSKSIDKLNTLCRDKGNLVFIVSAKSRETLSDWFSPCEKLGIAAEHGYFLRLRKAVEWENCVAAVDCSWKQIAEPVMELYTETTDGSTIEDKETALVWSYEDADPDFGSCQAKELLDHLESVLANEPVTVKRGQNYVEVKPQGVSKGLIARRMLSMMQERGTLPEFVLCIGDDRSDEDMFEVICSSTEGPSIAPRAEIFACTVGQKPSKAKYYLDDTTEIVRLMHGLASVTDQITPV

SEQ ID NO: 45825 - protein, 830 aa, Arabidopsis thaliana
  peptide (1)..(830): Ceres Seq. ID no. 14309734
MAVAGIMSNIDNDSKDTDLSPKDRIIIVANELPIRAQRRVDGNGSGSSSSSTCCSKGWNFSWDENSLLLQLKDGLGDEAIEVIYVGCLKEEIPLNEQEEVYQILLESFKCVPTFLPLDLYTRYYHGFCKQQLWPLFHYMLPLSPDLGGRFDRTLWQAYVSVNKIFADRIMEVINPEDDFVWIHDYHLMVLPTFLRKRFNRVKLGFFLHSPFPSSEIYKTLPIREELLRALLNSDLIGFHTFDYARHFLSCCSRMLGLTYESKRGYIGLEYYGRTVSIKILPVGIHMGQLQSVLSLPETERKVGELIERYGRKGRTMLLGVDDMDIFKGITLKLLAMEQLLMQHPEWQGKVVLVQIANPARGKGKDVKEMQAETYSTVKRINETFGRPGYDPIVLIDAPLKFYERVAYYVVAECCLVTAVRDGMNLIPYEYIVSRQGNEKLDKILKLEANNRNKKSMLVVSEFIGCSPSLSGAIRVNPWNVDAVADAMDSALEVAEPEKQLRHEKHYKYVSTHDVGYWARSFLQDLERSCGEHGRRRCWGIGFGLSFRVVALDQSFRKLSMEHIVSAYKRTKTRAILLDYDDTLMPQGSIDKRPSSKSIDKLNTLCRDKGNLVFIVSAKSRETLSDWFSPCEKLGIAAEHGYFLRLRKAVEWENCVAAVDCSWKQIAEPVMELYTETTDGSTIEDKETALVWSYEDADPDFGSCQAKELLDHLESVLANEPVTVKRGQNYVEVKPQGVSKGLIARRMLSMMQERGTLPEFVLCIGDDRSDEDMFEVICSSTEGPSIAPRAEIFACTVGQKPSKAKYYLDDTTEIVRLMHGLASVTDQITPV

SEQ ID NO: 45826 - DNA, 1741 bp, Arabidopsis thaliana
  misc_feature (1)..(1741): Ceres Seq. ID no. 12604408
  misc_feature (1)..(1741): Ortholog of  Ceres SEQ ID NO 14313803 as cited in SEQ ID NO 54540
  misc_feature (1)..(1741): Ortholog of  Ceres SEQ ID NO 15172124 as cited in SEQ ID NO 59754
ataatagtgtgtcgttttccggtggcgacgagagggagaaccggagaagagatctctcgttcgtttttttcccggtaaatccggcgagaaaaagttcacattgaatctacgagaaaatttccttccatttcactccacgagttttcacctctcttgttcaatctctcaacgtctctccctcgtttctcgttttcgctttttccccttttcctcttctattttaccggaatccgagaatttttgatcagatctagtttcagaaataggttagttccaacaatgttgacggaacgaggaaggcgaatttctggtttcaatgggagtttcgaatttagcaatagaaaattccgtggttatggattcgtagatcgatctcaaggtttccatgaaaggagtccttcaagatcatgttctgtttcgaaaatccttcgtatcacgccaccaacctcgtctccaccgtcttcggcttctacatgcgctggttatatcgaacaccgggtctccaagttcgatactctcgccggcattgccattaagtatggcgttgaggttgcagatatcacgaagctgaatgggcttgtaactgatcttcagatgtttgctcttgagtctctccgaataccattacctggaagacatcctccttccccatgcttatctaatggctctctaaatcatggagaggattggtccgagcaagcttcatcctcagctagcaatggcaaccaccaggacgtatttgactccttccagtctttgaggttgaaccattcagaaaagaagatttctccagccatgaactccttgcaaggttattatggactgaaaccaaaaaacagaagagcttctgaaggttttgggatggcagtctacaagaacgaagcttctcaactccaagacaatgatcagtatctcactcccttccccgccaccagtactcccttatcccaccacagaaaatcaagaagcttggtagatgcagttatcgccgaggttaaccaatcacccaacccttcaaaagcaggaggaggagaagtgaactctactgataagccaatgagaagacgccaaaaatctgaagccgattttagttcacgagctccagaattgctgttgaaggaagagaacagaagcagcagtggcgcgttttctgcaatagctggaaaaaatttagcactgagatccaaagcatcaagcagagctaacttatcagcagaaaccagacatctcaattccataccaatcaatttgatggatgctcctgtgggagacagcttctcaagcgtgaggaaatctgttagcgcatctagtctacaagaaccaaactgtaacagcaacggttcatcgctatggccaacctcaaagtggaccctgaaacctgagttactcacacaagtagccatggctagttctatttttgacggattgcctaagccattaactggtcggagaaacaaaaaggctgtggactaaggttagttaggtacttaggttccgtcggtctcgttatcgactgtccacttttggtttttgtaatccaaaagcaagaagtcaatggcttttataatagattgaggagtaaatagaaagtaaaaagtgtattgctgcatttcattcattcaaaacaataaggcaaaataggttgtgacattgagagtcaaaattaggcattaaggttttgttgaatttaatttgtacgttagatgaataatcgaatatcagaatactgtattcaaagttt

SEQ ID NO: 45827 - protein, 397 aa, Arabidopsis thaliana
  peptide (1)..(397): Ceres Seq. ID no. 12604409
MLTERGRRISGFNGSFEFSNRKFRGYGFVDRSQGFHERSPSRSCSVSKILRITPPTSSPPSSASTCAGYIEHRVSKFDTLAGIAIKYGVEVADITKLNGLVTDLQMFALESLRIPLPGRHPPSPCLSNGSLNHGEDWSEQASSSASNGNHQDVFDSFQSLRLNHSEKKISPAMNSLQGYYGLKPKNRRASEGFGMAVYKNEASQLQDNDQYLTPFPATSTPLSHHRKSRSLVDAVIAEVNQSPNPSKAGGGEVNSTDKPMRRRQKSEADFSSRAPELLLKEENRSSSGAFSAIAGKNLALRSKASSRANLSAETRHLNSIPINLMDAPVGDSFSSVRKSVSASSLQEPNCNSNGSSLWPTSKWTLKPELLTQVAMASSIFDGLPKPLTGRRNKKAVD

SEQ ID NO: 45828 - protein, 292 aa, Arabidopsis thaliana
  peptide (1)..(292): Ceres Seq. ID no. 12604410
MFALESLRIPLPGRHPPSPCLSNGSLNHGEDWSEQASSSASNGNHQDVFDSFQSLRLNHSEKKISPAMNSLQGYYGLKPKNRRASEGFGMAVYKNEASQLQDNDQYLTPFPATSTPLSHHRKSRSLVDAVIAEVNQSPNPSKAGGGEVNSTDKPMRRRQKSEADFSSRAPELLLKEENRSSSGAFSAIAGKNLALRSKASSRANLSAETRHLNSIPINLMDAPVGDSFSSVRKSVSASSLQEPNCNSNGSSLWPTSKWTLKPELLTQVAMASSIFDGLPKPLTGRRNKKAVD

SEQ ID NO: 45829 - protein, 225 aa, Arabidopsis thaliana
  peptide (1)..(225): Ceres Seq. ID no. 12604411
MNSLQGYYGLKPKNRRASEGFGMAVYKNEASQLQDNDQYLTPFPATSTPLSHHRKSRSLVDAVIAEVNQSPNPSKAGGGEVNSTDKPMRRRQKSEADFSSRAPELLLKEENRSSSGAFSAIAGKNLALRSKASSRANLSAETRHLNSIPINLMDAPVGDSFSSVRKSVSASSLQEPNCNSNGSSLWPTSKWTLKPELLTQVAMASSIFDGLPKPLTGRRNKKAVD

SEQ ID NO: 45830 - DNA, 2197 bp, Arabidopsis thaliana
  misc_feature (1)..(2197): Ceres Seq. ID no. 14309813
  misc_feature (1)..(2197): Ortholog of  Ceres SEQ ID NO 14314280 as cited in SEQ ID NO 57429
  misc_feature (1)..(2197): Ortholog of  Ceres SEQ ID NO 13595870 as cited in SEQ ID NO 62101
  misc_feature (1)..(2197): Ortholog of  Ceres SEQ ID NO 13590241 as cited in SEQ ID NO 63878
  misc_feature (1)..(2197): Ortholog of  Ceres SEQ ID NO 13657939 as cited in SEQ ID NO 66349
gtctttctcttcttctgccaaattccacagatggctgcttcatcggcttgtcttctcggaaatggattatctgtctacacaaccaaacagaggttccaaaagcttgggcttgataggacatctaaagttacagttgtgaaggcttctttggatgagaagaaacatgaagggagaagaggtttctttaaactcttactaggaaacgctgctgctggagttggtttgcttgcaagtggaaacgctaatgcagacgaacaaggacaaggggtttcttcgtctagaatgtcttattctaggttcctagagtatttagacaagggaagggttgagaaagtagatttgtatgagaatgggactatagctattgtggaggccgtttctcctgagttgggtaaccggattcagcgtgtacgtgtgcagctacctggattgagtcaggagcttctccagaagttgagggctaagaatattgatttcgcagcacataatgctcaggaggaccaaggttctccaatactcaacttgattgggaatcttgcattccctgttattttgattggcggtttgttccttctctcgagaagatcctctggtggaatgggtggccctggtggtcctggcttcccactccaaattggtcagtcgaaagcaaagtttcagatggaaccaaacactggtgtaacttttgatgatgttgctggagtcgatgaagccaagcaagatttcatggaagtggtggagtttctgaagaagcctgagaggttcactgcggttggtgcccggatcccaaaaggtgttcttcttgttggtcctcctggtaccgggaaaaccctgttggcaaaagccattgctggtgaagctggtgtgcccttcttttccatctcgggttctgagtttgttgagatgtttgtcggtgttggtgcatcaagggtccgcgatcttttcaaaaaagccaaagaaaatgctccatgcattgttttcgtggatgaaatagatgctgttggtaggcaaagaggaactggaattggtggaggtaatgatgaaagagaacagacccttaatcagctcctgactgagatggatggttttgagggtaacactggtgttatcgtagttgctgcaaccaacagagccgacattcttgactccgctttgctaagaccagggcgttttgaccggcaggtatctgttgacgttccagacgttaagggaagaacagatatactcaaggttcactcggggaataagaaatttgaaagcggtgtttcacttgaagtaatagccatgagaacacctggatttagcggagctgatcttgcaaacctcttgaacgaggctgccatattggccggccgccgtggaaagactgcaatatcatcaaaagagattgatgactcaattgatagaattgtagctggcatggaaggaacagtcatgacagatgggaagagcaaaagcttggttgcttaccatgaagttggccatgccatatgtggaacattgactccagggcatgatgctgttcaaaaggtcacgttgataccacgaggccaggctagaggtctgacttggttcattccctcagatgacccaactctaatctccaaacagcaactctttgcaagaattgttggtggactcggtggtagagctgccgaagaagtcatctttggtgagtctgaggtgactactggtgcagttagtgacttgcaacagatcaccggtttggctaagcagatggtgacaacatttgggatgtctgaaatcggaccatggtcgctaatggattcatcggagcaaagcgatgtcattatgaggatgatggcaagaaactcaatgtctgagaagcttgcaaatgatattgatacagcggtgaagacattatcagacaaagcgtacgagatagctttgagccagattagaaacaatcgtgaagccatggacaagattgttgaaatacttcttgagaaagagactatgtcaggcgatgaattccgagcaatcctatctgaattcacagaaatcccacctgaaaaccgtgttgcttcttcaacatccacatcaacaccaacaccagcgtctgtctgagtaagagacctttgaatctctgtgtatattatcttgagatacttccccatactgtgtaacagcacatcttaatttccctagttggagtatatatgtatacgaattcgat

SEQ ID NO: 45831 - protein, 695 aa, Arabidopsis thaliana
  peptide (1)..(695): Ceres Seq. ID no. 14309814
VFLFFCQIPQMAASSACLLGNGLSVYTTKQRFQKLGLDRTSKVTVVKASLDEKKHEGRRGFFKLLLGNAAAGVGLLASGNANADEQGQGVSSSRMSYSRFLEYLDKGRVEKVDLYENGTIAIVEAVSPELGNRIQRVRVQLPGLSQELLQKLRAKNIDFAAHNAQEDQGSPILNLIGNLAFPVILIGGLFLLSRRSSGGMGGPGGPGFPLQIGQSKAKFQMEPNTGVTFDDVAGVDEAKQDFMEVVEFLKKPERFTAVGARIPKGVLLVGPPGTGKTLLAKAIAGEAGVPFFSISGSEFVEMFVGVGASRVRDLFKKAKENAPCIVFVDEIDAVGRQRGTGIGGGNDEREQTLNQLLTEMDGFEGNTGVIVVAATNRADILDSALLRPGRFDRQVSVDVPDVKGRTDILKVHSGNKKFESGVSLEVIAMRTPGFSGADLANLLNEAAILAGRRGKTAISSKEIDDSIDRIVAGMEGTVMTDGKSKSLVAYHEVGHAICGTLTPGHDAVQKVTLIPRGQARGLTWFIPSDDPTLISKQQLFARIVGGLGGRAAEEVIFGESEVTTGAVSDLQQITGLAKQMVTTFGMSEIGPWSLMDSSEQSDVIMRMMARNSMSEKLANDIDTAVKTLSDKAYEIALSQIRNNREAMDKIVEILLEKETMSGDEFRAILSEFTEIPPENRVASSTSTSTPTPASV

SEQ ID NO: 45832 - protein, 685 aa, Arabidopsis thaliana
  peptide (1)..(685): Ceres Seq. ID no. 14309815
MAASSACLLGNGLSVYTTKQRFQKLGLDRTSKVTVVKASLDEKKHEGRRGFFKLLLGNAAAGVGLLASGNANADEQGQGVSSSRMSYSRFLEYLDKGRVEKVDLYENGTIAIVEAVSPELGNRIQRVRVQLPGLSQELLQKLRAKNIDFAAHNAQEDQGSPILNLIGNLAFPVILIGGLFLLSRRSSGGMGGPGGPGFPLQIGQSKAKFQMEPNTGVTFDDVAGVDEAKQDFMEVVEFLKKPERFTAVGARIPKGVLLVGPPGTGKTLLAKAIAGEAGVPFFSISGSEFVEMFVGVGASRVRDLFKKAKENAPCIVFVDEIDAVGRQRGTGIGGGNDEREQTLNQLLTEMDGFEGNTGVIVVAATNRADILDSALLRPGRFDRQVSVDVPDVKGRTDILKVHSGNKKFESGVSLEVIAMRTPGFSGADLANLLNEAAILAGRRGKTAISSKEIDDSIDRIVAGMEGTVMTDGKSKSLVAYHEVGHAICGTLTPGHDAVQKVTLIPRGQARGLTWFIPSDDPTLISKQQLFARIVGGLGGRAAEEVIFGESEVTTGAVSDLQQITGLAKQMVTTFGMSEIGPWSLMDSSEQSDVIMRMMARNSMSEKLANDIDTAVKTLSDKAYEIALSQIRNNREAMDKIVEILLEKETMSGDEFRAILSEFTEIPPENRVASSTSTSTPTPASV

SEQ ID NO: 45833 - protein, 601 aa, Arabidopsis thaliana
  peptide (1)..(601): Ceres Seq. ID no. 14309816
MSYSRFLEYLDKGRVEKVDLYENGTIAIVEAVSPELGNRIQRVRVQLPGLSQELLQKLRAKNIDFAAHNAQEDQGSPILNLIGNLAFPVILIGGLFLLSRRSSGGMGGPGGPGFPLQIGQSKAKFQMEPNTGVTFDDVAGVDEAKQDFMEVVEFLKKPERFTAVGARIPKGVLLVGPPGTGKTLLAKAIAGEAGVPFFSISGSEFVEMFVGVGASRVRDLFKKAKENAPCIVFVDEIDAVGRQRGTGIGGGNDEREQTLNQLLTEMDGFEGNTGVIVVAATNRADILDSALLRPGRFDRQVSVDVPDVKGRTDILKVHSGNKKFESGVSLEVIAMRTPGFSGADLANLLNEAAILAGRRGKTAISSKEIDDSIDRIVAGMEGTVMTDGKSKSLVAYHEVGHAICGTLTPGHDAVQKVTLIPRGQARGLTWFIPSDDPTLISKQQLFARIVGGLGGRAAEEVIFGESEVTTGAVSDLQQITGLAKQMVTTFGMSEIGPWSLMDSSEQSDVIMRMMARNSMSEKLANDIDTAVKTLSDKAYEIALSQIRNNREAMDKIVEILLEKETMSGDEFRAILSEFTEIPPENRVASSTSTSTPTPASV

SEQ ID NO: 45834 - DNA, 1598 bp, Arabidopsis thaliana
  misc_feature (1)..(1598): Ceres Seq. ID no. 12600174
  misc_feature (1)..(1598): Ortholog of  Ceres SEQ ID NO 13502943 as cited in SEQ ID NO 65097
agcttgagcttctctctcaacgaaagaactcaagctttccaacactataaatctataatacagcttttattctcaaattttgtttgtcttaccatcattaccaaaccatgcaagccgcaacgtcgtgtgatctcaagttccgatcaacagatccgacgtctaggaacaaatgtttctcccacgcgattccaaagcgcgtggctgttacgtgcggttataggtcggagtcgtttagcttccctaacggtgtctccgtgagtcgatctgattggcaaagctcatgtgccattttatctagtaaagttgcttctgttgaaaataccggtggtttagcggacaaaatcgccgccgttaatggtcacacgaacggctctgtgaatcttggtctcgtcgccgttgagtcaactaacggaaagttagctcctgctcagccgttgactattactgatctatctccggcaccgttgcatggttctagtctacgtgtagcttaccaaggcgttcccggagcttactcggaagcagctgccggaaaagcttatcccaattgcgacgccattccttgtgaccagtttgacgttgcttttcaggcggtggagctttggatcgctgatcgagctgtgcttccggtggagaactcactcggtggttcgatccatcgaaactatgatcttcttctccgtcaccgtcttcacatcgttggagaagttcagattccggtccaccattgcctcctcgcactcccgggagtccgaactgactgtgtttcgcgggtgatctctcacccgcaagccctagcgcagacggaacactccctcgacgtccttacaccacatgcagcgcgtgaggctttccatgacacagcggctgctgcggagtatatctcagctaacgacctacatgacacggcggctgtggcgagcgcacgcgccgctgagctttacaacctccagatattagcggatgggattcaagacgacccggggaacgtcactcgtttcctaatgttggcgcgtgagcctataatcccacgcacggaccggccattcaagactagcatcgtctttgctgcccaagagcacaaaggaactagcgtcctctttaaagtcctctcggctttcgctttcagagacattagcctgaccaagatcgagtcccggcctcaccataaccgcccgcttagggttgttggtgacgggagctttgggacgtcgaagaacttcgagtacatgttttacgtggattttgaggcatcgatggctgagccgcgtgcacagaacgcgcttgcggaggttcaagagtacacgtcgttcctaagggtgctgggaagttaccccatggatatgacaccatggtccatgacatccacagaagaagcatgaccccatcgccaaaaacaaactcaccaataaatttattaaattattctgttctttctttttttgtgaaaattgtagtatacattgaaattaaaccgtaaatgtagagctcattattcacgtggtgattaggagaaaacaaaattttatttgtctgttactagctaccagatatatcttacattcttacttaatagttatgaacattgtggtttattc

SEQ ID NO: 45835 - protein, 424 aa, Arabidopsis thaliana
  peptide (1)..(424): Ceres Seq. ID no. 12600175
MQAATSCDLKFRSTDPTSRNKCFSHAIPKRVAVTCGYRSESFSFPNGVSVSRSDWQSSCAILSSKVASVENTGGLADKIAAVNGHTNGSVNLGLVAVESTNGKLAPAQPLTITDLSPAPLHGSSLRVAYQGVPGAYSEAAAGKAYPNCDAIPCDQFDVAFQAVELWIADRAVLPVENSLGGSIHRNYDLLLRHRLHIVGEVQIPVHHCLLALPGVRTDCVSRVISHPQALAQTEHSLDVLTPHAAREAFHDTAAAAEYISANDLHDTAAVASARAAELYNLQILADGIQDDPGNVTRFLMLAREPIIPRTDRPFKTSIVFAAQEHKGTSVLFKVLSAFAFRDISLTKIESRPHHNRPLRVVGDGSFGTSKNFEYMFYVDFEASMAEPRAQNALAEVQEYTSFLRVLGSYPMDMTPWSMTSTEEA

SEQ ID NO: 45836 - DNA, 1649 bp, Arabidopsis thaliana
  misc_feature (1)..(1649): Ceres Seq. ID no. 12561108
  misc_feature (1)..(1649): Ortholog of  Ceres SEQ ID NO 13595437 as cited in SEQ ID NO 56562
gtcttcttcctttgtctctcctctgatatacattgtgttctccttctcagaaaccctagatttctctcaatcaaatctagcttttctcttagggggagatttgatttttttctctgcaagactgtaacagtaggagaagctactttcctctgttttcttaatttcaaatctgcaatcgtactttttcgagttctataagtgaactcagattttagctttttttttttagggttcataagaacaaattggattttgagctcacagtataaataacccgactttgattactgggtaattttaaaaccgccattgttgttctctttactacttttgggaattagggtttatgatttctgggtattagattagataaatttgtttcctttttttgttaatcaatttaaaaatctcttatttctgttaaagacttgtaattttggagtttttaatgcatggacggaagagaagcaatggcatttccaggctcgcattctcagtactatcttcaaagaggagcctttactaatctcgcaccttcccaagtcgcgagtgggcttcacgcgccgccgccacatacgggattgaggccaatgtctaaccctaacattcatcaccctcaggctaacaatccaggacctcctttctcggattttggacacaccattcacatgggagtggtctcctctgcttctgatgctgatgtgcaaccgccaccgccaccgccaccaccagaggaaccgatggttaagaggaaacgtggacggccaagaaagtatggagaaccgatggttagtaataagtctagggactcttctccaatgtctgatcctaatgaacctaaacgggccagaggtcgacctcctggaactggaaggaagcaacgcttggctaatcttggtgagtggatgaatacttcagctggacttgcttttgcacctcatgtgatcagcattggagcaggagaagacattgctgcgaaagttttgtcattttcacaacaaagacctcgggctctttgtataatgtcaggcactggaaccatttcttcagtcactctgtgcaaacccggttcaaccgatcgtcacttaacatacgagggaccttttgagattataagttttggtggatcttatttggtgaatgaagaaggtggatccagaagtcgaacaggcggattgagtgtctctctttctcgtcccgatggtagtattattgccggtggagttgacatgcttatcgcagccaaccttgttcaggtggtggcatgtagttttgtatacggagcaagggcaaagactcataataacaataacaagaccatcagacaagaaaaggaaccaaatgaagaggacaacaatagtgaaatggagaccacaccgggtagtgcagctgaaccagcagcatctgcgggtcagcagacgccacagaacttctcttctcagggaataagggggtggcccggttcaggctcaggctctggcagatcacttgacatttgcagaaacccactcactgattttgatttgactcgtggatgatatacactattagtctttgaagcagcagcatacaaaatgtgattgctgtacatatgttattgtagatttctctctgggaatgttgaaatcagacatttaaggattgatact

SEQ ID NO: 45837 - protein, 361 aa, Arabidopsis thaliana
  peptide (1)..(361): Ceres Seq. ID no. 12561109
MDGREAMAFPGSHSQYYLQRGAFTNLAPSQVASGLHAPPPHTGLRPMSNPNIHHPQANNPGPPFSDFGHTIHMGVVSSASDADVQPPPPPPPPEEPMVKRKRGRPRKYGEPMVSNKSRDSSPMSDPNEPKRARGRPPGTGRKQRLANLGEWMNTSAGLAFAPHVISIGAGEDIAAKVLSFSQQRPRALCIMSGTGTISSVTLCKPGSTDRHLTYEGPFEIISFGGSYLVNEEGGSRSRTGGLSVSLSRPDGSIIAGGVDMLIAANLVQVVACSFVYGARAKTHNNNNKTIRQEKEPNEEDNNSEMETTPGSAAEPAASAGQQTPQNFSSQGIRGWPGSGSGSGRSLDICRNPLTDFDLTRG

SEQ ID NO: 45838 - protein, 355 aa, Arabidopsis thaliana
  peptide (1)..(355): Ceres Seq. ID no. 12561110
MAFPGSHSQYYLQRGAFTNLAPSQVASGLHAPPPHTGLRPMSNPNIHHPQANNPGPPFSDFGHTIHMGVVSSASDADVQPPPPPPPPEEPMVKRKRGRPRKYGEPMVSNKSRDSSPMSDPNEPKRARGRPPGTGRKQRLANLGEWMNTSAGLAFAPHVISIGAGEDIAAKVLSFSQQRPRALCIMSGTGTISSVTLCKPGSTDRHLTYEGPFEIISFGGSYLVNEEGGSRSRTGGLSVSLSRPDGSIIAGGVDMLIAANLVQVVACSFVYGARAKTHNNNNKTIRQEKEPNEEDNNSEMETTPGSAAEPAASAGQQTPQNFSSQGIRGWPGSGSGSGRSLDICRNPLTDFDLTRG

SEQ ID NO: 45839 - protein, 315 aa, Arabidopsis thaliana
  peptide (1)..(315): Ceres Seq. ID no. 12561111
MSNPNIHHPQANNPGPPFSDFGHTIHMGVVSSASDADVQPPPPPPPPEEPMVKRKRGRPRKYGEPMVSNKSRDSSPMSDPNEPKRARGRPPGTGRKQRLANLGEWMNTSAGLAFAPHVISIGAGEDIAAKVLSFSQQRPRALCIMSGTGTISSVTLCKPGSTDRHLTYEGPFEIISFGGSYLVNEEGGSRSRTGGLSVSLSRPDGSIIAGGVDMLIAANLVQVVACSFVYGARAKTHNNNNKTIRQEKEPNEEDNNSEMETTPGSAAEPAASAGQQTPQNFSSQGIRGWPGSGSGSGRSLDICRNPLTDFDLTRG

SEQ ID NO: 45840 - DNA, 1516 bp, Arabidopsis thaliana
  misc_feature (1)..(1516): Ceres Seq. ID no. 12604425
  misc_feature (1)..(1516): Ortholog of  Ceres SEQ ID NO 13591224 as cited in SEQ ID NO 64140
acacatagcgaaaaccctagtacctttatttgagccaacactttcatttctctccttctccaccagttttcccccaatcgctcctccttaaaccctaacatttttgcttcccctgtttcgattctcgagagttatcagagatgagttcggacgatgagagagacgagaaggagctgagtcttacctctcctgaagtcgtcaccaagtacaagagcgccgctgagatcgttaacaaggcgttacaggttgttttagctgaatgcaaaccaaaagctaagattgttgatatctgtgagaaaggagactcttttattaaagagcaaacagcaagcatgtacaagaattctaagaagaagattgagagaggtgttgcgttccctacatgcatttctgtgaacaacactgttggtcatttttcaccgcttgctagtgatgagtctgtgttggaagatggtgacatggttaaaatcgatatgggatgtcatattgatgggttcattgcccttgttggtcacacacatgttcttcaagaagggcctcttagtgggcgtaaggctgatgttatcgctgccgcaaatactgcagctgatgttgctctaaggctcgtacgtcctggaaaaaagaacactgatgtaactgaagctattcagaaggtagctgcagcttatgactgcaaaattgttgaaggtgttctttcccaccagctgaaacagcatgtgatagatggaaacaaggttgtgcttagtgtatccagccctgaaacaactgttgacgaagtggaatttgaagagaatgaagtctatgcaatagatattgtggcaagtactggtgatggcaagccaaagctattagacgagaagcaaacaactatttacaagaaagatgaaagtgttaactatcagttgaagatgaaggcctccagattcataatcagcgaaattaaacagaacttcccccgtatgccattcactgcaaggtcactggaggagaaaagggcacggcttggacttgtggagtgtgtgaaccatggtcatttgcaaccatatcctgttctttacgagaagcctggggattttgttgctcagattaagttcacagttttgctgatgccaaatggatcagataggatcacttcacatacacttcaggaacttcctaaaaagaccatcgaagaccctgagatcaaagggtggttagctttgggcatcaagaagaagaaaggtggtggaaagaagaagaaagcccaaaaggcgggagagaaaggagaggcttcaacagaggctgagccaatggacgcaagtagtaatgctcaagaatgagtaggaagatttgtctttgtttcttttaaagaatttttgaaacttgaggtacctctttcgttgtatgtttgggtttcaagagagtctcttcttaaacaaaaaaaaacaaacaatagtttaccacctttgtgcatatttttgcacaaagcacttttcatcatcatttctttgcttgtcctaatcttatctcattctct

SEQ ID NO: 45841 - protein, 392 aa, Arabidopsis thaliana
  peptide (1)..(392): Ceres Seq. ID no. 12604426
MSSDDERDEKELSLTSPEVVTKYKSAAEIVNKALQVVLAECKPKAKIVDICEKGDSFIKEQTASMYKNSKKKIERGVAFPTCISVNNTVGHFSPLASDESVLEDGDMVKIDMGCHIDGFIALVGHTHVLQEGPLSGRKADVIAAANTAADVALRLVRPGKKNTDVTEAIQKVAAAYDCKIVEGVLSHQLKQHVIDGNKVVLSVSSPETTVDEVEFEENEVYAIDIVASTGDGKPKLLDEKQTTIYKKDESVNYQLKMKASRFIISEIKQNFPRMPFTARSLEEKRARLGLVECVNHGHLQPYPVLYEKPGDFVAQIKFTVLLMPNGSDRITSHTLQELPKKTIEDPEIKGWLALGIKKKKGGGKKKKAQKAGEKGEASTEAEPMDASSNAQE

SEQ ID NO: 45842 - protein, 328 aa, Arabidopsis thaliana
  peptide (1)..(328): Ceres Seq. ID no. 12604427
MYKNSKKKIERGVAFPTCISVNNTVGHFSPLASDESVLEDGDMVKIDMGCHIDGFIALVGHTHVLQEGPLSGRKADVIAAANTAADVALRLVRPGKKNTDVTEAIQKVAAAYDCKIVEGVLSHQLKQHVIDGNKVVLSVSSPETTVDEVEFEENEVYAIDIVASTGDGKPKLLDEKQTTIYKKDESVNYQLKMKASRFIISEIKQNFPRMPFTARSLEEKRARLGLVECVNHGHLQPYPVLYEKPGDFVAQIKFTVLLMPNGSDRITSHTLQELPKKTIEDPEIKGWLALGIKKKKGGGKKKKAQKAGEKGEASTEAEPMDASSNAQE

SEQ ID NO: 45843 - protein, 286 aa, Arabidopsis thaliana
  peptide (1)..(286): Ceres Seq. ID no. 12604428
MVKIDMGCHIDGFIALVGHTHVLQEGPLSGRKADVIAAANTAADVALRLVRPGKKNTDVTEAIQKVAAAYDCKIVEGVLSHQLKQHVIDGNKVVLSVSSPETTVDEVEFEENEVYAIDIVASTGDGKPKLLDEKQTTIYKKDESVNYQLKMKASRFIISEIKQNFPRMPFTARSLEEKRARLGLVECVNHGHLQPYPVLYEKPGDFVAQIKFTVLLMPNGSDRITSHTLQELPKKTIEDPEIKGWLALGIKKKKGGGKKKKAQKAGEKGEASTEAEPMDASSNAQE

SEQ ID NO: 45844 - DNA, 2004 bp, Arabidopsis thaliana
  misc_feature (1)..(2004): Ceres Seq. ID no. 13646789
  misc_feature (1)..(2004): Ortholog of  Ceres SEQ ID NO 14316424 as cited in SEQ ID NO 58251
gatagtcatcgatcaatacacataacattccctaataagttaatttagtggctacgtttgacggaaaaaaaaaaaagagaagaaggaaatcaggaatgatctgattcttcgacgaaaggggaagaggttgttgaattcaaaatctctctctcttctctgtctctctcgcgtgagctaggtgcagatttttccagatctcaacattgaaattcaaactcaaagctagagagggagagattatagagagatagagagggagagaatcggttcggagaagaagaagaagacgaacacggaagctgaaacaatgattacgatcccataccttaccgctgtatcaacgtatttcagctacggcttgcttttcgcgtttggtcagcttcgcgattactctcgcctaatcttcgattggtggcgcaccaacaatctccagggatacgctccgatctgcttggcgcatgaggatttctacatccgacgattgtatcatcggattcaggactgttttggacgtcccatttcaagtgcacctgatgcttggattgatgtggttgagagagtctctgacgataacaacaagacgttaaagcgaactacaaagactagcaggtgccttaatttgggttcctacaattatcttggatttggttctttcgatgaatattgcacgcctcgtgtcattgagtctctgaagaaattttcagcaagtacatgtagctctcgcgttgatgcaggaactacatctgtgcatgcagaacttgaggattgtgttgctaaatatgtcggacaacctgctgctgttatttttggcatgggttatgcaacaaactcggctatcattcccgtcttgattggaaagggagggttgataataagcgattctttgaaccatacttcgattgtcaacggcgctcgaggttcaggagctactatccgtgttttccaacacaacacacctggtcatctggaaaaagtattgaaagaacaaatcgccgagggacaacccaggacgcatagaccgtggaagaaaattattgttgttgttgagggtatttacagcatggaaggggaaatttgtcatctgcccgagattgtttcaatatgcaagaagtataaggcatatgtttacttggacgaagctcacagcattggagcaattggcaagacaggaagaggtgtttgtgaactccttggagttgacacttctgatgtggacataatgatgggaactttcacgaaatcttttgggtcttgtggtggctatattgcgggatcaaaggacctcatccaatatttgaagcaccaatgcccggctcacctttacgccacatcaatttcaactccttccgcgacacaaatcatatcggcgataaaggttatccttggagaggatggttcaaacagaggggcacaaaagttagcaagaataagggagaacagcaactttttcagggctgagttgcagaagatggggtttgaagttcttggagacaatgattcaccagtcatgccaataatgctttacaatccagcaaaaattccagcattctcaagggaatgtttgcgagaaaacttggcggtggtggtcgtcggtttcccagctacacccctattgctagccagggctcgtatttgcatatccgcatctcactcaagagaagatcttataaaagccctacaggttataagcaaagcaggtgaccttaccgggatcaaatattttccggcagctccaaaaaagcaagaagtagagaaaaatggcatcaaattggattaaacccgtaaggcaacagtttctttccaagagatgtttggctagcaattagctgtagtgtacaattatctcgctgttcgtctttgtcttgtcgtgaaacatgtgattgttgtcattcttctctctttattatttttattgtttttgtcagagttaataattgtatagtgtccctctatatattgttgccccaaaatttttacagatgttatcgcagtcatctttgctcc

SEQ ID NO: 45845 - protein, 489 aa, Arabidopsis thaliana
  peptide (1)..(489): Ceres Seq. ID no. 13646790
MITIPYLTAVSTYFSYGLLFAFGQLRDYSRLIFDWWRTNNLQGYAPICLAHEDFYIRRLYHRIQDCFGRPISSAPDAWIDVVERVSDDNNKTLKRTTKTSRCLNLGSYNYLGFGSFDEYCTPRVIESLKKFSASTCSSRVDAGTTSVHAELEDCVAKYVGQPAAVIFGMGYATNSAIIPVLIGKGGLIISDSLNHTSIVNGARGSGATIRVFQHNTPGHLEKVLKEQIAEGQPRTHRPWKKIIVVVEGIYSMEGEICHLPEIVSICKKYKAYVYLDEAHSIGAIGKTGRGVCELLGVDTSDVDIMMGTFTKSFGSCGGYIAGSKDLIQYLKHQCPAHLYATSISTPSATQIISAIKVILGEDGSNRGAQKLARIRENSNFFRAELQKMGFEVLGDNDSPVMPIMLYNPAKIPAFSRECLRENLAVVVVGFPATPLLLARARICISASHSREDLIKALQVISKAGDLTGIKYFPAAPKKQEVEKNGIKLD

SEQ ID NO: 45846 - protein, 321 aa, Arabidopsis thaliana
  peptide (1)..(321): Ceres Seq. ID no. 13646791
MGYATNSAIIPVLIGKGGLIISDSLNHTSIVNGARGSGATIRVFQHNTPGHLEKVLKEQIAEGQPRTHRPWKKIIVVVEGIYSMEGEICHLPEIVSICKKYKAYVYLDEAHSIGAIGKTGRGVCELLGVDTSDVDIMMGTFTKSFGSCGGYIAGSKDLIQYLKHQCPAHLYATSISTPSATQIISAIKVILGEDGSNRGAQKLARIRENSNFFRAELQKMGFEVLGDNDSPVMPIMLYNPAKIPAFSRECLRENLAVVVVGFPATPLLLARARICISASHSREDLIKALQVISKAGDLTGIKYFPAAPKKQEVEKNGIKLD

SEQ ID NO: 45847 - DNA, 2309 bp, Arabidopsis thaliana
  misc_feature (1)..(2309): Ceres Seq. ID no. 12603870
  misc_feature (1)..(2309): Ortholog of  Ceres SEQ ID NO 13598865 as cited in SEQ ID NO 0
acaattagtatcttcgaagaagaaagaaagaaactctaataatggattattaagaataatcctcacactaatctcctccattcttcccattttttccccatcttaatttcctcaaaaacaccaaaaaaaaaagacaaaaaaaaaaaaacaaaaacagagaaaaaaacagttagatagggttttaaaatttttcccggcgaaaaatggagaaatctggaaatcaccatcacgcaaatgaatcatcggaaaatcatgatcacaaatctgaagatcacgagaataaacaacattccgatgaactgcattcatcgacgccggaatcacaatcggaatcctccgaacatagcctcgtcgaggtgatggaagccgtcgtcgatttcattcaaacactttcttccgagaaagatccgttaggagagatctcaccagcggtggagtcattcccggaggcggtggattcattggtgtcaaaaatggaatcttccgggcttgggcgggacgaaacagaggactctgtattcatcgacgccgttaaccggatttcgaaatcggttatgagattgagagagcttaaattagattcaacaccggtttcttcttggttaaaccgggcgagttcggttcaacaccgtgctgtttctcttctcgacgaagagtttcgtcatcttctagatcgttccagagaggaggagaagaagaacaacaacaacaacaaccaccacgacgggagcaattccgatcacaacaattcttcaacaaatgattcagatcgatgcgttttacaagaccatgaggaggcagaggaagaaagtttccatgatttttcaccggaatcgatctcgacgttgaaaaagatcgccggagcgatgatctccgccggttacgaagcagagtgttgtatgtcatacgaaatgtcgagacggcacgcgttcaaggaagagctaaccgaggttggattcgaagggatcaacgttgaagacgtgcagagaataggttgggaatctctcgaaggtgaaatcgcttcgtggatctcaatcgttcgccgttgctccaccgtgcttttccccggcgagctttctctctgtaacgccgtctttccggatcaagatcattcctctgtccgtaaacgtcttttcaccggtttggtctccgctgttacaatccggtttcttgatttctccggtgcggtggtgctgacgaaacggtcgtcggagaagcttttcaagttcttagacatgtacgagacgcttcgtgatttgattcctgcggtggaacaatctgattcagatttgatccaggagattaaactggctcagacgcggctaggagaagcagcagtgacgatattcggagagctagagaagtcgataaagagcgataatggacgaactccggtaccgagcggcgcagttcatccattaacacgttacaccatgaactacctcaaatacgcttgtgagtataaagaaacattagaccaagtgttccaacactatgaagcgaatcaaacagataacaaacctgaaccagagaccaaacctaggcagcagcaacgagaagacgatgaagagtacaaagtttcagctttcgctagacaaatgataagggtgatggaattgcttgacgcaaatcttgagatcaaatcgagactgtacagagacccatcactgagatttatattcttgatgaataatggaagatacattttgcagaagattaaagggtctatcgagataagggatttgatgggacagtcatggacgaggaagagatctacggagctgagacagtatcataagagttaccagagagagacttgggggaaagtgttacagtgtatgaatcaagaagggttacaggtgaacgggaaggtgtcgaagccggttttgaaggagaggtttaagattttcaatgctatgttcgatgagattcacaagacgcagagcacttggattgtgagtgatgagcagatgcaatcggagctaagggtgtcgatttcgtcgttggtgattccggcttatcggtctttctttgggaggtataagcaacatcttgattcagggaaacagacggataagtatgttaagtatcagcctgaggatattgaatctttcattgatgacttgtttgatggcaacccaacttctatggcacgcaagagataactccgtgtctcataagctatgaggagaaaaaaaaaccctacttgttccttctgcttctttttttttacctcaaaacttctatcgttatctttcattaccttcttgtttatagaacccatgagaagctaccgtgaaaacttctga

SEQ ID NO: 45848 - protein, 653 aa, Arabidopsis thaliana
  peptide (1)..(653): Ceres Seq. ID no. 12603871
MEKSGNHHHANESSENHDHKSEDHENKQHSDELHSSTPESQSESSEHSLVEVMEAVVDFIQTLSSEKDPLGEISPAVESFPEAVDSLVSKMESSGLGRDETEDSVFIDAVNRISKSVMRLRELKLDSTPVSSWLNRASSVQHRAVSLLDEEFRHLLDRSREEEKKNNNNNNHHDGSNSDHNNSSTNDSDRCVLQDHEEAEEESFHDFSPESISTLKKIAGAMISAGYEAECCMSYEMSRRHAFKEELTEVGFEGINVEDVQRIGWESLEGEIASWISIVRRCSTVLFPGELSLCNAVFPDQDHSSVRKRLFTGLVSAVTIRFLDFSGAVVLTKRSSEKLFKFLDMYETLRDLIPAVEQSDSDLIQEIKLAQTRLGEAAVTIFGELEKSIKSDNGRTPVPSGAVHPLTRYTMNYLKYACEYKETLDQVFQHYEANQTDNKPEPETKPRQQQREDDEEYKVSAFARQMIRVMELLDANLEIKSRLYRDPSLRFIFLMNNGRYILQKIKGSIEIRDLMGQSWTRKRSTELRQYHKSYQRETWGKVLQCMNQEGLQVNGKVSKPVLKERFKIFNAMFDEIHKTQSTWIVSDEQMQSELRVSISSLVIPAYRSFFGRYKQHLDSGKQTDKYVKYQPEDIESFIDDLFDGNPTSMARKR

SEQ ID NO: 45849 - protein, 601 aa, Arabidopsis thaliana
  peptide (1)..(601): Ceres Seq. ID no. 12603872
MEAVVDFIQTLSSEKDPLGEISPAVESFPEAVDSLVSKMESSGLGRDETEDSVFIDAVNRISKSVMRLRELKLDSTPVSSWLNRASSVQHRAVSLLDEEFRHLLDRSREEEKKNNNNNNHHDGSNSDHNNSSTNDSDRCVLQDHEEAEEESFHDFSPESISTLKKIAGAMISAGYEAECCMSYEMSRRHAFKEELTEVGFEGINVEDVQRIGWESLEGEIASWISIVRRCSTVLFPGELSLCNAVFPDQDHSSVRKRLFTGLVSAVTIRFLDFSGAVVLTKRSSEKLFKFLDMYETLRDLIPAVEQSDSDLIQEIKLAQTRLGEAAVTIFGELEKSIKSDNGRTPVPSGAVHPLTRYTMNYLKYACEYKETLDQVFQHYEANQTDNKPEPETKPRQQQREDDEEYKVSAFARQMIRVMELLDANLEIKSRLYRDPSLRFIFLMNNGRYILQKIKGSIEIRDLMGQSWTRKRSTELRQYHKSYQRETWGKVLQCMNQEGLQVNGKVSKPVLKERFKIFNAMFDEIHKTQSTWIVSDEQMQSELRVSISSLVIPAYRSFFGRYKQHLDSGKQTDKYVKYQPEDIESFIDDLFDGNPTSMARKR

SEQ ID NO: 45850 - protein, 563 aa, Arabidopsis thaliana
  peptide (1)..(563): Ceres Seq. ID no. 12603873
MESSGLGRDETEDSVFIDAVNRISKSVMRLRELKLDSTPVSSWLNRASSVQHRAVSLLDEEFRHLLDRSREEEKKNNNNNNHHDGSNSDHNNSSTNDSDRCVLQDHEEAEEESFHDFSPESISTLKKIAGAMISAGYEAECCMSYEMSRRHAFKEELTEVGFEGINVEDVQRIGWESLEGEIASWISIVRRCSTVLFPGELSLCNAVFPDQDHSSVRKRLFTGLVSAVTIRFLDFSGAVVLTKRSSEKLFKFLDMYETLRDLIPAVEQSDSDLIQEIKLAQTRLGEAAVTIFGELEKSIKSDNGRTPVPSGAVHPLTRYTMNYLKYACEYKETLDQVFQHYEANQTDNKPEPETKPRQQQREDDEEYKVSAFARQMIRVMELLDANLEIKSRLYRDPSLRFIFLMNNGRYILQKIKGSIEIRDLMGQSWTRKRSTELRQYHKSYQRETWGKVLQCMNQEGLQVNGKVSKPVLKERFKIFNAMFDEIHKTQSTWIVSDEQMQSELRVSISSLVIPAYRSFFGRYKQHLDSGKQTDKYVKYQPEDIESFIDDLFDGNPTSMARKR

SEQ ID NO: 45851 - DNA, 1018 bp, Arabidopsis thaliana
  misc_feature (1)..(1018): Ceres Seq. ID no. 13576188
  misc_feature (1)..(1018): Ortholog of  Ceres SEQ ID NO 15224382 as cited in SEQ ID NO 65962
  misc_feature (1)..(1018): Ortholog of  Ceres SEQ ID NO 15174380 as cited in SEQ ID NO 0
gaacttcactctctatcttcccctgacgtgactcttctctctcttcctctccatcaatggcgaccacaaactctctccaccaccaccaccactcctctccttcttacacacaccaccgcaacaatctccattgccaatctcacttcggaccaacttctctttccctcaaacaacccacttccgccgcaacattctcactaatctgctctgcttcttccacctcctcctccaccaccgccgtatctgccgtttcaaccacaaacgcctccgccacaactgccgaaaccgcgaccatattcgacgttctggagaaccatctcgtcaatcaaaacttcagacaagccgacgaggagacacggagattactcattcagatatccggagaagccgccgtgaaacgtggctacgttttcttctccgaggtgaaaacaatctcccccgaagatcttcaagctatcgacaatctatggattaaacacagtgatggtagattcggatacagcgtgcaacgcaaaatctggttaaaagtgaagaaagatttcacaagattcttcgttaaagttgagtggatgaagcttcttgacacagaggttgttcaatacaattacagagcgtttcctgacgaattcaagtgggagcttaacgatgaaacgcctttaggacacttaccgctcacaaacgccttgagaggaacgcagcttctgaaatgcgttttaagccatcctgcgtttgcgacagctgatgataacagtggagaaacagaagacgagcttaacagaggtgttgcggtggctaaggaacaggcaggagtaggagcagacaaaagagtgtttaaaacaaattacagcttctgatgtctttctccttcttttttttttttttttaatattgattttctgatattgtgaaagtataaacaaatctctgtaatcatatcattaattaaatcggatttctcttcaatgtcagttccattgtgattatggatgtatgaacaaagccagatcattagttaatg

SEQ ID NO: 45852 - protein, 265 aa, Arabidopsis thaliana
  peptide (1)..(265): Ceres Seq. ID no. 13576189
MATTNSLHHHHHSSPSYTHHRNNLHCQSHFGPTSLSLKQPTSAATFSLICSASSTSSSTTAVSAVSTTNASATTAETATIFDVLENHLVNQNFRQADEETRRLLIQISGEAAVKRGYVFFSEVKTISPEDLQAIDNLWIKHSDGRFGYSVQRKIWLKVKKDFTRFFVKVEWMKLLDTEVVQYNYRAFPDEFKWELNDETPLGHLPLTNALRGTQLLKCVLSHPAFATADDNSGETEDELNRGVAVAKEQAGVGADKRVFKTNYSF

SEQ ID NO: 45853 - DNA, 2745 bp, Arabidopsis thaliana; identical to SEQ ID NO: 45606
  misc_feature (1)..(2745): Ceres Seq. ID no. 13591675
  misc_feature (1)..(2745): Ortholog of  Ceres SEQ ID NO 13598668 as cited in SEQ ID NO 60784
  misc_feature (1)..(2745): Ortholog of  Ceres SEQ ID NO 13659835 as cited in SEQ ID NO 60791

SEQ ID NO: 45854 - protein, 98 aa, Arabidopsis thaliana; identical to SEQ ID NO: 45607
  peptide (1)..(98): Ceres Seq. ID no. 13591676

SEQ ID NO: 45855 - protein, 55 aa, Arabidopsis thaliana; identical to SEQ ID NO: 45608
  peptide (1)..(55): Ceres Seq. ID no. 13591677

SEQ ID NO: 45856 - DNA, 1926 bp, Arabidopsis thaliana
  misc_feature (1)..(1926): Ceres Seq. ID no. 13576164
  misc_feature (1)..(1926): Ortholog of  Ceres SEQ ID NO 13590691 as cited in SEQ ID NO 66290
atctcgccggaagattgattcatccgttgattaatcggagctccttagttttgattccgttatggagagtttgattgcgcttgtgaacaagattcagagagcctgtacggctctgggagatcacggcgagggaagctccctcccaactctctgggactcattgcctgcaattgccgtcgtcggtggtcagagttctggaaagtcttcagtgctagagagtgttgttggaaaagattttctacctcgtggagctgggattgttacacgcagacctcttgtcctgcagcttcatagaattgatgaagggaaagagtatgcagagtttatgcatcttccaaagaagaagttcacagattttgctgctgtgaggcaggagatctcggatgagacagatcgtgaaactggtcgcagcagcaaagtaatatccacagtcccaattcatctcagtatcttctctcctaatgttgtgaatttgacacttgtcgatcttcctgggctaacaaaggtagctgttgatggccagcctgaaagcattgttcaagacatcgagaacatggtcagatcgtttattgagaagcccaactgcatcatacttgctatttcccctgcaaatcaggatcttgcaacatctgatgccattaagatctctcgtgaagttgatcccaaaggagacaggacttttggagttttaacaaaaattgatctcatggaccaaggcactaatgctgttgatatacttgaaggaaggggatacaaattaaggtatccttgggttggtgttgtaaaccggtctcaagctgacattaataaaagtgttgatatgattgctgctcgtcggcgtgaacgtgattacttccagactagcccagagtacagacatttaactgaaagaatgggttcagagtatttaggaaagatgctctctaagcatttggaagttgttatcaagtctagaatcccgggacttcagtctcttatcacaaagacaatttccgagttagagacagagctaagccgtcttgggaagcctgtagcagctgatgctggtggaaaactttatatgatcatggaaatttgccgtgcctttgatcaaacttttaaagaacacctggatggcacgcgttcaggtggtgaaaagataaattctgtgttcgacaatcaattcccagctgccattaaaagactgcaattcgacaaacatctctccatggacaatgtacggaaactgatcactgaagcagatggatatcaacctcatctcatagctcctgaacaaggttatcgccggctcatagaatcatgcttagtctccattagaggccctgctgaagcagctgttgatgcggttcattccattctcaaggatcttatccacaaatccatgggcgaaacatctgaactgaagcaatatccaacactcagagtagaagtatcaggtgcagccgtggattcattggatcgaatgagagacgaaagcaggaaagcaactctgttactagtggacatggagtctggttacttaacggtcgagttcttcaggaaactcccgcaagattctgaaaaaggtgggaatccgacacattcgatattcgacagatacaacgatgcttatctccgaagaatcggctcaaatgtgttgtcatatgtgaacatggtctgcgctggcttgagaaactccataccgaaatccattgtttactgtcaagtccgtgaagcaaaacgaagccttctagacatcttcttcaccgaacttggccagaaagagatgagcaaattgtcgaaattgttggatgaggatcctgcggttcagcagcgaaggacttcgattgcgaagaggctggaattgtatagaagtgctcaaacggatattgaagcagttgcttggtccaagtagagagacgagaccctctcttcacactccatttt

SEQ ID NO: 45857 - protein, 610 aa, Arabidopsis thaliana
  peptide (1)..(610): Ceres Seq. ID no. 13576165
MESLIALVNKIQRACTALGDHGEGSSLPTLWDSLPAIAVVGGQSSGKSSVLESVVGKDFLPRGAGIVTRRPLVLQLHRIDEGKEYAEFMHLPKKKFTDFAAVRQEISDETDRETGRSSKVISTVPIHLSIFSPNVVNLTLVDLPGLTKVAVDGQPESIVQDIENMVRSFIEKPNCIILAISPANQDLATSDAIKISREVDPKGDRTFGVLTKIDLMDQGTNAVDILEGRGYKLRYPWVGVVNRSQADINKSVDMIAARRRERDYFQTSPEYRHLTERMGSEYLGKMLSKHLEVVIKSRIPGLQSLITKTISELETELSRLGKPVAADAGGKLYMIMEICRAFDQTFKEHLDGTRSGGEKINSVFDNQFPAAIKRLQFDKHLSMDNVRKLITEADGYQPHLIAPEQGYRRLIESCLVSIRGPAEAAVDAVHSILKDLIHKSMGETSELKQYPTLRVEVSGAAVDSLDRMRDESRKATLLLVDMESGYLTVEFFRKLPQDSEKGGNPTHSIFDRYNDAYLRRIGSNVLSYVNMVCAGLRNSIPKSIVYCQVREAKRSLLDIFFTELGQKEMSKLSKLLDEDPAVQQRRTSIAKRLELYRSAQTDIEAVAWSK

SEQ ID NO: 45858 - protein, 522 aa, Arabidopsis thaliana
  peptide (1)..(522): Ceres Seq. ID no. 13576166
MHLPKKKFTDFAAVRQEISDETDRETGRSSKVISTVPIHLSIFSPNVVNLTLVDLPGLTKVAVDGQPESIVQDIENMVRSFIEKPNCIILAISPANQDLATSDAIKISREVDPKGDRTFGVLTKIDLMDQGTNAVDILEGRGYKLRYPWVGVVNRSQADINKSVDMIAARRRERDYFQTSPEYRHLTERMGSEYLGKMLSKHLEVVIKSRIPGLQSLITKTISELETELSRLGKPVAADAGGKLYMIMEICRAFDQTFKEHLDGTRSGGEKINSVFDNQFPAAIKRLQFDKHLSMDNVRKLITEADGYQPHLIAPEQGYRRLIESCLVSIRGPAEAAVDAVHSILKDLIHKSMGETSELKQYPTLRVEVSGAAVDSLDRMRDESRKATLLLVDMESGYLTVEFFRKLPQDSEKGGNPTHSIFDRYNDAYLRRIGSNVLSYVNMVCAGLRNSIPKSIVYCQVREAKRSLLDIFFTELGQKEMSKLSKLLDEDPAVQQRRTSIAKRLELYRSAQTDIEAVAWSK

SEQ ID NO: 45859 - protein, 446 aa, Arabidopsis thaliana
  peptide (1)..(446): Ceres Seq. ID no. 13576167
MVRSFIEKPNCIILAISPANQDLATSDAIKISREVDPKGDRTFGVLTKIDLMDQGTNAVDILEGRGYKLRYPWVGVVNRSQADINKSVDMIAARRRERDYFQTSPEYRHLTERMGSEYLGKMLSKHLEVVIKSRIPGLQSLITKTISELETELSRLGKPVAADAGGKLYMIMEICRAFDQTFKEHLDGTRSGGEKINSVFDNQFPAAIKRLQFDKHLSMDNVRKLITEADGYQPHLIAPEQGYRRLIESCLVSIRGPAEAAVDAVHSILKDLIHKSMGETSELKQYPTLRVEVSGAAVDSLDRMRDESRKATLLLVDMESGYLTVEFFRKLPQDSEKGGNPTHSIFDRYNDAYLRRIGSNVLSYVNMVCAGLRNSIPKSIVYCQVREAKRSLLDIFFTELGQKEMSKLSKLLDEDPAVQQRRTSIAKRLELYRSAQTDIEAVAWSK

SEQ ID NO: 45860 - DNA, 1872 bp, Arabidopsis thaliana
  misc_feature (1)..(1872): Ceres Seq. ID no. 12600568
  misc_feature (1)..(1872): Ortholog of  Ceres SEQ ID NO 14310907 as cited in SEQ ID NO 54338
aaaaaaaaaaaaaaaaacacttgttcatttacatcaaaatgatcactgcagctctacacgaacctcagattcacaaaccaaccgatacatccgtcgtctccgatgatgtgcttcctcattctcctcctacgcctcgcattttccggtcaaagcttccggacattgacatccctaaccacctccctctccacacttactgcttcgaaaaactctcatctgtttccgacaagccttgtctcatcgttggctccaccgggaaaagctacacctacggcgaaacacacctaatctgtcggagagtcgcttccgggttatacaagttaggtatcagaaaaggtgacgtcatcatgatccttctccaaaactcagccgagttcgttttctccttcatgggtgcttccatgatcggagccgtctcaaccaccgcaaaccctttctacacttctcaagagctttataaacagcttaaatcttccggagccaaactcataatcactcactctcaatacgtcgataaacttaaaaacctcggagaaaacctcacgctgatcactaccgatgaaccaacaccggagaattgtctaccattctcgacactcatcaccgacgacgaaacaaacccatttcaagaaaccgtcgatatcggcggtgacgatgcggcggcgttaccattctcatcgggaacaacagggttaccaaaaggagttgttttgacacacaagagcttaatcacaagcgttgcacaacaagtagatggagataacccaaatctttacctcaaatcaaacgacgtcatactctgcgttttaccacttttccatatctactctctcaatagcgtcctcctcaattcactccgatccggcgccacggttcttttaatgcataagtttgagatcggtgcgttattggatcttattcaaagacatagagtgacaatagcggcgcttgtaccgccgctagtgatcgctctagctaaaaacccgacggttaattcttatgatctctcctccgttagattcgttctttccggtgcagctcctttaggtaaagaacttcaagatagtcttcgtcgccgtctccctcaagccatccttggccagggatatggtatgacggaggcaggaccagtgttgtcaatgagccttgggttcgctaaagaaccgataccgacaaaatcaggttcatgtgggactgtggtccgaaacgcagagcttaaagtggttcaccttgagacacgtctctctcttggatacaaccaacctggtgagatttgtatccgcggtcaacagatcatgaaagagtacttgaacgatccagaagccacttcagcaacaatagacgaagaaggttggcttcacacaggagacattggatatgttgatgaagatgatgagattttcattgttgatcgacttaaagaagtcatcaagttcaaaggctttcaggtccctccagctgagctagagagtttgctaatcaatcaccattcaattgccgatgcagctgttgttccgcaaaatgatgaagtcgctggggaagttccggtggctttcgtggtgcgatcaaatggaaatgatatcactgaagaagatgttaaagaatatgttgccaaacaggtggtgttctataagagattgcacaaggtcttctttgttgcttccattcctaaatctccttcgggaaaaatactaagaaaggacctcaaagctaagctttgttgaatgtagttctttttaatatattccattgatgatttaaacgttcatttgtatccacaatgctttgtgtctcttttattttttaagatcctttgacgcaatagatgttggacactaagagtatgcttaagatactgaattattttggatc

SEQ ID NO: 45861 - protein, 573 aa, Arabidopsis thaliana
  peptide (1)..(573): Ceres Seq. ID no. 12600569
KKKKKHLFIYIKMITAALHEPQIHKPTDTSVVSDDVLPHSPPTPRIFRSKLPDIDIPNHLPLHTYCFEKLSSVSDKPCLIVGSTGKSYTYGETHLICRRVASGLYKLGIRKGDVIMILLQNSAEFVFSFMGASMIGAVSTTANPFYTSQELYKQLKSSGAKLIITHSQYVDKLKNLGENLTLITTDEPTPENCLPFSTLITDDETNPFQETVDIGGDDAAALPFSSGTTGLPKGVVLTHKSLITSVAQQVDGDNPNLYLKSNDVILCVLPLFHIYSLNSVLLNSLRSGATVLLMHKFEIGALLDLIQRHRVTIAALVPPLVIALAKNPTVNSYDLSSVRFVLSGAAPLGKELQDSLRRRLPQAILGQGYGMTEAGPVLSMSLGFAKEPIPTKSGSCGTVVRNAELKVVHLETRLSLGYNQPGEICIRGQQIMKEYLNDPEATSATIDEEGWLHTGDIGYVDEDDEIFIVDRLKEVIKFKGFQVPPAELESLLINHHSIADAAVVPQNDEVAGEVPVAFVVRSNGNDITEEDVKEYVAKQVVFYKRLHKVFFVASIPKSPSGKILRKDLKAKLC

SEQ ID NO: 45862 - protein, 561 aa, Arabidopsis thaliana
  peptide (1)..(561): Ceres Seq. ID no. 12600570
MITAALHEPQIHKPTDTSVVSDDVLPHSPPTPRIFRSKLPDIDIPNHLPLHTYCFEKLSSVSDKPCLIVGSTGKSYTYGETHLICRRVASGLYKLGIRKGDVIMILLQNSAEFVFSFMGASMIGAVSTTANPFYTSQELYKQLKSSGAKLIITHSQYVDKLKNLGENLTLITTDEPTPENCLPFSTLITDDETNPFQETVDIGGDDAAALPFSSGTTGLPKGVVLTHKSLITSVAQQVDGDNPNLYLKSNDVILCVLPLFHIYSLNSVLLNSLRSGATVLLMHKFEIGALLDLIQRHRVTIAALVPPLVIALAKNPTVNSYDLSSVRFVLSGAAPLGKELQDSLRRRLPQAILGQGYGMTEAGPVLSMSLGFAKEPIPTKSGSCGTVVRNAELKVVHLETRLSLGYNQPGEICIRGQQIMKEYLNDPEATSATIDEEGWLHTGDIGYVDEDDEIFIVDRLKEVIKFKGFQVPPAELESLLINHHSIADAAVVPQNDEVAGEVPVAFVVRSNGNDITEEDVKEYVAKQVVFYKRLHKVFFVASIPKSPSGKILRKDLKAKLC

SEQ ID NO: 45863 - protein, 458 aa, Arabidopsis thaliana
  peptide (1)..(458): Ceres Seq. ID no. 12600571
MILLQNSAEFVFSFMGASMIGAVSTTANPFYTSQELYKQLKSSGAKLIITHSQYVDKLKNLGENLTLITTDEPTPENCLPFSTLITDDETNPFQETVDIGGDDAAALPFSSGTTGLPKGVVLTHKSLITSVAQQVDGDNPNLYLKSNDVILCVLPLFHIYSLNSVLLNSLRSGATVLLMHKFEIGALLDLIQRHRVTIAALVPPLVIALAKNPTVNSYDLSSVRFVLSGAAPLGKELQDSLRRRLPQAILGQGYGMTEAGPVLSMSLGFAKEPIPTKSGSCGTVVRNAELKVVHLETRLSLGYNQPGEICIRGQQIMKEYLNDPEATSATIDEEGWLHTGDIGYVDEDDEIFIVDRLKEVIKFKGFQVPPAELESLLINHHSIADAAVVPQNDEVAGEVPVAFVVRSNGNDITEEDVKEYVAKQVVFYKRLHKVFFVASIPKSPSGKILRKDLKAKLC

SEQ ID NO: 45864 - DNA, 1966 bp, Arabidopsis thaliana
  misc_feature (1)..(1966): Ceres Seq. ID no. 13591692
  misc_feature (1)..(1966): Ortholog of  Ceres SEQ ID NO 13656435 as cited in SEQ ID NO 65853
agggctcgaaatctctctcaaaaccctctcaaaaattccaaaacataatctcatttctcaagtttaacattttcgagcccctttagaacagtggagaaagatccacacagataaaaaaacgggtgagttttatatcaaatagacgaaaatgcccctgtcggcgacggcggatacaagcaagacggtgaagctggagaggtacaatagctacctccggaagattcacagcaccaaagttctcaacgcttcttctaaagttcttttccgagcaacgcttctcgtagctcttgtcctcgtcctcatcttcgccatcaactaccctccactctccgatagccgcgccgccgcagcacaccacctccaccgtcgtagcttcttatccaccggactcttctcctcctcctcttcttcctcctctatcggtggagccgcgtgggaaaagcgcgttagacaatcctcaacagccaaacgaccacacggtctctccgtcctagtcaccggagctgccggattcgtcggatcccactgctcacttgcgctgcgaaaacgtggcgatggagtcttaggattcgacaacttcaacgattactatgacccatcactcaaaagagcaagacaagagctcttggagaaacaacaagtgttcatcgtcgaaggtgatctcaacgatggaccactcttacgtaaactcttcgacgttgtccctttcactcacatccttcacttagccgctcaagccggagtacgttacgctatgaaaaaccctcaatcttacatcgcctccaacatcgccggattcgttaaccttcttgaagtggctaaagcagctaatccacaacctgcgattgtttgggcttcctctagctctgtttacggtctcaacactgagaatccattctctgaagaacaccgaacagaccaaccagcgagtctttacgcagcaaccaagaaagctggtgaagagatcgcacatacttacaaccacatctacggtctctccttaaccggactccggttctttacggtttacggtccatggggaagaccagacatggcttacttcttcttcactaaagacatcctccacggtaaatcaatcgacatttacagaactcaggacaatcaagaagtggcgcgtgacttcacctacatcgatgacatcgttaaaggttgtgtcggtgcgttagacacggctgagaaaagcaccggaagcggcggaaagaagagaggacaagctcagctacgtgtttacaatctaggaaacacgtccccggttccggttgggagattggtctcgatcttggaaggattgttagggacaaaagctaagaagcatcttatcaaaatgccaagaaacggtgacgtgccttacacgcatgctaatgtgagtttagcgtataaagatttcgggtacaaaccgacgacggatctcgcggcggggctgaggaagttcgtcaagtggtacgttggttattatgggattcagccgagggtaaaaaaggaaacttctcacgccgaagattccgcttaataattttctctctaccaccatctctctcatcatcacatgcttgtttatttttcttacaaaaaaaaaaaaaatcatttacagggacagatttctgtatttttctttatttaaaaattgctccccaaaaaaaaaaaatcataaatgtttttgtggtggtcctttttttagggggatcaaagtgtgggaattaaattgttacagctgtatgttataatagaaagatatatagaaatgaggagaggaaaaaaaagaagaaaggggtagaagaattgaaaatatatgtgggattgttatgtaataaatgaaataggttatgatcttgctggaaagtgtttagagcagatcttagccgttggatttttataatcaaggaatgaaacctgtgatccattattataccaactgtaacataaattttattctctctttttatct

SEQ ID NO: 45865 - protein, 460 aa, Arabidopsis thaliana
  peptide (1)..(460): Ceres Seq. ID no. 13591693
MPLSATADTSKTVKLERYNSYLRKIHSTKVLNASSKVLFRATLLVALVLVLIFAINYPPLSDSRAAAAHHLHRRSFLSTGLFSSSSSSSSIGGAAWEKRVRQSSTAKRPHGLSVLVTGAAGFVGSHCSLALRKRGDGVLGFDNFNDYYDPSLKRARQELLEKQQVFIVEGDLNDGPLLRKLFDVVPFTHILHLAAQAGVRYAMKNPQSYIASNIAGFVNLLEVAKAANPQPAIVWASSSSVYGLNTENPFSEEHRTDQPASLYAATKKAGEEIAHTYNHIYGLSLTGLRFFTVYGPWGRPDMAYFFFTKDILHGKSIDIYRTQDNQEVARDFTYIDDIVKGCVGALDTAEKSTGSGGKKRGQAQLRVYNLGNTSPVPVGRLVSILEGLLGTKAKKHLIKMPRNGDVPYTHANVSLAYKDFGYKPTTDLAAGLRKFVKWYVGYYGIQPRVKKETSHAEDSA

SEQ ID NO: 45866 - protein, 258 aa, Arabidopsis thaliana
  peptide (1)..(258): Ceres Seq. ID no. 13591694
MKNPQSYIASNIAGFVNLLEVAKAANPQPAIVWASSSSVYGLNTENPFSEEHRTDQPASLYAATKKAGEEIAHTYNHIYGLSLTGLRFFTVYGPWGRPDMAYFFFTKDILHGKSIDIYRTQDNQEVARDFTYIDDIVKGCVGALDTAEKSTGSGGKKRGQAQLRVYNLGNTSPVPVGRLVSILEGLLGTKAKKHLIKMPRNGDVPYTHANVSLAYKDFGYKPTTDLAAGLRKFVKWYVGYYGIQPRVKKETSHAEDSA

SEQ ID NO: 45867 - DNA, 2424 bp, Arabidopsis thaliana
  misc_feature (1)..(2424): Ceres Seq. ID no. 15172387
  misc_feature (1)..(2424): Ortholog of  Ceres SEQ ID NO 12590014 as cited in SEQ ID NO 0
ggaaaatctctccgccaaaattactctctccttaaacctcttcaccttctctctctcccctcctctgtatctatctcaaatctctctctctgtatctttaactcttattctagttttaatttaagtgtcggaaaaaacccttgttacacagtcatggcggtgatgaacggtggtcgtgcgacgaagcgagcgaggcgtagcaacagaatctcagctgatctttacgatttctctactttcccgacggcggagatcaacggcgagtcgacgactttgccgccgttccgagacggtgtgagaaccttcctcgcgacccacgcgcgtgtcactttccctccttcgacgctcttctcgagtttgatgacgtggcagatcatgcttagacctggagattcgacggacggttcagatctctcttctaaactcgtctctctcgacgttgtggaggaggatgtgacgagatcctctagatctgtttactgtgaacactgctgtgtcgttggttggagtagtcatccagtgtgtagaaagaggtaccgcttcatcataaggtcaggaggagacactaaggcttgcacgaggtgtggtaatactcagaatttgtctgaaggtagcaattgcaaatggtgcagcatggctttagacattgaaaactgggtttactctcagctagaggataacactcacctccttcacggcgttatccactctaatggctacgctcatctactgtgtcttaatggaagagaaggtggctctggttttttgactggtcgtgccattatggacttctgggataggctttgttcctcccttgctgttcgaaaagctagtgtgatggatgtgtcaaggaagtatgggatggactaccggttgcttcatgggattactagagggtgttcgtggtacagtgagtggggttatgaattcaaatcggggagctatgcactcaccaaagaagcttaccagagtgcagtggatactttatctgcgattcctctctctgagtttttgttccaggggaggaaaccaagaactcagctccactccattattagcttctaccaatcactctcgtgttcagagcttgtgactgtcaaagacctcttctcctttctcctacagatgattcgtgagaacagttccaaacctgcatctaagtcgtctgtactgtgtgcttggtctaaaagtgatgtggaacgtgtacagcaaaccatggttaagatactgaaagcttcaggacgcccacaagccaactgggttacaaggtgggctctcaagaggtctatttgcaaatcagcctctccacaactgattgattactgtctcaagcattttggaggggttttggtggatgatggatctcgagtagtcagctcacgttgcaatcctggttcaaacgactttgagtacaggcttgaatctgtcaacaatgtgcaccgcttatctaatcaagatgtaaataatgcatcagtggagcatgtcaaacaggatttaagatatttgtatgaaactttattgcacccacaaaccatggccgagtttaggtctcgagctacaagagaaaaaatgattgacgcagccacaaaaatactggactgtaagcatttcataaaagattacctgtctagcacagtgaaccccgttgcaatcaacctctggtgctgtgttgagctttcggatgaactcaaagaatccccagcccctccacctgaacggttggttttgccattgaacgctactgtttccgaccttaaaatcgaagctgctaaggcttttcaggaagtgtatgcaatgttcaagaggtttgaagttgaggagctcctaggttacggttctatagatgactctattaccctgaaatttctagttggcacaaacggggtcatacggattaaagggagatgctcaaaacacgggctccttagataccgcatggagagaggggtggataattggaaagttgattgcaagtgtggcacaaaggatgatgatggcgagaggatgttggcctgtgatggatgtggtgtgtggcaccacactagatgtattgggatcaataacgctgatgccctaccttccaagttcctttgtttcagatgcattgagttgtacagcaagaaaccaaagcaatctaaaaaagagcgtggatctagtcaagtgcccaaagctggctttgtttgtagaggtgagtcagctgctatgggcagtggatctaatttatccgtaacacttagagtaggctgactgtatttatgatctttctgtatataggttcttatctaggcacaaaactgcaaatggcttaaggtttctacccgtgattgtaactaacacatgaccacttcaagatttcaatcctaagcttaaaagtgttatgtaaacatgggattaagacatttatgaaagtcgaatgttttgttt

SEQ ID NO: 45868 - protein, 748 aa, Arabidopsis thaliana
  peptide (1)..(748): Ceres Seq. ID no. 15172388
GKSLRQNYSLLKPLHLLSLPSSVSISNLSLCIFNSYSSFNLSVGKNPCYTVMAVMNGGRATKRARRSNRISADLYDFSTFPTAEINGESTTLPPFRDGVRTFLATHARVTFPPSTLFSSLMTWQIMLRPGDSTDGSDLSSKLVSLDVVEEDVTRSSRSVYCEHCCVVGWSSHPVCRKRYRFIIRSGGDTKACTRCGNTQNLSEGSNCKWCSMALDIENWVYSQLEDNTHLLHGVIHSNGYAHLLCLNGREGGSGFLTGRAIMDFWDRLCSSLAVRKASVMDVSRKYGMDYRLLHGITRGCSWYSEWGYEFKSGSYALTKEAYQSAVDTLSAIPLSEFLFQGRKPRTQLHSIISFYQSLSCSELVTVKDLFSFLLQMIRENSSKPASKSSVLCAWSKSDVERVQQTMVKILKASGRPQANWVTRWALKRSICKSASPQLIDYCLKHFGGVLVDDGSRVVSSRCNPGSNDFEYRLESVNNVHRLSNQDVNNASVEHVKQDLRYLYETLLHPQTMAEFRSRATREKMIDAATKILDCKHFIKDYLSSTVNPVAINLWCCVELSDELKESPAPPPERLVLPLNATVSDLKIEAAKAFQEVYAMFKRFEVEELLGYGSIDDSITLKFLVGTNGVIRIKGRCSKHGLLRYRMERGVDNWKVDCKCGTKDDDGERMLACDGCGVWHHTRCIGINNADALPSKFLCFRCIELYSKKPKQSKKERGSSQVPKAGFVCRGESAAMGSGSNLSVTLRVG

SEQ ID NO: 45869 - protein, 697 aa, Arabidopsis thaliana
  peptide (1)..(697): Ceres Seq. ID no. 15172389
MAVMNGGRATKRARRSNRISADLYDFSTFPTAEINGESTTLPPFRDGVRTFLATHARVTFPPSTLFSSLMTWQIMLRPGDSTDGSDLSSKLVSLDVVEEDVTRSSRSVYCEHCCVVGWSSHPVCRKRYRFIIRSGGDTKACTRCGNTQNLSEGSNCKWCSMALDIENWVYSQLEDNTHLLHGVIHSNGYAHLLCLNGREGGSGFLTGRAIMDFWDRLCSSLAVRKASVMDVSRKYGMDYRLLHGITRGCSWYSEWGYEFKSGSYALTKEAYQSAVDTLSAIPLSEFLFQGRKPRTQLHSIISFYQSLSCSELVTVKDLFSFLLQMIRENSSKPASKSSVLCAWSKSDVERVQQTMVKILKASGRPQANWVTRWALKRSICKSASPQLIDYCLKHFGGVLVDDGSRVVSSRCNPGSNDFEYRLESVNNVHRLSNQDVNNASVEHVKQDLRYLYETLLHPQTMAEFRSRATREKMIDAATKILDCKHFIKDYLSSTVNPVAINLWCCVELSDELKESPAPPPERLVLPLNATVSDLKIEAAKAFQEVYAMFKRFEVEELLGYGSIDDSITLKFLVGTNGVIRIKGRCSKHGLLRYRMERGVDNWKVDCKCGTKDDDGERMLACDGCGVWHHTRCIGINNADALPSKFLCFRCIELYSKKPKQSKKERGSSQVPKAGFVCRGESAAMGSGSNLSVTLRVG

SEQ ID NO: 45870 - protein, 694 aa, Arabidopsis thaliana
  peptide (1)..(694): Ceres Seq. ID no. 15172390
MNGGRATKRARRSNRISADLYDFSTFPTAEINGESTTLPPFRDGVRTFLATHARVTFPPSTLFSSLMTWQIMLRPGDSTDGSDLSSKLVSLDVVEEDVTRSSRSVYCEHCCVVGWSSHPVCRKRYRFIIRSGGDTKACTRCGNTQNLSEGSNCKWCSMALDIENWVYSQLEDNTHLLHGVIHSNGYAHLLCLNGREGGSGFLTGRAIMDFWDRLCSSLAVRKASVMDVSRKYGMDYRLLHGITRGCSWYSEWGYEFKSGSYALTKEAYQSAVDTLSAIPLSEFLFQGRKPRTQLHSIISFYQSLSCSELVTVKDLFSFLLQMIRENSSKPASKSSVLCAWSKSDVERVQQTMVKILKASGRPQANWVTRWALKRSICKSASPQLIDYCLKHFGGVLVDDGSRVVSSRCNPGSNDFEYRLESVNNVHRLSNQDVNNASVEHVKQDLRYLYETLLHPQTMAEFRSRATREKMIDAATKILDCKHFIKDYLSSTVNPVAINLWCCVELSDELKESPAPPPERLVLPLNATVSDLKIEAAKAFQEVYAMFKRFEVEELLGYGSIDDSITLKFLVGTNGVIRIKGRCSKHGLLRYRMERGVDNWKVDCKCGTKDDDGERMLACDGCGVWHHTRCIGINNADALPSKFLCFRCIELYSKKPKQSKKERGSSQVPKAGFVCRGESAAMGSGSNLSVTLRVG

SEQ ID NO: 45871 - DNA, 2667 bp, Arabidopsis thaliana
  misc_feature (1)..(2667): Ceres Seq. ID no. 14315767
  misc_feature (1)..(2667): Ortholog of  Ceres SEQ ID NO 14303173 as cited in SEQ ID NO 66550
acctattattcatgaatgcattgaagatgtcacagtgagaacaaaaaaaaagttttccaggcatggcttcacgtgatgacatcttcctcgaccaagaacttcgagaaaagatactcagaaagtgaagtgagagagagagaaaatgccggggaattttaatgcttcttcttctcttcttagtgctcactaccagaagatttctttccgccattaaagagcagagtagagcagagctctcactttcttcttcttcttcttcattttttacctttcccttttttgcttcgatcgagatgctttagcataatggggcagatctggaaagtgacttaataatagaaagtgatggctttgaggagattcatgggatgctttttacggaaactcgatttcgaactgtatcaatcatttctgtttcttttatgagctgaggaaaagagccactctttctgatttgattgattcatcattcatcgacaatggcttcttcttcttcttcttcgtcttcgagtacggtgtcgttcgtagtctttgcatttacagtcttcttctgtttggttactccggcgagatctagcgacgtcgaagctttactaagcttgaaatcttcaatcgatccatctaattcgatttcttggagaggaacagatctctgcaactggcaaggtgttagagaatgtatgaatggaagagtctccaagcttgttcttgagtacttgaatctcaccggctcacttaacgagaagagtttgaaccagttggatcaacttagggttcttagtttcaaagctaactctctctccggttcaatccctaacctctccggtttggttaacctcaaatcggtttatcttaacgataacaacttctccggcgacttcccggagtctctcacgtctcttcaccgattgaaaactattttcctctccggaaacagactgtccggtcgaatccctagctcgttgcttcgtctctctcgtctttacacgctcaatgttgaggacaatctcttcactggttcgattcctcctcttaaccagacaagtctcagatacttcaatgtatccaacaataagctctctggtcaaattccactgacacgagctttgaagcagtttgatgagtcatcgtttaccggaaacgtcgctctttgcggcgatcagattggaagtccatgcggaatctcacctgcgccgtctgcgaaaccaacgcctatacctaagtctaagaagagcaaagcgaagctgatcgggattatcgccggaagcgttgccggcggagtactaatccttatcttgctattgacgttgcttatcgtctgctggcgacggaagcggcggaaccaggcaccgagggaagatagaaaaggtaaaggaatagcggaagcagaaggagcaacaactgcagagacagagagagacattgagaggaaagacagaggattctcatgggaaagaggcgaagaaggagcagtgggaactctggttttccttggaaccagtgattcaggcgagacggtagtgagatacaccatggaagatctgcttaaagcttcggcagagacactgggaagaggaacgttggggagcacgtacaaggctgtgatggagtctgggttcattgtcactgtgaagaggctcaagaacgcaaggtatcctcgcatggaggagttcaagagacatgttgagatccttggacagctcaaacacccaaatctggtgcctctcagagcctattttcaagccaaggaagaacgcttgctcgtctacgattacttccctaatggcagtctctttactcttattcacggaactagggcttctggaagtgggaagcctcttcactggacttcatgcctgaaaatagctgaggacttggcctcagctctgctctacatacatcagaatcctggcttgactcatgggaatttgaaatcgtccaatgtcttgttaggtcctgattttgagtcctgcctcacggattacggcctcagcactctccatgaccctgactcagttgaagaaacaagcgcagtgtctctcttttacaaagctccagagtgcagagacccacggaaagcctctacacagcccgctgatgtgtatagctttggggttcttcttctcgagcttctaacaggtagaacaccattccaggaccttgttcaagaatatgggtcagatatctcaagatgggtgcgtgcagtgagagaggaagagactgaatcaggtgaggaaccgacttcttcaggcaacgaagcatcagaggagaaacttcaggcacttttaagtatcgcaacggtttgtgtgaccattcaacccgataaccggcctgtgatgagagaggtgttgaagatggtgagggatgcaagggctgaagcaccattctcgtctaacagtagcgaacattcgcccgggagatggtcggataccgttcagagattgccaagggatgatcaagtgagcatttagagaaattgggtgggccttcttcattgctttcatagaatgacacgtatgattcttgaagtagggttcatagtgtaaagcttcttttttattttgtaacgccattttgattcatcgaccttgtaggacttgcataagatctattgaattgaaatgctggcattgagtagttgaagaacagaagaatcttttttttttc

SEQ ID NO: 45872 - protein, 663 aa, Arabidopsis thaliana
  peptide (1)..(663): Ceres Seq. ID no. 14315768
MASSSSSSSSSTVSFVVFAFTVFFCLVTPARSSDVEALLSLKSSIDPSNSISWRGTDLCNWQGVRECMNGRVSKLVLEYLNLTGSLNEKSLNQLDQLRVLSFKANSLSGSIPNLSGLVNLKSVYLNDNNFSGDFPESLTSLHRLKTIFLSGNRLSGRIPSSLLRLSRLYTLNVEDNLFTGSIPPLNQTSLRYFNVSNNKLSGQIPLTRALKQFDESSFTGNVALCGDQIGSPCGISPAPSAKPTPIPKSKKSKAKLIGIIAGSVAGGVLILILLLTLLIVCWRRKRRNQAPREDRKGKGIAEAEGATTAETERDIERKDRGFSWERGEEGAVGTLVFLGTSDSGETVVRYTMEDLLKASAETLGRGTLGSTYKAVMESGFIVTVKRLKNARYPRMEEFKRHVEILGQLKHPNLVPLRAYFQAKEERLLVYDYFPNGSLFTLIHGTRASGSGKPLHWTSCLKIAEDLASALLYIHQNPGLTHGNLKSSNVLLGPDFESCLTDYGLSTLHDPDSVEETSAVSLFYKAPECRDPRKASTQPADVYSFGVLLLELLTGRTPFQDLVQEYGSDISRWVRAVREEETESGEEPTSSGNEASEEKLQALLSIATVCVTIQPDNRPVMREVLKMVRDARAEAPFSSNSSEHSPGRWSDTVQRLPRDDQVSI

SEQ ID NO: 45873 - protein, 596 aa, Arabidopsis thaliana
  peptide (1)..(596): Ceres Seq. ID no. 14315769
MNGRVSKLVLEYLNLTGSLNEKSLNQLDQLRVLSFKANSLSGSIPNLSGLVNLKSVYLNDNNFSGDFPESLTSLHRLKTIFLSGNRLSGRIPSSLLRLSRLYTLNVEDNLFTGSIPPLNQTSLRYFNVSNNKLSGQIPLTRALKQFDESSFTGNVALCGDQIGSPCGISPAPSAKPTPIPKSKKSKAKLIGIIAGSVAGGVLILILLLTLLIVCWRRKRRNQAPREDRKGKGIAEAEGATTAETERDIERKDRGFSWERGEEGAVGTLVFLGTSDSGETVVRYTMEDLLKASAETLGRGTLGSTYKAVMESGFIVTVKRLKNARYPRMEEFKRHVEILGQLKHPNLVPLRAYFQAKEERLLVYDYFPNGSLFTLIHGTRASGSGKPLHWTSCLKIAEDLASALLYIHQNPGLTHGNLKSSNVLLGPDFESCLTDYGLSTLHDPDSVEETSAVSLFYKAPECRDPRKASTQPADVYSFGVLLLELLTGRTPFQDLVQEYGSDISRWVRAVREEETESGEEPTSSGNEASEEKLQALLSIATVCVTIQPDNRPVMREVLKMVRDARAEAPFSSNSSEHSPGRWSDTVQRLPRDDQVSI

SEQ ID NO: 45874 - DNA, 1845 bp, Arabidopsis thaliana
  misc_feature (1)..(1845): Ceres Seq. ID no. 12561071
  misc_feature (1)..(1845): Ortholog of  Ceres SEQ ID NO 14311055 as cited in SEQ ID NO 53705
atggacaagcatcatcatcaacatcttttattacagcatcatcaacatcttcaccatcatcagaagctctctcttgccaaatcatccagacaaagctgtagtgaatggatctttcgagatgttccaagtgatataaccatagaagtaaacggtggaaactttgctctgcataagttccctttagtctctagaagtggaagaatccgaagaatagttgcagaacatagagattcagatatctccaaagtggagcttcttaatctcccaggaggagcagagacattcgaactagcagcaaaattctgctatgggattaacttcgagatcacttcttcgaacgttgcacagctcttttgtgtctctgattacctcgagatgacggaagagtactccaaagataacttggcttcaagaacagaggagtatcttgagagcatcgtatgcaagaatcttgagatgtgtgttcaagtcttgaaacaatccgagattcttctccctcttgcagatgaactgaatatcataggtagatgtatcgatgccattgcctcgaaggcttgcgctgagcagatcgcttcaagcttttcgaggttggagtatagtagctcagggaggcttcatatgagcagacaagtgaaaagcagtggtgatggaggagattggtggatcgaagatctttcggttctgaggattgatttgtatcagagagttatgaatgcaatgaagtgtcgtggtgtacgtccagaaagtataggagcttctttggttagttacgctgagagagagctaacaaagagatctgaacatgaacaaaccattgttgagacaattgttacgcttttgccagtcgaaaacctcgtggttccgatcagtttcctattcgggttactgagaagagcagtgattcttgatacttcagtttcctgcaggcttgatcttgagaggaggttaggttctcagctcgatatggcgactcttgacgatctcttgatcccgtcttttcgtcatgcaggagacactttgttcgacattgacacggttcacagaatcttagtgaatttctcacagcaaggaggagatgatagtgaggatgaagagtctgtgtttgaatgcgatagtccacattcgccttcacaaaccgccatgtttaaagttgcaaagcttgtagacagttatcttgctgagatagctcccgatgctaaccttgacctttctaagttcttgcttatcgcagaagccttaccgcctcatgctcgcacccttcacgatggtttataccgcgccattgatctctatcttaaggcacatcaagggttatcagattcagacaagaagaaactatcaaaacttattgacttccagaaactctcacaagaagctggagcacacgctgcacaaaacgagcggcttcctctgcaatccatagttcaagttctctactttgagcaactcaagcttcgaagctccttgtgctcttcttactcagacgaagagccaaagccaaagcagcaacaacagcagtcatggagaatcaatagcggagctctcagtgcaacaatgtcccccaaagacaactatgcgtctctgaggagagaaaaccgagaactgaagctcgagttagctaggttgagaatgagactcaacgacctagagaaagaacatatatgtatgaagagagatatgcagaggtctcattcgcgcaaattcatgagcagtttctcaaagaaaatggggaaacttagcttctttgggcatagctcttcaagaggatcaagctctccatcaaagcagtctttcagaacagattcaaaggtactgatggagagaacttgcgcaagcacagattag

SEQ ID NO: 45875 - protein, 614 aa, Arabidopsis thaliana
  peptide (1)..(614): Ceres Seq. ID no. 12561072
MDKHHHQHLLLQHHQHLHHHQKLSLAKSSRQSCSEWIFRDVPSDITIEVNGGNFALHKFPLVSRSGRIRRIVAEHRDSDISKVELLNLPGGAETFELAAKFCYGINFEITSSNVAQLFCVSDYLEMTEEYSKDNLASRTEEYLESIVCKNLEMCVQVLKQSEILLPLADELNIIGRCIDAIASKACAEQIASSFSRLEYSSSGRLHMSRQVKSSGDGGDWWIEDLSVLRIDLYQRVMNAMKCRGVRPESIGASLVSYAERELTKRSEHEQTIVETIVTLLPVENLVVPISFLFGLLRRAVILDTSVSCRLDLERRLGSQLDMATLDDLLIPSFRHAGDTLFDIDTVHRILVNFSQQGGDDSEDEESVFECDSPHSPSQTAMFKVAKLVDSYLAEIAPDANLDLSKFLLIAEALPPHARTLHDGLYRAIDLYLKAHQGLSDSDKKKLSKLIDFQKLSQEAGAHAAQNERLPLQSIVQVLYFEQLKLRSSLCSSYSDEEPKPKQQQQQSWRINSGALSATMSPKDNYASLRRENRELKLELARLRMRLNDLEKEHICMKRDMQRSHSRKFMSSFSKKMGKLSFFGHSSSRGSSSPSKQSFRTDSKVLMERTCASTD

SEQ ID NO: 45876 - protein, 489 aa, Arabidopsis thaliana
  peptide (1)..(489): Ceres Seq. ID no. 12561073
MTEEYSKDNLASRTEEYLESIVCKNLEMCVQVLKQSEILLPLADELNIIGRCIDAIASKACAEQIASSFSRLEYSSSGRLHMSRQVKSSGDGGDWWIEDLSVLRIDLYQRVMNAMKCRGVRPESIGASLVSYAERELTKRSEHEQTIVETIVTLLPVENLVVPISFLFGLLRRAVILDTSVSCRLDLERRLGSQLDMATLDDLLIPSFRHAGDTLFDIDTVHRILVNFSQQGGDDSEDEESVFECDSPHSPSQTAMFKVAKLVDSYLAEIAPDANLDLSKFLLIAEALPPHARTLHDGLYRAIDLYLKAHQGLSDSDKKKLSKLIDFQKLSQEAGAHAAQNERLPLQSIVQVLYFEQLKLRSSLCSSYSDEEPKPKQQQQQSWRINSGALSATMSPKDNYASLRRENRELKLELARLRMRLNDLEKEHICMKRDMQRSHSRKFMSSFSKKMGKLSFFGHSSSRGSSSPSKQSFRTDSKVLMERTCASTD

SEQ ID NO: 45877 - protein, 462 aa, Arabidopsis thaliana
  peptide (1)..(462): Ceres Seq. ID no. 12561074
MCVQVLKQSEILLPLADELNIIGRCIDAIASKACAEQIASSFSRLEYSSSGRLHMSRQVKSSGDGGDWWIEDLSVLRIDLYQRVMNAMKCRGVRPESIGASLVSYAERELTKRSEHEQTIVETIVTLLPVENLVVPISFLFGLLRRAVILDTSVSCRLDLERRLGSQLDMATLDDLLIPSFRHAGDTLFDIDTVHRILVNFSQQGGDDSEDEESVFECDSPHSPSQTAMFKVAKLVDSYLAEIAPDANLDLSKFLLIAEALPPHARTLHDGLYRAIDLYLKAHQGLSDSDKKKLSKLIDFQKLSQEAGAHAAQNERLPLQSIVQVLYFEQLKLRSSLCSSYSDEEPKPKQQQQQSWRINSGALSATMSPKDNYASLRRENRELKLELARLRMRLNDLEKEHICMKRDMQRSHSRKFMSSFSKKMGKLSFFGHSSSRGSSSPSKQSFRTDSKVLMERTCASTD

SEQ ID NO: 45878 - DNA, 1734 bp, Arabidopsis thaliana
  misc_feature (1)..(1734): Ceres Seq. ID no. 12561021
  misc_feature (1)..(1734): Ortholog of  Ceres SEQ ID NO 14303790 as cited in SEQ ID NO 55525
tactcatcaccaatacgggcaagttaaacccataactcccaaaatccatatcctctttaaaacatttttgtccaaataaaatgccttcttgttcggtaactgaaatttcaaaatgtatcgtctatccggagaagaagtccaccgtctccgatctccgtctctccgtctccgacctccctatgctctcatgtcattacattcaaaaaggcgtcctcctcaccagccctcctccttccttctccttcgacgaccttgtctcctctctccgccgttctctctcctccactctttccctcttccctgctttagccggccgtttctccaccactcccgccggtcacatttccattgtctgcaacgacgccggagttgatttcgtcgccgcttccgctaaacacgtcaaactctctgatgttctcttaccaggtgaagacgttcctctgcttttccgtgagtttttcgtcttcgagcgtctcgttagttacaacggtcatcataagcctctcgccgccgttcaagtgacggagctccacgacggtgtcttcatcggatgtaccgtgaatcattccgttactgacggaacttccttctggcacttcttcaacacctttgctgacgtcactagcggtgcttgtaagatcaaacaccttccagatttctcccgccacaccgtcttcgattctccggtcgttcttccagtccctcccggtggtccacgtgtcactttcgacgccgaccaacctctacgggagagaatttttcatttcagcagagaggcgattaccaaactgaaacagaggacgaataacagagttaacggaattgagactgccgttaacgatggaaggaaatgtaacggagagattaacggaaaaataacaaccgttttggatagttttttgaataataagaagagttatgatcggacggctgagatttcatcgttccaatctctcagcgctcagctatggcgatccgttacacgagcgaggaatctcgatccgagcaagacgacgacgtttcgaatggcggttaattgccggcaccggcttgagccgaagatggatccgtactacttcggaaacgcgatacagagcataccgacgttggcgtctgcgggagatctgctaagcaaagatctcaggtggtccgccgaacagttacacaggaacgtggtggcgcacgacgacgcgacggtccgccgtggaatcgccgcttgggaaagcgatccgaggctgtttcctctcggaaatccagatggagcttcgatcacgatggggagctcgccgagattcccaatgtacgacaatgatttcggatggggaaaaccgttagctgtgagaagcggcggagcgaataaattcgacgggaagatctcggcgtttcccggtagagaaggaaacggaagcgtggatctggaagtagttctggcgccggagactatgactgggattgagaacgatgctgagtttatgcaatacgtatcagaagtcacttacgattgttgaaaacgacgtagtttctgatacagaggaaaaaaaagcaaatatctaaagtgatagaggaacttaatggcatggcactttggacggttgagatttatctataaagtttttagatatttcgatctgagagttgtgaagcgaacgacgtcttatgagtcaatctactggtcttaatgtgacagtgtattattaatgtacaaaatcccgtctttttcaagtttttctttct

SEQ ID NO: 45879 - protein, 475 aa, Arabidopsis thaliana
  peptide (1)..(475): Ceres Seq. ID no. 12561022
MPSCSVTEISKCIVYPEKKSTVSDLRLSVSDLPMLSCHYIQKGVLLTSPPPSFSFDDLVSSLRRSLSSTLSLFPALAGRFSTTPAGHISIVCNDAGVDFVAASAKHVKLSDVLLPGEDVPLLFREFFVFERLVSYNGHHKPLAAVQVTELHDGVFIGCTVNHSVTDGTSFWHFFNTFADVTSGACKIKHLPDFSRHTVFDSPVVLPVPPGGPRVTFDADQPLRERIFHFSREAITKLKQRTNNRVNGIETAVNDGRKCNGEINGKITTVLDSFLNNKKSYDRTAEISSFQSLSAQLWRSVTRARNLDPSKTTTFRMAVNCRHRLEPKMDPYYFGNAIQSIPTLASAGDLLSKDLRWSAEQLHRNVVAHDDATVRRGIAAWESDPRLFPLGNPDGASITMGSSPRFPMYDNDFGWGKPLAVRSGGANKFDGKISAFPGREGNGSVDLEVVLAPETMTGIENDAEFMQYVSEVTYDC

SEQ ID NO: 45880 - protein, 442 aa, Arabidopsis thaliana
  peptide (1)..(442): Ceres Seq. ID no. 12561023
MLSCHYIQKGVLLTSPPPSFSFDDLVSSLRRSLSSTLSLFPALAGRFSTTPAGHISIVCNDAGVDFVAASAKHVKLSDVLLPGEDVPLLFREFFVFERLVSYNGHHKPLAAVQVTELHDGVFIGCTVNHSVTDGTSFWHFFNTFADVTSGACKIKHLPDFSRHTVFDSPVVLPVPPGGPRVTFDADQPLRERIFHFSREAITKLKQRTNNRVNGIETAVNDGRKCNGEINGKITTVLDSFLNNKKSYDRTAEISSFQSLSAQLWRSVTRARNLDPSKTTTFRMAVNCRHRLEPKMDPYYFGNAIQSIPTLASAGDLLSKDLRWSAEQLHRNVVAHDDATVRRGIAAWESDPRLFPLGNPDGASITMGSSPRFPMYDNDFGWGKPLAVRSGGANKFDGKISAFPGREGNGSVDLEVVLAPETMTGIENDAEFMQYVSEVTYDC

SEQ ID NO: 45881 - DNA, 2452 bp, Arabidopsis thaliana
  misc_feature (1)..(2452): Ceres Seq. ID no. 12561028
  misc_feature (1)..(2452): Ortholog of  Ceres SEQ ID NO 12611963 as cited in SEQ ID NO 53414
aattcattttctcatcaataacacaatctccctggaaaaattctctacgacttcctctcgtcgtcgagcttgttattgatcggagagagagatcagtgttctttggatcttccaatttcttccacgtttgtgcttgaattgcagaagaagttttgtataggactctgttttgcttgttgatagaatttgggaatctagggtttatcgaatcgtttattttggttttcgtttagtttctcttcttcgagctggtgtttctcaactagttagagagtttctcgattggtcagagctgcttttattgaattttctttggatttcgtgcttatagatctttgaaaagtctgagaatcctgttttggagttactgcttcaagttattggaagaaattagggtttcgatccaattttagaattgactcaaggaattccgatattggggttttgttgtagttctgattctcagtgaataagatagaagataatcatggaaatcgatggtggaaacgatgttcagattttggatcctgagctcttgcagcttcccggtttgtctcctgtatcacttaaagaaaatcctcatattgctgaagaactcttctcccagtggctttcacttcctgaaactggccgattggtcaagtctttaattgatgatactaaatctagtaccccagtcagtgtatccaaaaattgtactagtctcaatgttgcttgcgggagtgcattgccatctgtttttctgaacagcggcactcccccactatccccacgaggctcacctgggtctccccgtttctcgaggcaaaagacaagcccttctctacagtctcctctgaaatcagtcagggaaccaaagcgccaactcattccacagttttacttccaacatggacgtccacctgcgaaggaactaagggagcaatgtatatccatggttgatcaattttttagtaactatatagacggacttcatatggatgaattcaaatccattactaaagaagtctgcaagctgccttcttttctttcctctgtactatttagaaagatagacacgagtggcaccggtatcgttacaagggatgcatttatcaagtattgggttgatggacatatgttggcaatggacgtagcctcacagatatataatattttaaggcagccaggttgcaagtaccttagacaggctgacttcaaaccagttcttgatgagcttctgacaactcatcccggcttggaattcctgaggaatacacctgagtttcaagaaagatatgctgagaccgtcatctacagaatattttactacataaacagatcaggtactggttgcattactcttagagagctgaagcgtgggaatcttattactgccatgcaacaagttgatgaagaagacgacatcaataaagttattaggtacttctcctatgagcatttctacgtgatatactgcagattttgggaactcgatggcgaccatgatttccttattgataaggaaaatctcatcaaatatggtaatcatgcccttacctacaggattgtcgacagaatattttcacaggttcctaggaaatttacaagcaaagttgaggggaagatgagttatgaagattttgcatactttattctcgctgaggaggataagtcatctgagcctagtcttgagtattggttcaagtgcatagacctagatggagatggggtgatcactcccaacgagatgcagtttttctacgaagagcagctgcatcgcatggaatgtataacccaggaacctgtactctttgaagatatcctatgtcaaatattcgacatgattaaaccagagaaggagaactgcatcacactccaggatctgaaagcatccaaactttctggaaatattttcaatatactctttaacctgaacaaattcatggcgtttgaaacccgtgacccttttctcattcgtcaggaacgtgagaatccaacattgacggaatgggaccgatttgctcagagagagtatgtgaggttgtcaatggaggaagatgtggaggaagtctcgaatgggagtgcagatgtttgggatgaaccactcgaatctccattttagtgactcgtaagagtttcttgggaagaagagggagaagtcagatcttcttgggtggtaagagcctcggaaacaattttcagacagacaaccacgaaagccagtccattccacggttccacctagagattggcgaccaagagacttatccgatgcgtaagcttgtgttagtttcatgaaatatttgtcttgcttaggtttctcaggttggaccctctttcaatcttatgtatattattatatacgccgctttatagtgttttgtggaaccaacaacaacggttttatttaaaatcgaaagaactatgtacaaagacacttttttttgtgggaagaaatttacaaaccttg

SEQ ID NO: 45882 - protein, 538 aa, Arabidopsis thaliana
  peptide (1)..(538): Ceres Seq. ID no. 12561029
MEIDGGNDVQILDPELLQLPGLSPVSLKENPHIAEELFSQWLSLPETGRLVKSLIDDTKSSTPVSVSKNCTSLNVACGSALPSVFLNSGTPPLSPRGSPGSPRFSRQKTSPSLQSPLKSVREPKRQLIPQFYFQHGRPPAKELREQCISMVDQFFSNYIDGLHMDEFKSITKEVCKLPSFLSSVLFRKIDTSGTGIVTRDAFIKYWVDGHMLAMDVASQIYNILRQPGCKYLRQADFKPVLDELLTTHPGLEFLRNTPEFQERYAETVIYRIFYYINRSGTGCITLRELKRGNLITAMQQVDEEDDINKVIRYFSYEHFYVIYCRFWELDGDHDFLIDKENLIKYGNHALTYRIVDRIFSQVPRKFTSKVEGKMSYEDFAYFILAEEDKSSEPSLEYWFKCIDLDGDGVITPNEMQFFYEEQLHRMECITQEPVLFEDILCQIFDMIKPEKENCITLQDLKASKLSGNIFNILFNLNKFMAFETRDPFLIRQERENPTLTEWDRFAQREYVRLSMEEDVEEVSNGSADVWDEPLESPF

SEQ ID NO: 45883 - protein, 389 aa, Arabidopsis thaliana
  peptide (1)..(389): Ceres Seq. ID no. 12561030
MVDQFFSNYIDGLHMDEFKSITKEVCKLPSFLSSVLFRKIDTSGTGIVTRDAFIKYWVDGHMLAMDVASQIYNILRQPGCKYLRQADFKPVLDELLTTHPGLEFLRNTPEFQERYAETVIYRIFYYINRSGTGCITLRELKRGNLITAMQQVDEEDDINKVIRYFSYEHFYVIYCRFWELDGDHDFLIDKENLIKYGNHALTYRIVDRIFSQVPRKFTSKVEGKMSYEDFAYFILAEEDKSSEPSLEYWFKCIDLDGDGVITPNEMQFFYEEQLHRMECITQEPVLFEDILCQIFDMIKPEKENCITLQDLKASKLSGNIFNILFNLNKFMAFETRDPFLIRQERENPTLTEWDRFAQREYVRLSMEEDVEEVSNGSADVWDEPLESPF

SEQ ID NO: 45884 - protein, 375 aa, Arabidopsis thaliana
  peptide (1)..(375): Ceres Seq. ID no. 12561031
MDEFKSITKEVCKLPSFLSSVLFRKIDTSGTGIVTRDAFIKYWVDGHMLAMDVASQIYNILRQPGCKYLRQADFKPVLDELLTTHPGLEFLRNTPEFQERYAETVIYRIFYYINRSGTGCITLRELKRGNLITAMQQVDEEDDINKVIRYFSYEHFYVIYCRFWELDGDHDFLIDKENLIKYGNHALTYRIVDRIFSQVPRKFTSKVEGKMSYEDFAYFILAEEDKSSEPSLEYWFKCIDLDGDGVITPNEMQFFYEEQLHRMECITQEPVLFEDILCQIFDMIKPEKENCITLQDLKASKLSGNIFNILFNLNKFMAFETRDPFLIRQERENPTLTEWDRFAQREYVRLSMEEDVEEVSNGSADVWDEPLESPF

SEQ ID NO: 45885 - DNA, 1887 bp, Arabidopsis thaliana
  misc_feature (1)..(1887): Ceres Seq. ID no. 12560969
  misc_feature (1)..(1887): Ortholog of  Ceres SEQ ID NO 14311055 as cited in SEQ ID NO 53705
gacgcctttgttgctttgctttggtctctttgtcttctttctcttctcagcataaatccacacctctctctctactgtttctcacctctttcaccacatttcttttctcctttgggggaagaatcaagaaagaaagagagctagaatctagttctatccaagagtgttttttagtttctttctcttttttgggctatggaagcttgttgctctgatcttgaagtagacatcaatggagaacaaactatctttctcaataagcaaatcatatgtgcttattctggaacgttaagaaagcttttggggaaatcaactagttccagtggaaatctcaaggtgatcttcaatgatttccccggtggagctgagagtttcgagtttgtatcgaggttttgctacaatgacggtcgagtagctgtgatgccttcgaatgtagttttcttgcattgtgctgctaagtttatggaagtcactaaagtcttggaacaaacagagaagtgtatggaagagattaggtattgggcttggccagaggttcttctttgtctaaaacagtgtcaagaagttgaaacatcgcccgaagttgattctttagccgcgaaactgatggatgcgttggtggagaaactgtgtttaaccattgaaatgagtccttctagtgctggttctgcttgttcaccagatagcagcttgtttcggttttcttgtgatagtaaaagcacagagagtttcaagaattgctctgttcggttaacttggtggttcgatgaagttcttgttctgagttctggtttggttgaaatgttcttgaagcttatggtattgcggaaatttgataatctcatcataagtaggttcttgttctattatcagaaggtcaagttttgctctgcgtcttctcatgagaaaagaaagattcttgaaaccatcattgatactctttgcgtcttagatcgaagttgtgtcccttgcaagagcctttttgcggttttgaggcttgctcttggattgaacataaacaaaagctgtatgaacaagctggaggttatgataggtcaccaactggatcaagcaacactagacaatcttcttgttccatctccatcgaaatcgagtcacttgtactatgtgaatcttgttcttagattcacaaaagctttcctagatggggcaagaagtggattgcaattgaagaaagtctcaagtttgattgatcaatacatagctgaagtagcacctgatccttgcttgaaaccttcaaagtttctttctctcatcacacttgttccagattcagccagagaatcccacgaagatatataccgtgctattgatatgtatctcgaggctcacacaggaacaactgatggcgaaaaactcaacttgatacgaactttaagttacgagaagctttcaggagaatcaagagctcacatttcgcgtaaccaaaagtttcaggctattgagacactagatgaacaacaacaacaacaacaacaacaacaacaacagaagcagctcatactcagaatggagaaggttgagacttcaggagaaaacgagaagctgaaggaacatatcgaagggattcaatggagggtaatggaattggagagagcttgtttgaaaatgcagaatcaaatggaagttatcaagaagagatccaagagctcgagcaaaggaagtaatagatcacttcctaagctctgttcttgattagtgaagctgtaagcttacgatcatatttgtacatagagtgatagagagcataaggagtcaattatagttaccatttggttcttatgtttcagagtatttatcttttcttgtgttgttttctttgtcacaaagttgtgcgtaatgaaaagtaaagataaattcgttttt

SEQ ID NO: 45886 - protein, 506 aa, Arabidopsis thaliana
  peptide (1)..(506): Ceres Seq. ID no. 12560970
MEACCSDLEVDINGEQTIFLNKQIICAYSGTLRKLLGKSTSSSGNLKVIFNDFPGGAESFEFVSRFCYNDGRVAVMPSNVVFLHCAAKFMEVTKVLEQTEKCMEEIRYWAWPEVLLCLKQCQEVETSPEVDSLAAKLMDALVEKLCLTIEMSPSSAGSACSPDSSLFRFSCDSKSTESFKNCSVRLTWWFDEVLVLSSGLVEMFLKLMVLRKFDNLIISRFLFYYQKVKFCSASSHEKRKILETIIDTLCVLDRSCVPCKSLFAVLRLALGLNINKSCMNKLEVMIGHQLDQATLDNLLVPSPSKSSHLYYVNLVLRFTKAFLDGARSGLQLKKVSSLIDQYIAEVAPDPCLKPSKFLSLITLVPDSARESHEDIYRAIDMYLEAHTGTTDGEKLNLIRTLSYEKLSGESRAHISRNQKFQAIETLDEQQQQQQQQQQQKQLILRMEKVETSGENEKLKEHIEGIQWRVMELERACLKMQNQMEVIKKRSKSSSKGSNRSLPKLCS

SEQ ID NO: 45887 - protein, 431 aa, Arabidopsis thaliana
  peptide (1)..(431): Ceres Seq. ID no. 12560971
MPSNVVFLHCAAKFMEVTKVLEQTEKCMEEIRYWAWPEVLLCLKQCQEVETSPEVDSLAAKLMDALVEKLCLTIEMSPSSAGSACSPDSSLFRFSCDSKSTESFKNCSVRLTWWFDEVLVLSSGLVEMFLKLMVLRKFDNLIISRFLFYYQKVKFCSASSHEKRKILETIIDTLCVLDRSCVPCKSLFAVLRLALGLNINKSCMNKLEVMIGHQLDQATLDNLLVPSPSKSSHLYYVNLVLRFTKAFLDGARSGLQLKKVSSLIDQYIAEVAPDPCLKPSKFLSLITLVPDSARESHEDIYRAIDMYLEAHTGTTDGEKLNLIRTLSYEKLSGESRAHISRNQKFQAIETLDEQQQQQQQQQQQKQLILRMEKVETSGENEKLKEHIEGIQWRVMELERACLKMQNQMEVIKKRSKSSSKGSNRSLPKLCS

SEQ ID NO: 45888 - protein, 417 aa, Arabidopsis thaliana
  peptide (1)..(417): Ceres Seq. ID no. 12560972
MEVTKVLEQTEKCMEEIRYWAWPEVLLCLKQCQEVETSPEVDSLAAKLMDALVEKLCLTIEMSPSSAGSACSPDSSLFRFSCDSKSTESFKNCSVRLTWWFDEVLVLSSGLVEMFLKLMVLRKFDNLIISRFLFYYQKVKFCSASSHEKRKILETIIDTLCVLDRSCVPCKSLFAVLRLALGLNINKSCMNKLEVMIGHQLDQATLDNLLVPSPSKSSHLYYVNLVLRFTKAFLDGARSGLQLKKVSSLIDQYIAEVAPDPCLKPSKFLSLITLVPDSARESHEDIYRAIDMYLEAHTGTTDGEKLNLIRTLSYEKLSGESRAHISRNQKFQAIETLDEQQQQQQQQQQQKQLILRMEKVETSGENEKLKEHIEGIQWRVMELERACLKMQNQMEVIKKRSKSSSKGSNRSLPKLCS

SEQ ID NO: 45889 - DNA, 1599 bp, Arabidopsis thaliana
  misc_feature (1)..(1599): Ceres Seq. ID no. 15175865
  misc_feature (1)..(1599): Ortholog of  Ceres SEQ ID NO 13502943 as cited in SEQ ID NO 65097
gcactagtccccccccccccccagtgtgtatataagaccatctctcttctcctttatctctcagcttgagcttctctctcaacgaaagaactcaagctttccaacactataaatctataatacagcttttattctcaatttttgtttgtcttaccatcattaccaaaccatgcaagccgcaacgtcgtgtgatctcaagttccgatcaacagatccgacgtctaggaacaaatgtttctcccacgcgattccaaagcgcgtggctgttacgtgcggttataggtcggagtcgtttagcttccctaacggtgtctccgtgagtcgatctgattggcaaagctcatgtgccattttatctagtaaagttgcttctgttgaaaatcccggtggtttagccgacaaaatcgccgccgttaatggtcacacaaacggatccgtcaatcttggtctcgtcgccgttgagtcaactaacggaaagttagctcctgctcagccgttgactattactgatctatctccggcaccgttgcatggttctagtctacgtgtagcttaccaaggagttcccggtgcgtactcggaagcagctgccggaaaagcttatcccaattgcgacgccattccttgtgaccagttcgacgttgcttttcaagcggtggagcttaggatcgctgatcgagctgtgcttccggtagagaactcactcggtggttcgattcatcggaactatgatctcctcctccgtcaccgtcttcatatcgttggagaagttcagattccggtccaccattgcctcctcgcacttccgggagttcgaactgactgtgtttcgcgggtgatctctcacccgcaagccctagcgcagacggaacactcccttgacgtccttacaccacatgcagcgcgtgaggcattccatgacactgctgctgctgcggagtacatctcagctaacgacctacatgacacggcagctgtagcgagcgcacgcgccgctgagctttacaacctccagatattagcggatgggattcaagacgacccggggaacgtcactcgcttcctaatgttggcgcgtgaaccgataatcccacgcacggaccggccgttcaagactagcatcgtctttgctgcgcaagaacacaaaggaaccagcgttctctttaaagtcctctccgctttcgcttttagagacattagcctgaccaagatcgagtcccggcctcaccataaccgcccgcttaggattgttggtgacgggagctttgggacgtcgaagaacttcgagtacatgttttacgttgattttgaggcatcgatggctgagccgcgtgcacagaacgcgcttgcggaggttcaagagtacacgtcgttcctaagggtactgggaagttaccccatggatatgacaccatggtccatgacatccacagaagacgcatgaccccatcgccaaaaacaaactcaccaataaatttattaaattattctgttctttctttttttgtgaaaattgtagtatacatcgaaattaaaccgtaaatgtagagcacattattcacgtggtgattaggagaaaacaaaattttatttgtctgt

SEQ ID NO: 45890 - protein, 424 aa, Arabidopsis thaliana
  peptide (1)..(424): Ceres Seq. ID no. 15175866
MQAATSCDLKFRSTDPTSRNKCFSHAIPKRVAVTCGYRSESFSFPNGVSVSRSDWQSSCAILSSKVASVENPGGLADKIAAVNGHTNGSVNLGLVAVESTNGKLAPAQPLTITDLSPAPLHGSSLRVAYQGVPGAYSEAAAGKAYPNCDAIPCDQFDVAFQAVELRIADRAVLPVENSLGGSIHRNYDLLLRHRLHIVGEVQIPVHHCLLALPGVRTDCVSRVISHPQALAQTEHSLDVLTPHAAREAFHDTAAAAEYISANDLHDTAAVASARAAELYNLQILADGIQDDPGNVTRFLMLAREPIIPRTDRPFKTSIVFAAQEHKGTSVLFKVLSAFAFRDISLTKIESRPHHNRPLRIVGDGSFGTSKNFEYMFYVDFEASMAEPRAQNALAEVQEYTSFLRVLGSYPMDMTPWSMTSTEDA

SEQ ID NO: 45891 - DNA, 1472 bp, Arabidopsis thaliana
  misc_feature (1)..(1472): Ceres Seq. ID no. 15168939
  misc_feature (1)..(1472): Ortholog of  Ceres SEQ ID NO 13582534 as cited in SEQ ID NO 57409
  misc_feature (1)..(1472): Ortholog of  Ceres SEQ ID NO 14302384 as cited in SEQ ID NO 67177
gataagaaagaaagtcgtgaagatgagaggcgtaacaccaaactattaccattcttacactttcttcttcttcttcttcgttgtcttattagctctgtttcttcatgttttctcgataaacactttgtcatctacagaaactctaacaatctcaagcaaccgaaccattgtgtctcccggtaacatcttcgagctaggtttcttcaaaactacaacaagctctcgaaatggtgatcattggtatcttgggatttggtacaagtcaatctctgagagaacttatgtatgggttgccaacagagataaccctctttccaagtctattggaacattaaagatctcttacgctaacctcgtccttcttgatcattctggtactcttgtttggtcaacgaatctaacgagaacggtgaaatctccagtggtggcagagctgctcgataacggcaacttcgtgcttagagactccaaaggcaactatcaaaaccgattcttgtggcaaagctttgattatccggtggacacattactcccggagatgaaaattggtcgggatctcaaaacaggacacgagactttcctcagttcttggagaagcccttatgatccctcaagcggagacttctcgttcaaactcggaactcaagggctacctgatttttatcttttcaagaaagagtttctattgtaccgatccggtccgtggaatggagtcgggtttagtggcataccgacgatgcaaaactggagctactttgacgttgttaacaacttcatagagaacagagaggaagttgcttatagtttcaaagtcaccgaccatagcatgcactacgtgagatttacactgactaccgaaagattattacagatatccagatgggatacgacatcatcggaatggaacttgtttggcgttttaccgaccgagaaatgcgatttgtaccaaatatgtggtcgtgacagttattgtgacacgaaaacatcaccgacgtgtaactgtatcaaaggctttgttccaaagaatgtgacggcttgggctttgggagatacatttgagggatgtgtgaggaagtcacgactgaactgccacagagatgggttttttcttttgatgaagaggatgaagctgcctggtacaagcacagcaattgtggacaagacaattgggttgaatgaatgtaaggagaggtgttctaaggattgtaattgtaccgggtttgcgaataaggatatccaaaatggtgggtcgggttgtgtgatttggaccggagagctcatggatatgaggaattacgtcgtcggaggtcaagatctatatgtcaaaataggcctctataattagacatgaaaattggatatcttgatatattttagaatattggaaattcatatgatccgtgctttatagatatctatatccactaaaaaatatttaagaataataatacaaaattaaaaattatattttg

SEQ ID NO: 45892 - protein, 447 aa, Arabidopsis thaliana
  peptide (1)..(447): Ceres Seq. ID no. 15168940
IRKKVVKMRGVTPNYYHSYTFFFFFFVVLLALFLHVFSINTLSSTETLTISSNRTIVSPGNIFELGFFKTTTSSRNGDHWYLGIWYKSISERTYVWVANRDNPLSKSIGTLKISYANLVLLDHSGTLVWSTNLTRTVKSPVVAELLDNGNFVLRDSKGNYQNRFLWQSFDYPVDTLLPEMKIGRDLKTGHETFLSSWRSPYDPSSGDFSFKLGTQGLPDFYLFKKEFLLYRSGPWNGVGFSGIPTMQNWSYFDVVNNFIENREEVAYSFKVTDHSMHYVRFTLTTERLLQISRWDTTSSEWNLFGVLPTEKCDLYQICGRDSYCDTKTSPTCNCIKGFVPKNVTAWALGDTFEGCVRKSRLNCHRDGFFLLMKRMKLPGTSTAIVDKTIGLNECKERCSKDCNCTGFANKDIQNGGSGCVIWTGELMDMRNYVVGGQDLYVKIGLYN

SEQ ID NO: 45893 - protein, 440 aa, Arabidopsis thaliana
  peptide (1)..(440): Ceres Seq. ID no. 15168941
MRGVTPNYYHSYTFFFFFFVVLLALFLHVFSINTLSSTETLTISSNRTIVSPGNIFELGFFKTTTSSRNGDHWYLGIWYKSISERTYVWVANRDNPLSKSIGTLKISYANLVLLDHSGTLVWSTNLTRTVKSPVVAELLDNGNFVLRDSKGNYQNRFLWQSFDYPVDTLLPEMKIGRDLKTGHETFLSSWRSPYDPSSGDFSFKLGTQGLPDFYLFKKEFLLYRSGPWNGVGFSGIPTMQNWSYFDVVNNFIENREEVAYSFKVTDHSMHYVRFTLTTERLLQISRWDTTSSEWNLFGVLPTEKCDLYQICGRDSYCDTKTSPTCNCIKGFVPKNVTAWALGDTFEGCVRKSRLNCHRDGFFLLMKRMKLPGTSTAIVDKTIGLNECKERCSKDCNCTGFANKDIQNGGSGCVIWTGELMDMRNYVVGGQDLYVKIGLYN

SEQ ID NO: 45894 - protein, 268 aa, Arabidopsis thaliana
  peptide (1)..(268): Ceres Seq. ID no. 15168942
MKIGRDLKTGHETFLSSWRSPYDPSSGDFSFKLGTQGLPDFYLFKKEFLLYRSGPWNGVGFSGIPTMQNWSYFDVVNNFIENREEVAYSFKVTDHSMHYVRFTLTTERLLQISRWDTTSSEWNLFGVLPTEKCDLYQICGRDSYCDTKTSPTCNCIKGFVPKNVTAWALGDTFEGCVRKSRLNCHRDGFFLLMKRMKLPGTSTAIVDKTIGLNECKERCSKDCNCTGFANKDIQNGGSGCVIWTGELMDMRNYVVGGQDLYVKIGLYN

SEQ ID NO: 45895 - DNA, 1198 bp, Arabidopsis thaliana
  misc_feature (1)..(1198): Ceres Seq. ID no. 13576133
  misc_feature (1)..(1198): Ortholog of  Ceres SEQ ID NO 15171717 as cited in SEQ ID NO 57090
gaatttctacaaagataatgtggattcaccaaaaattcagaggaaggacacgacaatggtgaattcgtacgttcctcttcgtttcaccattttcatctccttctccatcgcagcagcttcatccttcaaactccactccgcttctcattctccgtcgtcatttccgaaagccaccggcgacgatctactctccgttctcggacctccctccgccgcgtcgtgcctcaacccaatcgtctctcgagagatcaaatcgtgtcttaaattcctcgtcccattcaaatcggataaacctaaacccgaatttggacgatgctcgcctcgtactggactctgttccggaaaaattgacgccgttgagagacggagcaagtttgaagaggagaattctctaatctggtggccaccggaatcggttctagagcttgctcgtctcgctgttgactccggtggtgatcccggttcaattcagcgaactctcaatccgaaaatgatcccggttcctgatgttgaacgatcaagaaaagataaatgtcaacttactagaactccttatggtcgtcattttatagcagaggaagtgaactcatatttcgagttcttgtttcatctaattgaatctaggggacctagtgttggattgaatgtttcattgagtagatatgatttgttccatggccatttattccttgcctcagaatctggacgccttggaatattagaactctctagggtttgttcttgtgttcttgaatgtaaccaacagttatcaataaaggaagaatggtttctgattcttaacacaattgttgcagtgtttttagaaaggttgaactatctgattggtgatggtaggtttcatgctaaagagtatccagcctatgacaagaaagtgtttccttacaacatgggatattgccagagaggatctgacgtgaaatacaatgattcaatgaacttgaggaatatcctttggcttgcaccattacctagcaactcttctccagattgggttgctccaggtgtacttgtggttcttgatgcgcatccggatggaatcatataccgagatctcatccctgactatgttaagtttgtaagaacaatatacgaagatgatttgggaacaaccgcagttgatgtcaattacttgaatgtcggagctcacgaacctgactatcagcttttcatgtgctga

SEQ ID NO: 45896 - protein, 398 aa, Arabidopsis thaliana
  peptide (1)..(398): Ceres Seq. ID no. 13576134
NFYKDNVDSPKIQRKDTTMVNSYVPLRFTIFISFSIAAASSFKLHSASHSPSSFPKATGDDLLSVLGPPSAASCLNPIVSREIKSCLKFLVPFKSDKPKPEFGRCSPRTGLCSGKIDAVERRSKFEEENSLIWWPPESVLELARLAVDSGGDPGSIQRTLNPKMIPVPDVERSRKDKCQLTRTPYGRHFIAEEVNSYFEFLFHLIESRGPSVGLNVSLSRYDLFHGHLFLASESGRLGILELSRVCSCVLECNQQLSIKEEWFLILNTIVAVFLERLNYLIGDGRFHAKEYPAYDKKVFPYNMGYCQRGSDVKYNDSMNLRNILWLAPLPSNSSPDWVAPGVLVVLDAHPDGIIYRDLIPDYVKFVRTIYEDDLGTTAVDVNYLNVGAHEPDYQLFMC

SEQ ID NO: 45897 - protein, 380 aa, Arabidopsis thaliana
  peptide (1)..(380): Ceres Seq. ID no. 13576135
MVNSYVPLRFTIFISFSIAAASSFKLHSASHSPSSFPKATGDDLLSVLGPPSAASCLNPIVSREIKSCLKFLVPFKSDKPKPEFGRCSPRTGLCSGKIDAVERRSKFEEENSLIWWPPESVLELARLAVDSGGDPGSIQRTLNPKMIPVPDVERSRKDKCQLTRTPYGRHFIAEEVNSYFEFLFHLIESRGPSVGLNVSLSRYDLFHGHLFLASESGRLGILELSRVCSCVLECNQQLSIKEEWFLILNTIVAVFLERLNYLIGDGRFHAKEYPAYDKKVFPYNMGYCQRGSDVKYNDSMNLRNILWLAPLPSNSSPDWVAPGVLVVLDAHPDGIIYRDLIPDYVKFVRTIYEDDLGTTAVDVNYLNVGAHEPDYQLFMC

SEQ ID NO: 45898 - protein, 235 aa, Arabidopsis thaliana
  peptide (1)..(235): Ceres Seq. ID no. 13576136
MIPVPDVERSRKDKCQLTRTPYGRHFIAEEVNSYFEFLFHLIESRGPSVGLNVSLSRYDLFHGHLFLASESGRLGILELSRVCSCVLECNQQLSIKEEWFLILNTIVAVFLERLNYLIGDGRFHAKEYPAYDKKVFPYNMGYCQRGSDVKYNDSMNLRNILWLAPLPSNSSPDWVAPGVLVVLDAHPDGIIYRDLIPDYVKFVRTIYEDDLGTTAVDVNYLNVGAHEPDYQLFMC

SEQ ID NO: 45899 - DNA, 2205 bp, Arabidopsis thaliana
  misc_feature (1)..(2205): Ceres Seq. ID no. 14309915
  misc_feature (1)..(2205): Ortholog of  Ceres SEQ ID NO 14315354 as cited in SEQ ID NO 58232
  misc_feature (1)..(2205): Ortholog of  Ceres SEQ ID NO 13596392 as cited in SEQ ID NO 62136
  misc_feature (1)..(2205): Ortholog of  Ceres SEQ ID NO 14313244 as cited in SEQ ID NO 66802
  misc_feature (1)..(2205): Ortholog of  Ceres SEQ ID NO 13596394 as cited in SEQ ID NO 68561
gatagattgaagcgtatactctaatttgaccaatctagggtttctagtcacttgaagcttctcttaaaaaacctgtctcactcctcgtcaacctcttcctctcccgctgtcgccaagattgaatcttttttcagttgtggcttcaccggataataaggaattcagtaagagataagttcatcctgacaacatggagaccaagaatgagaattctgatgtttcacgggcagaggagtttaaaagtcaggccaacgaagcttttaaaggtcacaaatactccagtgctattgatctatatacaaaagctattgaactcaacagcaacaacgctgtgtattgggcaaatcgtgcatttgctcacacaaaactggaggaatatggcagtgcaatacaggatgcatcgaaggccattgaagttgattcaagatactataagggctattacaggcgtggtgctgcgtatcttgccatgggaaaatttaaggatgccttgaaggacttccaacaggtaaaaaggctttctcctaatgaccctgatgccacaagaaagctaaaggaatgtgagaaagcagtgatgaaactcaaatttgaagaagcaatctctgtgccagtatctgaaaggcgttcagtagctgagtccattgacttccatacaatagggaacaaacccagatcatcatccatgcccaccaaaacggctttagcagcagttgttgcagcagtaatggtggtggcggtccggggatttgccacaactgagatactcatggtgatggtttcggtggtattagggacattttggtggggtagcttcagtgaggttgagccacaatattctggtgctagaattgagggagaggaagttaccttagattttgtgaaaacgatgatggaggattttaagaaccaaaaaacattgcataaacggtatgcctatcaaatcgtcttacagactaggcaaatcttgctagcactgccttctcttgttgatataagtgttccacatggcaaacatatcactgtttgcggtgacgttcatggtcagttctacgatcttctcaatatctttgagcttaatggcctcccttcggaggagaacccatacctatttaatggcgactttgtggacagaggctcattctccgttgagatcatcctcactttgtttgctttcaagtgcatgtgcccatcatccatatatctagccagaggaaaccatgaaagcaagagcatgaacaaaatttatggttttgagggtgaggttcggtccaagttgagtgaaaaattcgtggatctctttgctgaagttttctgttacctcccgttggctcatgttataaatgggaaggtcttcgtggtacatggaggtcttttcagtgttgacggcgtgaaactctcagacatcagagccattgacagattctgtgagccaccagaggaaggactaatgtgtgaactattgtggagtgatcctcaacctctccctggaagaggcccaagcaagcgaggagttggtctatcatttggtggagatgtgacaaagaggtttttgcaagataacaatttagatttgttggtccggtcacatgaagtaaaagatgaaggttatgaggttgaacatgacggtaaactcataactgtcttctctgcgccaaattactgtgatcagatgggtaataagggagccttcattcgttttgaagctcctgatatgaagccaaacattgttacattctcagcagtgcctcatccggatgtgaagcctatggcatatgcaaacaactttctcaggatgttcaactaaccagcaaaaagcttcttctactcaaaatgctattctaaagactcaagaccagaagtggttcagaaacataatgatataagtttttttttccctttatcttctgcagttttttcatgttgttccagaaaagggaggccatgataattaaaggtacagtatccggatttgatcgttttttttcttcttccttcttttctgataaagattttcactcttcctttaagcttatccagcaacttttgtcccttttgtcttatgttgtaagagggggtaatgtatcattcttattttagatgaaaatcttgtgattactcaacaaaagagtgaccaaatgaccccccaaaactttgtacttaaaatggtttcttgaatcaaaaatcaaaaggtgtttctttaaagcc

SEQ ID NO: 45900 - protein, 537 aa, Arabidopsis thaliana
  peptide (1)..(537): Ceres Seq. ID no. 14309916
METKNENSDVSRAEEFKSQANEAFKGHKYSSAIDLYTKAIELNSNNAVYWANRAFAHTKLEEYGSAIQDASKAIEVDSRYYKGYYRRGAAYLAMGKFKDALKDFQQVKRLSPNDPDATRKLKECEKAVMKLKFEEAISVPVSERRSVAESIDFHTIGNKPRSSSMPTKTALAAVVAAVMVVAVRGFATTEILMVMVSVVLGTFWWGSFSEVEPQYSGARIEGEEVTLDFVKTMMEDFKNQKTLHKRYAYQIVLQTRQILLALPSLVDISVPHGKHITVCGDVHGQFYDLLNIFELNGLPSEENPYLFNGDFVDRGSFSVEIILTLFAFKCMCPSSIYLARGNHESKSMNKIYGFEGEVRSKLSEKFVDLFAEVFCYLPLAHVINGKVFVVHGGLFSVDGVKLSDIRAIDRFCEPPEEGLMCELLWSDPQPLPGRGPSKRGVGLSFGGDVTKRFLQDNNLDLLVRSHEVKDEGYEVEHDGKLITVFSAPNYCDQMGNKGAFIRFEAPDMKPNIVTFSAVPHPDVKPMAYANNFLRMFN

SEQ ID NO: 45901 - protein, 444 aa, Arabidopsis thaliana
  peptide (1)..(444): Ceres Seq. ID no. 14309917
MGKFKDALKDFQQVKRLSPNDPDATRKLKECEKAVMKLKFEEAISVPVSERRSVAESIDFHTIGNKPRSSSMPTKTALAAVVAAVMVVAVRGFATTEILMVMVSVVLGTFWWGSFSEVEPQYSGARIEGEEVTLDFVKTMMEDFKNQKTLHKRYAYQIVLQTRQILLALPSLVDISVPHGKHITVCGDVHGQFYDLLNIFELNGLPSEENPYLFNGDFVDRGSFSVEIILTLFAFKCMCPSSIYLARGNHESKSMNKIYGFEGEVRSKLSEKFVDLFAEVFCYLPLAHVINGKVFVVHGGLFSVDGVKLSDIRAIDRFCEPPEEGLMCELLWSDPQPLPGRGPSKRGVGLSFGGDVTKRFLQDNNLDLLVRSHEVKDEGYEVEHDGKLITVFSAPNYCDQMGNKGAFIRFEAPDMKPNIVTFSAVPHPDVKPMAYANNFLRMFN

SEQ ID NO: 45902 - protein, 409 aa, Arabidopsis thaliana
  peptide (1)..(409): Ceres Seq. ID no. 14309918
MKLKFEEAISVPVSERRSVAESIDFHTIGNKPRSSSMPTKTALAAVVAAVMVVAVRGFATTEILMVMVSVVLGTFWWGSFSEVEPQYSGARIEGEEVTLDFVKTMMEDFKNQKTLHKRYAYQIVLQTRQILLALPSLVDISVPHGKHITVCGDVHGQFYDLLNIFELNGLPSEENPYLFNGDFVDRGSFSVEIILTLFAFKCMCPSSIYLARGNHESKSMNKIYGFEGEVRSKLSEKFVDLFAEVFCYLPLAHVINGKVFVVHGGLFSVDGVKLSDIRAIDRFCEPPEEGLMCELLWSDPQPLPGRGPSKRGVGLSFGGDVTKRFLQDNNLDLLVRSHEVKDEGYEVEHDGKLITVFSAPNYCDQMGNKGAFIRFEAPDMKPNIVTFSAVPHPDVKPMAYANNFLRMFN

SEQ ID NO: 45903 - DNA, 2055 bp, Arabidopsis thaliana
  misc_feature (1)..(2055): Ceres Seq. ID no. 13576107
  misc_feature (1)..(2055): Ortholog of  Ceres SEQ ID NO 15169072 as cited in SEQ ID NO 53955
  misc_feature (1)..(2055): Ortholog of  Ceres SEQ ID NO 15224912 as cited in SEQ ID NO 63475
  misc_feature (1)..(2055): Ortholog of  Ceres SEQ ID NO 13657460 as cited in SEQ ID NO 66115
  misc_feature (1)..(2055): Ortholog of  Ceres SEQ ID NO 13659394 as cited in SEQ ID NO 67049
atgaggttaagcgtttttattattcccctggtggaaagtaggcaagcaagtggtatcatcaacaaacaaagcacttctcttttgattcgattctctctttaccttgaagcttcaatatcaaccaaatcttttttctcaaaatctcaaagaatctctcaaactcagtctcctatctgtctctctgcaaactattaccaaccagataatttagatatggaagctactcagaaacatatgattcaagaaggatcttcaatgttttaccatcaaccatcttcagtcaaacaaatggacctttctgttcagacatttgattcttactgcacacttgaatcctcttcaggcaccaagtctcatccttgtcttaacaacaaaaacaactcttcttcaaccacaagcttttcctctaatgaaagtcccatttctcaagccaacaacaacaacttatcaaggtttaacaatcattcccctgaagaaaacaataactctcccttgagcggttcttcagcgacaaacaccaacgagacagagcttagtctcatgcttaaagatttggagactgcaatgatggagcctgatgtagacaacagctataacaatcaaggcgggtttggacagcagcatggagttgtttcttcagctatgtatagatctatggagatgatctctaggggagatttaaaaggagtgctctatgaatgcgcaaaagctgttgaaaactatgatttggaaatgactgattggttgatctctcagttacagcaaatggtttctgtttctggtgagcctgttcagcgcttaggagcttatatgcttgaaggtctcgttgctaggttagcttcttcgggtagctccatctataaagcattgagatgcaaagacccaacgggtcctgagcttcttacttatatgcatatcttgtatgaagcctgcccttatttcaaattcggttatgaatctgctaatggagctatagctgaagctgtgaagaacgaaagttttgtgcacattatcgatttccagatttctcaaggtggtcaatgggtgagtttgatccgtgctcttggtgctagacctggtggacctccgaacgttaggataacgggaattgatgatccgagatcatcgtttgctcgtcaaggaggacttgagttagttggacaaagacttgggaagctagctgaaatgtgcggtgttccgtttgagttccatggagctgctttatgctgcacggaagtcgaaatcgagaagctaggagttagaaatggagaagcgctcgcggttaacttcccgcttgttcttcaccacatgcctgatgagagtgtaactgtggagaatcacagagatagattgttgagattggtcaaacacttgtcaccaaacgttgtgactctggttgagcaagaagcgaatacaaacactgcgccgtttcttccccggtttgtcgagacaatgaaccattacttggcagttttcgaatcaatagatgtgaaactcgctagagatcacaaggaaaggatcaatgttgagcagcattgtttggctagagaggttgtgaatcttatagcttgtgaaggtgttgaaagagaagagaggcacgagccactagggaaatggaggtctcggtttcacatggcgggatttaaaccgtatcctttgagctcgtatgtgaacgcaacaatcaaaggattgcttgagagttattcagagaagtatacacttgaagaaagagatggagcattgtatttaggatggaagaatcaacctcttatcacttcttgtgcttggaggtaactaataaaaaccttgttcggtttcagaagagattagaaacttcttttaaagtttgcagaatctgtttgtaaaagtaaaactcatgcatgatccgaaggaacaagttgtcaaatgttgtagtagtaagtgatatgttgatgaccccatatatgtttaaggtttatgtttttttttttcttttctcacaacaaactatgatttgacatcaaacttataactctctgtttatgatgtgataaattaatgatatatggttttttc

SEQ ID NO: 45904 - protein, 597 aa, Arabidopsis thaliana
  peptide (1)..(597): Ceres Seq. ID no. 13576108
MRLSVFIIPLVESRQASGIINKQSTSLLIRFSLYLEASISTKSFFSKSQRISQTQSPICLSANYYQPDNLDMEATQKHMIQEGSSMFYHQPSSVKQMDLSVQTFDSYCTLESSSGTKSHPCLNNKNNSSSTTSFSSNESPISQANNNNLSRFNNHSPEENNNSPLSGSSATNTNETELSLMLKDLETAMMEPDVDNSYNNQGGFGQQHGVVSSAMYRSMEMISRGDLKGVLYECAKAVENYDLEMTDWLISQLQQMVSVSGEPVQRLGAYMLEGLVARLASSGSSIYKALRCKDPTGPELLTYMHILYEACPYFKFGYESANGAIAEAVKNESFVHIIDFQISQGGQWVSLIRALGARPGGPPNVRITGIDDPRSSFARQGGLELVGQRLGKLAEMCGVPFEFHGAALCCTEVEIEKLGVRNGEALAVNFPLVLHHMPDESVTVENHRDRLLRLVKHLSPNVVTLVEQEANTNTAPFLPRFVETMNHYLAVFESIDVKLARDHKERINVEQHCLAREVVNLIACEGVEREERHEPLGKWRSRFHMAGFKPYPLSSYVNATIKGLLESYSEKYTLEERDGALYLGWKNQPLITSCAWR

SEQ ID NO: 45905 - protein, 526 aa, Arabidopsis thaliana
  peptide (1)..(526): Ceres Seq. ID no. 13576109
MEATQKHMIQEGSSMFYHQPSSVKQMDLSVQTFDSYCTLESSSGTKSHPCLNNKNNSSSTTSFSSNESPISQANNNNLSRFNNHSPEENNNSPLSGSSATNTNETELSLMLKDLETAMMEPDVDNSYNNQGGFGQQHGVVSSAMYRSMEMISRGDLKGVLYECAKAVENYDLEMTDWLISQLQQMVSVSGEPVQRLGAYMLEGLVARLASSGSSIYKALRCKDPTGPELLTYMHILYEACPYFKFGYESANGAIAEAVKNESFVHIIDFQISQGGQWVSLIRALGARPGGPPNVRITGIDDPRSSFARQGGLELVGQRLGKLAEMCGVPFEFHGAALCCTEVEIEKLGVRNGEALAVNFPLVLHHMPDESVTVENHRDRLLRLVKHLSPNVVTLVEQEANTNTAPFLPRFVETMNHYLAVFESIDVKLARDHKERINVEQHCLAREVVNLIACEGVEREERHEPLGKWRSRFHMAGFKPYPLSSYVNATIKGLLESYSEKYTLEERDGALYLGWKNQPLITSCAWR

SEQ ID NO: 45906 - protein, 519 aa, Arabidopsis thaliana
  peptide (1)..(519): Ceres Seq. ID no. 13576110
MIQEGSSMFYHQPSSVKQMDLSVQTFDSYCTLESSSGTKSHPCLNNKNNSSSTTSFSSNESPISQANNNNLSRFNNHSPEENNNSPLSGSSATNTNETELSLMLKDLETAMMEPDVDNSYNNQGGFGQQHGVVSSAMYRSMEMISRGDLKGVLYECAKAVENYDLEMTDWLISQLQQMVSVSGEPVQRLGAYMLEGLVARLASSGSSIYKALRCKDPTGPELLTYMHILYEACPYFKFGYESANGAIAEAVKNESFVHIIDFQISQGGQWVSLIRALGARPGGPPNVRITGIDDPRSSFARQGGLELVGQRLGKLAEMCGVPFEFHGAALCCTEVEIEKLGVRNGEALAVNFPLVLHHMPDESVTVENHRDRLLRLVKHLSPNVVTLVEQEANTNTAPFLPRFVETMNHYLAVFESIDVKLARDHKERINVEQHCLAREVVNLIACEGVEREERHEPLGKWRSRFHMAGFKPYPLSSYVNATIKGLLESYSEKYTLEERDGALYLGWKNQPLITSCAWR

SEQ ID NO: 45907 - DNA, 2059 bp, Arabidopsis thaliana
  misc_feature (1)..(2059): Ceres Seq. ID no. 13591609
  misc_feature (1)..(2059): Ortholog of  Ceres SEQ ID NO 12778278 as cited in SEQ ID NO 63035
agatcacactcatatcgaatcaaaatctcaaacctttttcttcatttcttcccccctctctctctctcactctgtttctgatgggtctccgattcccacctaaggtgttggaacatatcctctccttcattgattccaacgaggaccggaactctgtttctctggtctgcaagtcatggtttgagacagaacggaagactaggaagcgagtctttgtcggaaactgttacgcggtcagtcctgctgcggttacacgacggttcccggagatgagatctttgactttgaaggggaagccacacttcgctgactataatctcgttcctgatggttggggtggttatgcttggccgtggattgaagctatggcggcgaaaagttcgtctcttgaagagatcagaatgaagaggatggtggtgactgatgagtgcttagagaaaattgctgcttcgtttaaggattttaaagtccttgtgttgacttcttgtgaaggtttctctactgatggtatcgctgctattgcagctacttgcaggaacttgagagtgttggaactacgagagtgtattgttgaagatttaggaggagattggcttagctattttccagagagttcaacttctttggtctctcttgacttctcttgtttagattctgaggttaaaatctcggatttagagcgtcttgtgagcagatctccaaacttgaagtctttgaagttgaatccagctgtgactctagatggactcgttagcttacttcgttgtgctccacaactgactgagctcggcacaggttctttcgcagctcaattgaaacctgaagcgttttcaaagttatcagaagctttttcaaactgtaagcaacttcagagcttatctggtctctgggatgtcctccctgaatatcttccagctctttattctgtctgtcctggtcttacctcgttgaacttgagctacgctactgtccgaatgcctgatcttgttgagcttcttaggcgatgctcgaaactgcagaagctatgggtgatggacttgattgaggacaaaggtcttgaagctgttgcctcatattgcaaggaactgcgagaactgagggtgtttccatctgagccagatcttgatgcaaccaacatacctctgacggaacaaggcctggtctttgtgtctaaaggctgtcgaaagcttgagtctgttctctacttctgtgtccagttcacaaacgcagctttgtttaccatagcaagaaaacgtccgaatctcaagtgcttccgtctctgtgtgatagagccatttgctcctgattacaaaacaaatgagccacttgataaaggattcaaagccatagctgagggatgcagggatcttcgacggctctccgtctctggtcttctctctgacaaggccttcaaatacattgggaaacatgccaagaaggttaggatgctatcaatagcatttgctggggacagtgatttgatgcttcatcacttgttgtcgggctgtgagagtttaaagaagcttgagatacgagactgcccttttggagacactgcactactggagcacgctgccaagctagagaccatgcgatccctttggatgtcatcttgctttgtaagttttggtgcttgcaagcttctaagtcagaaaatgccaaggctcaatgtcgaagtcattgatgaacatcctccagagtcaagacctgagagctctccagttgagaggatatacatatacagaacagtcgcaggaccgagaatggatacgcctgaatttgtgtggacgatacacaagaatcctgagaatggagtttcacatctagccataaagtaaacttgctgcttcagtcatattttcctttccatcttcagtttttgcagacattgttgtgggagagattcaccttccatttgttccctttcatattgtttttactaagatattagaatatcagtgatagaagcatttcatagcttgtactctgttaaacaaacaaaaccttgtgtttggaataaaattatcattttataagatttatagtaaaagaagtttgt

SEQ ID NO: 45908 - protein, 611 aa, Arabidopsis thaliana
  peptide (1)..(611): Ceres Seq. ID no. 13591610
ITLISNQNLKPFSSFLPPSLSLTLFLMGLRFPPKVLEHILSFIDSNEDRNSVSLVCKSWFETERKTRKRVFVGNCYAVSPAAVTRRFPEMRSLTLKGKPHFADYNLVPDGWGGYAWPWIEAMAAKSSSLEEIRMKRMVVTDECLEKIAASFKDFKVLVLTSCEGFSTDGIAAIAATCRNLRVLELRECIVEDLGGDWLSYFPESSTSLVSLDFSCLDSEVKISDLERLVSRSPNLKSLKLNPAVTLDGLVSLLRCAPQLTELGTGSFAAQLKPEAFSKLSEAFSNCKQLQSLSGLWDVLPEYLPALYSVCPGLTSLNLSYATVRMPDLVELLRRCSKLQKLWVMDLIEDKGLEAVASYCKELRELRVFPSEPDLDATNIPLTEQGLVFVSKGCRKLESVLYFCVQFTNAALFTIARKRPNLKCFRLCVIEPFAPDYKTNEPLDKGFKAIAEGCRDLRRLSVSGLLSDKAFKYIGKHAKKVRMLSIAFAGDSDLMLHHLLSGCESLKKLEIRDCPFGDTALLEHAAKLETMRSLWMSSCFVSFGACKLLSQKMPRLNVEVIDEHPPESRPESSPVERIYIYRTVAGPRMDTPEFVWTIHKNPENGVSHLAIK

SEQ ID NO: 45909 - protein, 585 aa, Arabidopsis thaliana
  peptide (1)..(585): Ceres Seq. ID no. 13591611
MGLRFPPKVLEHILSFIDSNEDRNSVSLVCKSWFETERKTRKRVFVGNCYAVSPAAVTRRFPEMRSLTLKGKPHFADYNLVPDGWGGYAWPWIEAMAAKSSSLEEIRMKRMVVTDECLEKIAASFKDFKVLVLTSCEGFSTDGIAAIAATCRNLRVLELRECIVEDLGGDWLSYFPESSTSLVSLDFSCLDSEVKISDLERLVSRSPNLKSLKLNPAVTLDGLVSLLRCAPQLTELGTGSFAAQLKPEAFSKLSEAFSNCKQLQSLSGLWDVLPEYLPALYSVCPGLTSLNLSYATVRMPDLVELLRRCSKLQKLWVMDLIEDKGLEAVASYCKELRELRVFPSEPDLDATNIPLTEQGLVFVSKGCRKLESVLYFCVQFTNAALFTIARKRPNLKCFRLCVIEPFAPDYKTNEPLDKGFKAIAEGCRDLRRLSVSGLLSDKAFKYIGKHAKKVRMLSIAFAGDSDLMLHHLLSGCESLKKLEIRDCPFGDTALLEHAAKLETMRSLWMSSCFVSFGACKLLSQKMPRLNVEVIDEHPPESRPESSPVERIYIYRTVAGPRMDTPEFVWTIHKNPENGVSHLAIK

SEQ ID NO: 45910 - protein, 522 aa, Arabidopsis thaliana
  peptide (1)..(522): Ceres Seq. ID no. 13591612
MRSLTLKGKPHFADYNLVPDGWGGYAWPWIEAMAAKSSSLEEIRMKRMVVTDECLEKIAASFKDFKVLVLTSCEGFSTDGIAAIAATCRNLRVLELRECIVEDLGGDWLSYFPESSTSLVSLDFSCLDSEVKISDLERLVSRSPNLKSLKLNPAVTLDGLVSLLRCAPQLTELGTGSFAAQLKPEAFSKLSEAFSNCKQLQSLSGLWDVLPEYLPALYSVCPGLTSLNLSYATVRMPDLVELLRRCSKLQKLWVMDLIEDKGLEAVASYCKELRELRVFPSEPDLDATNIPLTEQGLVFVSKGCRKLESVLYFCVQFTNAALFTIARKRPNLKCFRLCVIEPFAPDYKTNEPLDKGFKAIAEGCRDLRRLSVSGLLSDKAFKYIGKHAKKVRMLSIAFAGDSDLMLHHLLSGCESLKKLEIRDCPFGDTALLEHAAKLETMRSLWMSSCFVSFGACKLLSQKMPRLNVEVIDEHPPESRPESSPVERIYIYRTVAGPRMDTPEFVWTIHKNPENGVSHLAIK

SEQ ID NO: 45911 - DNA, 1536 bp, Arabidopsis thaliana
  misc_feature (1)..(1536): Ceres Seq. ID no. 12560946
  misc_feature (1)..(1536): Ortholog of  Ceres SEQ ID NO 14314620 as cited in SEQ ID NO 56872
  misc_feature (1)..(1536): Ortholog of  Ceres SEQ ID NO 15178460 as cited in SEQ ID NO 66107
tcttccgttgccttttcgctttctccgtacacttggccttccttctcgcgatcaaaccctaggtcccgccattgttggtcccagacttcaatcgaagctccaatttcactaatttcaggtgttgtttattctctggaggttggtgatacaatggattctactgctgcaaccaaacgtgttgttgacccacttactgttgggagtgcgtttgtcaatcagtactactacattttctgtaacatgcctgagcatctgccccggttttatcaagagatcagtagagttggccgtgttggacaggacggagtcatgcgtgatttctccacttttcaaggtataagtgaggagcttaagagactgacttatggagattgcaactcggctgagataaccagttatgatactcaagagtctcacaatgggggtttccttctcttcgttactggatacttcactctaaacgagagatcgagaaggaaattcacccaaacttttttccttgccccgcaagaaaagggtttctttgttctgaatgacatcctcagatttgttaatgatgatgctaaggataatgttccagagaccatagatggggaagttgtttctgggataaactctacaacacccactattatcaatgctcctacaggcatgaagggttcggagcaagctgcatgtgtttcagtgaatcctgtttgtaaggaagtgtccaaacccttggataatgagaatgctaaggataatgttctggtacctgagattgctaatgaagttgcaaggactgagataacttgcaaagaagttgcagatgattcacagaaaaattatgaccctgatgatggacttgcagatgctcccaagaaatcctatgcctctgtgttgaaggttacgaaagataaatttggagttccagctgtctctttaccttctccaaagaagatacctaaagaccaagaacatcaagcgccttcagatccttctacaggccagatactcaaagaccaaggtcaacaagcatcttcagatccttctcaagtgatagaatctgatacagtttctgagtctgttgatgcttctgaaaatgggcacaatcaggaagcggtagctgagggtacatctatttatgtgagacatcttccttttaatgccaacattgacatgcttgaggctgaatttaagcaatttggagctattaccaatggtgggattcaagtcataaatcaaaggggccttggttatccttatggttttgttgagtttgaggaggcagatgctgcccacagagcaatagaggcttcacctgtgaagattggtggactgagagcttttgtggaggagaagctatcgacatcaagaggtaaaagaggaaatggaaacgtgggatacggaaataggaatgtgggagtgggaatgagaggaagaggaagttatggatatggctatgattacaggaggggaggtcgaggtcctggaggaggaggaaggtcttttaaccgtagaggcaatgaatacgtcgccagcatcaactcgtactag

SEQ ID NO: 45912 - protein, 511 aa, Arabidopsis thaliana
  peptide (1)..(511): Ceres Seq. ID no. 12560947
SSVAFSLSPYTWPSFSRSNPRSRHCWSQTSIEAPISLISGVVYSLEVGDTMDSTAATKRVVDPLTVGSAFVNQYYYIFCNMPEHLPRFYQEISRVGRVGQDGVMRDFSTFQGISEELKRLTYGDCNSAEITSYDTQESHNGGFLLFVTGYFTLNERSRRKFTQTFFLAPQEKGFFVLNDILRFVNDDAKDNVPETIDGEVVSGINSTTPTIINAPTGMKGSEQAACVSVNPVCKEVSKPLDNENAKDNVLVPEIANEVARTEITCKEVADDSQKNYDPDDGLADAPKKSYASVLKVTKDKFGVPAVSLPSPKKIPKDQEHQAPSDPSTGQILKDQGQQASSDPSQVIESDTVSESVDASENGHNQEAVAEGTSIYVRHLPFNANIDMLEAEFKQFGAITNGGIQVINQRGLGYPYGFVEFEEADAAHRAIEASPVKIGGLRAFVEEKLSTSRGKRGNGNVGYGNRNVGVGMRGRGSYGYGYDYRRGGRGPGGGGRSFNRRGNEYVASINSY

SEQ ID NO: 45913 - protein, 461 aa, Arabidopsis thaliana
  peptide (1)..(461): Ceres Seq. ID no. 12560948
MDSTAATKRVVDPLTVGSAFVNQYYYIFCNMPEHLPRFYQEISRVGRVGQDGVMRDFSTFQGISEELKRLTYGDCNSAEITSYDTQESHNGGFLLFVTGYFTLNERSRRKFTQTFFLAPQEKGFFVLNDILRFVNDDAKDNVPETIDGEVVSGINSTTPTIINAPTGMKGSEQAACVSVNPVCKEVSKPLDNENAKDNVLVPEIANEVARTEITCKEVADDSQKNYDPDDGLADAPKKSYASVLKVTKDKFGVPAVSLPSPKKIPKDQEHQAPSDPSTGQILKDQGQQASSDPSQVIESDTVSESVDASENGHNQEAVAEGTSIYVRHLPFNANIDMLEAEFKQFGAITNGGIQVINQRGLGYPYGFVEFEEADAAHRAIEASPVKIGGLRAFVEEKLSTSRGKRGNGNVGYGNRNVGVGMRGRGSYGYGYDYRRGGRGPGGGGRSFNRRGNEYVASINSY

SEQ ID NO: 45914 - protein, 431 aa, Arabidopsis thaliana
  peptide (1)..(431): Ceres Seq. ID no. 12560949
MPEHLPRFYQEISRVGRVGQDGVMRDFSTFQGISEELKRLTYGDCNSAEITSYDTQESHNGGFLLFVTGYFTLNERSRRKFTQTFFLAPQEKGFFVLNDILRFVNDDAKDNVPETIDGEVVSGINSTTPTIINAPTGMKGSEQAACVSVNPVCKEVSKPLDNENAKDNVLVPEIANEVARTEITCKEVADDSQKNYDPDDGLADAPKKSYASVLKVTKDKFGVPAVSLPSPKKIPKDQEHQAPSDPSTGQILKDQGQQASSDPSQVIESDTVSESVDASENGHNQEAVAEGTSIYVRHLPFNANIDMLEAEFKQFGAITNGGIQVINQRGLGYPYGFVEFEEADAAHRAIEASPVKIGGLRAFVEEKLSTSRGKRGNGNVGYGNRNVGVGMRGRGSYGYGYDYRRGGRGPGGGGRSFNRRGNEYVASINSY

SEQ ID NO: 45915 - DNA, 1881 bp, Arabidopsis thaliana
  misc_feature (1)..(1881): Ceres Seq. ID no. 15168973
  misc_feature (1)..(1881): Ortholog of  Ceres SEQ ID NO 14310132 as cited in SEQ ID NO 20638
gagaaccctaaaaagaagaagataagaaatcggaaatgggcatcaaggaccttctcagattcatgaaaccttatatccttcccattcacatccagaaatacgccgggaaacgagtgggaatcgatgcttattcatggctacacaaaggagcatactcatgtagtatggagttgtgtttagacactgatgggaagaagaagctgaggtacattgattactttatgcatagagtcaaccttcttcaacactatgagatcattcctgtcgttgttctcgatggtggtaatatgccctgcaaggctgccactggtgatgaacgtcataggaagcgaaaggctaactttgacgctgcaatggtgaagctgaaggaagggaatgtcgcagcagctactgagctttttcagagagcagttagtgtaacatcatccatggctcatcaattgattcaggttctgaaatcagaaaacgtcgaatttattgtagctccctatgaggctgatgctcagctagcatacctatccagcctcgaactggaacaaggcgggattgctgctgttataaccgaagacagcgatttacttgcatatggctgcaaagctgttatctttaagatggaccgctatggtaaaggagaggaactagttctagataatgtttttcaagctgttgatcaaaagccttccttccagaattttgatcaagagctattcactacaatgtgcgtattggcgggctgtgattttctcccctcggttcctggtgttggtatttcaagagctcatgcattcatctccaagtaccagagtgtagaactcgttttgtcatttctcaagacaaaaaaaggcaaactagttcctgatgattattccagctctttcacggaagcagtttcagtttttcagcacgcacgtgtatatgactttgacgctaagaagctcaagcacttgaaacccctctcccacaacctcctgaatttaccagttgaacaacttgagttcctgggaccagatctgtcgccatctgttgctgttgcaattgctgaaggtaatgttgatcccataaccatgaaagcttttaaccacttctcggtttctaggaaaccgttgaagacgcctgttcgatcattcaaggaacaggaaaagggaagctcctttttggtatgttctttgtctaaaagtgaggaaataatagagctcaaaaggactgcagatgaagctatgattgatccagaagctattgtgaagaagaagatgtactctaaacaagattcagatctatacaaactgcttgcgcagcctaacagggatcaagtggttacccgacccagcaatccctcacttattccggacaacaacccgttcaagattagaaaaaccgatgaaatcaatctggaaatcgcagaatacggtgtgcaagaactcgctgattcgtttgtgaccaaaagcaaagcagtggacgtggcttcttcttcaccaaactctcacgaacacgaggatcaaaaagagtgtgttacaatcgatctgtccaaacttgatgccgctgaatcaaacaggacagtgagaagaacagagtgaaagaaacatttgaaacaacagaagtagatctagctgaagttcaagatcatgtgaacatgacgacaaagagagtgcgtggaacaaaacctagaaccgagaatttcaaagtgaaaacaagctgtaaaagttcagagaacaacaagactataatcaagaagaaacacagtatattagatttcttccagcgattgtaatctctttaattttggtatgtaatcttttcttagcttctttataactcttaatttatgattatttggagaatatagagacgaacaccatatattattacaaacaactccatatc

SEQ ID NO: 45916 - protein, 512 aa, Arabidopsis thaliana
  peptide (1)..(512): Ceres Seq. ID no. 15168974
MGIKDLLRFMKPYILPIHIQKYAGKRVGIDAYSWLHKGAYSCSMELCLDTDGKKKLRYIDYFMHRVNLLQHYEIIPVVVLDGGNMPCKAATGDERHRKRKANFDAAMVKLKEGNVAAATELFQRAVSVTSSMAHQLIQVLKSENVEFIVAPYEADAQLAYLSSLELEQGGIAAVITEDSDLLAYGCKAVIFKMDRYGKGEELVLDNVFQAVDQKPSFQNFDQELFTTMCVLAGCDFLPSVPGVGISRAHAFISKYQSVELVLSFLKTKKGKLVPDDYSSSFTEAVSVFQHARVYDFDAKKLKHLKPLSHNLLNLPVEQLEFLGPDLSPSVAVAIAEGNVDPITMKAFNHFSVSRKPLKTPVRSFKEQEKGSSFLVCSLSKSEEIIELKRTADEAMIDPEAIVKKKMYSKQDSDLYKLLAQPNRDQVVTRPSNPSLIPDNNPFKIRKTDEINLEIAEYGVQELADSFVTKSKAVDVASSSPNSHEHEDQKECVTIDLSKLDAAESNRTVRRTE

SEQ ID NO: 45917 - protein, 503 aa, Arabidopsis thaliana
  peptide (1)..(503): Ceres Seq. ID no. 15168975
MKPYILPIHIQKYAGKRVGIDAYSWLHKGAYSCSMELCLDTDGKKKLRYIDYFMHRVNLLQHYEIIPVVVLDGGNMPCKAATGDERHRKRKANFDAAMVKLKEGNVAAATELFQRAVSVTSSMAHQLIQVLKSENVEFIVAPYEADAQLAYLSSLELEQGGIAAVITEDSDLLAYGCKAVIFKMDRYGKGEELVLDNVFQAVDQKPSFQNFDQELFTTMCVLAGCDFLPSVPGVGISRAHAFISKYQSVELVLSFLKTKKGKLVPDDYSSSFTEAVSVFQHARVYDFDAKKLKHLKPLSHNLLNLPVEQLEFLGPDLSPSVAVAIAEGNVDPITMKAFNHFSVSRKPLKTPVRSFKEQEKGSSFLVCSLSKSEEIIELKRTADEAMIDPEAIVKKKMYSKQDSDLYKLLAQPNRDQVVTRPSNPSLIPDNNPFKIRKTDEINLEIAEYGVQELADSFVTKSKAVDVASSSPNSHEHEDQKECVTIDLSKLDAAESNRTVRRTE

SEQ ID NO: 45918 - protein, 469 aa, Arabidopsis thaliana
  peptide (1)..(469): Ceres Seq. ID no. 15168976
MELCLDTDGKKKLRYIDYFMHRVNLLQHYEIIPVVVLDGGNMPCKAATGDERHRKRKANFDAAMVKLKEGNVAAATELFQRAVSVTSSMAHQLIQVLKSENVEFIVAPYEADAQLAYLSSLELEQGGIAAVITEDSDLLAYGCKAVIFKMDRYGKGEELVLDNVFQAVDQKPSFQNFDQELFTTMCVLAGCDFLPSVPGVGISRAHAFISKYQSVELVLSFLKTKKGKLVPDDYSSSFTEAVSVFQHARVYDFDAKKLKHLKPLSHNLLNLPVEQLEFLGPDLSPSVAVAIAEGNVDPITMKAFNHFSVSRKPLKTPVRSFKEQEKGSSFLVCSLSKSEEIIELKRTADEAMIDPEAIVKKKMYSKQDSDLYKLLAQPNRDQVVTRPSNPSLIPDNNPFKIRKTDEINLEIAEYGVQELADSFVTKSKAVDVASSSPNSHEHEDQKECVTIDLSKLDAAESNRTVRRTE
